United States Patent Application Publication US 2007/0161031 A1 - sequence listing, part 2

SEQ ID NO: 1251 - DNA, 2300 bp, Homo sapien
aatgaagaggatcctggaatgagtctcttttttcttgtattttttattattataatttttttgaggcagggtctccctctgttgcccaggctggagtgcagtggtgtgatcatagctcactgtagcctcaaactcctgggcccaggagatccttctgcctcagcctcctgagtagctaagacttacacgtgtgtgccacaatgcctatttaaaaattttttttttattcttctttttgagatggagtctcgctctgtcgcccaggctgttgtgcagtggcattatcttgactcactgcaacctccgcttcccaggttccagtgaaactgttgcctcagcctcccaagtagctgggattataagcatgtgccaccatgctcggctaatgtattttgtgtttttagtagaaacagggttttgctatattagccaggctggtcttgaactcctgacctcaagtgatcctccacctcagcctcccaaagtgttgggattacaggtgtgagccacagcccctggccttaaaaaatcctttttttagagacagagtctcactgtgttgccaaggctggtctcaaactactggcctgaagtgattctcctgtctcagcctccggagttgttgggattacagacataagccacaacacccagcctcctcttacttttaaatacattctttcccttattatcctagaagatgaacccagaatattttccatgggcttgtagatgttgtaaatggactacttctgtagcaaaatcaatttatttgcaattaatgcattaaaataagaggtgattaactacggttgctttatttatttatttatttatttatttatttatttattttgagatggagtcttgctctgtcacccaggctggagtgcagtggcatgacctcggctcactgcaacctccacctcctgggtttgcagcctccacctccttggttcccgagtagctgggactacaggcatgtgccaccacagccagctaatttttgcatttttagtagagatgaggtttcaccatgttggccaggctggtctcgaactcctgacctcaggtgatccacccgccttggcctcccaaagtgctgggattacagacgtgaaccaccgtgcccggcctgctttatatatataatattaattgttgggtgtttttaaagctccatgcaaagaatggatctgctttaggaaaagccttttgaataaaagtactcactttttccaggaatttacattaacaatttatgttcttctaagagacattactaataatatctgcaaagatgttagaaaacatgcttcaaacctttttctcttttttcctggtgagaagaacttgtgtccttcaaaagaagattacctttgtctttcgaagtcaggaatttataaaaagagtttgctggatggaaaaatcataaaggccataactctaaaacctaatgtaaagaagaacagttagagctgtccaaagatgggaaagaatgtcttaccagtaagccagtttcccagaactggagtgggggggccctcaaatgtaagctggttgaacacttaaggtagaatcacccggggttgggcagaggttgaagaaaagctgcgagcgtcttatgaaggggtgggcctgagtgtctccttatgtctttttttttttttttcagtcctgaacttctatgatgcagtaaaatgtaaaggatattattgacttgtatttttcgctttacctatttgggatttcctaatgtagatgggcttctcaattttaaaacttaacctttaatacattttcagttccaaaaaaatttgataacttctgttttgtacctaacttccactactacagtatgtggctctgagccagccaaagattcatgatctgttgactacacagatgtttgcgggctgatcatgcctgcacatctgtagttgggacagttcaaaatttaaaagcagactgcacagatggttctagacgtgctttttgaattgtgtacctttgtaatgttttggggggatatcagaggacagccagaatttgttaccagacttttaaatcgtacaggtctttgtactccaactaaacctacccatccattagcaagtgtacagagatatcgtcctggcaattgtgcatctttctcctttgaccttagcagtttgcatggcagattgtgccaagatgaggcctgtccagggacccatgcaataaaaggttagattcttttaaagctttttgataattattattatttccagaaagatatttttgtttgccccatttaaaaa

SEQ ID NO: 1252 - DNA, 2300 bp, Homo sapien
gcttagcccagcctgtatcaggcactcaagttgtgcagggacagatccagacacttgccaccaatgctcaacaggtatgtgccccagagacacaaggcctgtgttggagaccaggagcagatggcttctgacaggaaaggagcgctcagcacacagctgtcttgccacctcatccttcaaccagaagcaccacccccacaccctccatatccttctgcacccaagaggcatgggtggtaattggaacattagattcaaagtgttttctcttaccatcttgttctcaaggggcaaagaaatgcaagtcaggggaagcctcgaaggtgcctgaaagaaaccttacaggtgtgcacacccatcagacctgggaaatgttcgacagatcgcctgatcgtcaggctgtttccatctttaaacccaagtggctgttgtgttctggcacctcctgtgctctttggaaagcttacttagattttacccctacctcctcttgcatccctaaccagaaaaattgcccttctcctctcctctcgtgccctacaatattgatggctatgagtcacagatggtgagggggctgcctccctgggcttgggggtgttgagggacatgggtattacttgcagaagatggggggtgctggtcaaggggaggcattgttaatggattcttttgcctcagacccaaaaaaagcagcgatcgtttaagagctggacccgtctggcccagttgcatttctggtgatgtatctattgacagtggtgacagagctgagtttgtagagcaggtctccaaagatctcatttgggaaaatacgaggaatgagccaaaagcaaggcttctgagttccatatagtctctgggatcattaagggctgtttctgtgcccactccccggcttacctaaggacgcggcttttccgtagctgatactgactcacacccttcccccagcccctctttttaacctcataagattcttccctgggatccaaaaaacataacggcatgggagtgggaggaaatgagaaggaagcttcttggttcctcagaagtcagtttggggctgggcacagtgggtcacgcctgtaatcccagcactttgggagggaggctgaggcaggtgatcacatgaggtcgggagtttgagaccagcctggccaacatggcaaaaccgtttccactaaaaatacaaaattagctgggcgtggtggtgcatgcctgtcatcccagctacttgggaggctgagacacaagaatcacttgaacccaggaggtggaggttgcagtgagctgagattgtgccactgcactccagcctgggcgacagagtgagactctgtctcaaaaaataaaaattaaaaaaagtccgttttgggaacagaactaaagccaaaaaatgggagaggctggggagaagcaagaaagtggtagctgaaggcaatgaaaatctttgtaacaacaggttgtaattatgacaacctaatacttagtaggtgctcagtaaatgtttgttgaatgaagctgaatgaataatatgtaaataaaatgtaaaggtaaatgaaatctcagctaatatgaatggcaatcctgctggccacagagcagttaaccttcttatctatgtggaatattttccatttgtctcaggctcacttgtttattctgcaacatttctggaatactaactttgtatgggctcctgccctcaggcatcttataggctgttggaaggaaaaggaccaaaataaggaacaatagtaaaaaatagtcatgaagcctgtcatacctgttccctttcttgttcctcatagcctcatgggtaggcctgcaggggttgtttttggccatggtgaggacatttgagaggacagtccttgtcttgcaggctggctgtgatgattccaggaaatggtacacagaggacactgctggccaaatgttccataggaacacatgtgcatgcacaccgcagtcttctttctagtttaccgagctgctcccagcagttgtcattatatatgcagttctacatgtcagtacatttatctaaaatccattcacagtccacacataagattttaagtacttgtgataaatgttgtctttgttccactcccggtccctccccttttctcctcccctcctttggcccagagggctgcacagtgcctctctcggaaaaagtacttcataggtttgccatgaggactgctgggaccaaggccacttgctcgccagggtgtttcatattccagtcagatgatctgggtgatacgggtttggtttggagcccacct

SEQ ID NO: 1253 - DNA, 2300 bp, Homo sapien
cccagctgggaagagagccatgggatccagaggtgatgctgagcttgaagattagatttcccagaacagacccagtttcagatattctgggtgttaagggcaacctgaattcaaattccatttctgctacagaacaagagcctcaaaaagaccccctagaaacacccccagggcgcttgcaactgctttcctgtgcacctttcatgtcctagaccttagtcccatttcccaggatctatgattgagaagaaccagccaggcagttccacagagggaggacagtgctgcatattttgggggtgccatcttcagctcatagagagaagatgggttaactcagcccaggcaccacatccctagtggggccttggggtccagaaactgtccccagcttccagtagaggatccgggcataacctgccctggggcacccggctctggccctgggcacacctggaccaggagcagcagaagagattcaggtcagaccccagagggcacccccagctaggcagaggggaaaggatcactatggggtaggggtgtgggccggttgccaagcccagtttagggaccccacagatccctgcagcccacggccctgcctccctccctccctcactggcgctcagcagatcaatgctgcctttgctgacagctgagaatcgagctcgccttcccgccccttcccccgcccctcccgctcggcttcgtccctcgagatcctcccggaggaaccgggaagagtttgctgcggaaggctcaccctggggcagggcctgcggagggagcggctggtgtggccgcagctttccgtggaggaagagggaaagaggatcgggaaacccaagttaccaaccctgtgcagggcccaggagggctaaaggagagggactgccccctacagccagagagatggaggtcggggactaagaaaaactttccagctggagagggaatgccctgggacaaagtatccccttttctggctgggattctgtgggccttgggtagggggtgtgtgtcccctctaaggctggcttagagctcatctcccaacactccatctgcccaaacccagttccctgacctgggagtggggcaggggagcaggcccctccatcggggaggatcctcttctgggcagggtggctcttcccccatcacgatgaagggaagctcagaggtggcagttggtgggagaaagacacacccaggcccactgtgttccacacaccctgatgctgcctagcagcccgtgggctccaggcctttcaggtaagagcaggacaaccgccgctgcccacccagccacacacagcactgggcacactttaagcacccgcaccaggcacacagtgctcgaccccaacggacacacctcatccccttcggactccacctccactttcgcagccacccacacccgacccataactcacacctcactgactccatccccgcacctggtagacccacagccacccaccctgcacacacaagtagacgccgttccaccggtctacacctaaactccacgggacactgcgtcccttcccctgccgcccgcggccacaactccacattccactttccacaagcacacacgaggcgtcccaccccgggctggccttcggggccacactgccccacgcagcggtggacaccacttgcacgcgtccggcttcccggccccgcgcgctgcccccgccacgcggttcggcccaggcaccaactcggccgcccgtgcgccctgccccgccgcctgctccgcgcgttccctccctccgcctcgcctcgcttgctcgctcgctccctcccgatttgggaaggcggccgcggggcgggcgggggaggggcggggcgggggagggtgacatgtgagcggcgcgcgccggtggcaggtggaaaggcgagcggcatggagcgcgtaataagagagttggagtcggaaagagcagccccagtcgccggggaagcgggaggtcagtgcgggctccggcggcccccaggctccgagcgcccgcccgcggccccggcccggcccctagcccccgccgcccgcgcccgccccgggtcgcccctctggccccgggtccgagccatgcgtctctgagcgccccgagcgcgcccccgccccggaccgtgcccgggccccggcgcccccagcccggcgccgcccatggccgaggcccccccgcgccgcctcggcctgggtcccccgcccggggacgccccccgcgcggagctagtggcgctcacggccgtgcagagcgaacagggcgaggcgggcgggggcg

SEQ ID NO: 1254 - DNA, 2300 bp, Homo sapien
tgagccctgggctgacctctggggcacttctcccaagacatcttaaaaccaagctggggccaaggccaccacttgtggatggctagacctggaggaaccctgagtcagtctatttccactgccagacctgctactcacagatgagtgactacctctctgagctgcagcctgcagcagggggcaattgagatagttgtgaggtccagtagcttggggcttgagggctgctgcctttggtgcccagcacagagctgtaactccagggaattccaattctgatttccacataattttctgaaaataatgttctcctctcttggctctgtaaccccctgccaggggcaccttggctgtcctgtccctccaacaatctaaccctctccctcatgttgtaattgcagatttttgctggtcttcagctgcctggtgctgtctgtgctgtccactatccaggagcaccaggaacttgccaacgagtgtctcctcatcttggtaagtgctgggagtccgggactgaggggggctgtgtgaggtagcacctctgggctgggagtccgggactgaggggggctgtgtgaggtagcacctctgggctgggagtccgggactgaagggggctgtgtgaggtagcacctctgggctgggagtccgggactgaggggggccgtgtgaggtggcacctctgggctgagggctgaaggtggaaagaggcttctcataccatggctcagagagcagcttgctgtgctgtgttccctcagctgtggctgcccctctctgggcatcatctccactttatagcaagtgttgggggacctcctgcctctatgcaagggcttatgatgggtccagaatagaagtgagtaggctccaccccttctcaggacaaaatctgcaaactccacgtgtggtggattttaggtcagtttttgcctaaacacaaaacaccaaatggaagcccctcagagggagacagctgacagccagcaaccccttttgtcaccaggtcagagttagggagtctgagacagctgggacagggagggcctgttgaggagcagaaaaatccgatcagttcatggggaccggaaggggaggacacactagggcttttagtcttcttgcaggaggcggagggggccacctgccctccggaatcgtcaagtccaggaaactccaggagaggggtccgaggaggccctggtccccctaacccagggactcttggctgggtccgcgctgtgacctgggccccagttctggagactgaggaccagaactcaggcccctggtcccacaggaattcgtgatgatcgtggttttcggcttggagtacatcgtccgggtctggtccgccggatgctgctgccgctaccgaggatggcagggtcgcttccgctttgccagaaagcccttctgtgtcatcggtaatgaggcgcgccccgcccgacctgacccctgaccccaggagccagggtgacgcctttactcccaatcccgactctgaccctggagacccgcacagattcagcggaccctccccctccctccccagtcccctgccacatccccagaagtccccgcctccgggtccgtgcgcggggtaggctggctgtgatctcgccgcccccgcccctgcagacttcatcgtgttcgtggcctcggtggccgtcatcgccgcgggtacccagggcaacatcttcgccacgtccgcgctgcgcagcatgcgcttcctgcagatcctgcgcatggtgcgcatggaccgccgcggcggcacctggaagctgctgggctcagtggtctacgcgcatagcaaggtgaggcctgcaagccgcgcgcggagacccgagggcgtgtctggggcacgaccagagcgggcagggcggagagggcgaggtcagaggggctgtctccgtgctgggaaggggtgtggcctgcgggggttggagccctagcaggaggcgaggtctaagcgggtggggcgaagtggattctgaattaggtaggggcgggcctaggagtccggaccggatcagggggcggggccggagaggcggggcttgagggtttcccctggatgcttctgggtttgaagggaccactcgtaccacaaagtgggcagctgaggtgggacttgagggtggggctggagcggggctagggtgggccccaggtggaagcctgaaagtgggacttgggggacggggcaaggtaggccgggtgctggagtcctgagcctggaacctggagactcaaggcaggcggggtgagggtgggggtgggaatgggggtcggggtag

SEQ ID NO: 1255 - DNA, 2300 bp, Homo sapien
ccagataagtgtgaggcatggccaggtttaagaatttctgtgagaagccttacctgtagagaaagattcaggagaataaattccagggtgtagctttttacactttgcaaaaatgtgaccacacccatggtcatttatcactacccacaagctctcaggctgaccaggcaagatcaccgtctccctttcacagagcagaaagctgaggccctggggaatcaagtaatactccccgctcaacactcaacagtcacagctggttggtggtggaggtcacacacctgtgggtggcagagatatgattagaacttgggcctctggctgggcgcagtggctcatgcctgtaatcctagcactttggaagcctgaggtgagagggtcacttgaggccagggattcgagataagcctgaggccctcctcactcccccacgccgcccctcccccccgctcccttctctatttaaaaaaataagaagaaagagggaagaaaagaccttgggcccctgaattctcactctagggctctcccctctacatcaactggataaacccaagttccaggaagtcccaaggatgccacaggtcgggggaaggtcagagaagggagagagagtgtcaaatgcgtggagggtaaggttctgggaggctgtctcctggccacaggaaagactccagttgccctaaggacttggaaaacacatggcattcacacgctaactctggctgcctgtgacctcaggacagccactttctctttgtgtgcttctccttatcactgaaatggggctgataatccatgccctgcccccaacaaaatacttgtagaatgtaaagcactttaaaagtccaagttattattgctgttatcaagagaaggccctttgggacagaacttaaatagccttggccgggcgcggtggctcacgcctgtaattccagcactttgggaggccgaggcgggcggatcacgaggtcagcagatcgagaccatcctggctaacacggtgaaaccccgtctctactaaaaatacaaaaaaaattagccgggcgtggtagcgggcgcctgtagtcccagctactcgggagactgaggcaggagaatggcgtgaacccgggaggcggagcttgcagtgagccaagacagcgccactgcagtccagcctgggcgaaagagcgagactccgtctcaaaaaaaaaaaaaaaaagaacttaaatagcctttctttcatctaagggacacttttgagcatctaccacataccaggcactgtgctaggcactgtgcacacatgccctcacttacccctcacaaagggtcagtgctgctgttctttaccttttacagatgaagaaactgaggctcagctgagagttgcaattcattccatcattagttcattcactcagcttttactaaaagcctgctctgggccaggctctgggccaagtgctgagaagaagaagatgaacaagtccttcaggagacgtgcccataaattaataacaactaagtacatgcttcaacagacaaggtgcagtgggaactagagggggagcaacaggctctcctgggggttatgggaatggacagctgacctcctgcggggaccctgcaccgctaaggtgcatgcgccctgtgtagctgtgcagtctcactttgatcaaggctttgctgtgtatttccaggaagcctcttccgccactgagcctcggtctctacctggaaagttaaaaggttgcgtaggcctgacatcctgcagctcttggggggcctaaaactctggccctcccaccccaccttctggtcagttcaagctctaccccagccaagtccgattccgaagccctgagggccagaccgaatccctccgaaagtgccaaataccccgccccagggcggtgctcagagcctggggcgtggccggagtcccaaggggcggggttccagtgggaggggcggggccaagacctagatgcaggcgtgcgcggcccgcccagaagcgtctcgcccagccaatgagcgtccgagggcggggaagccccgcctctgggtataagaatacgccgagcccagctacgcgacgcggaggtttcggagcactacaggttgcgggcctttgtgaccccaggctgcggccgcaaggtgcgcagtagtgggctgggccggggcaccagtcgggtttggttttgctccgcccggccgagctgcagggaccgcacggtgcccgggtctcccgccgcagagcagccgctggcccgggccgggggagccggcgctgaccaccgcgcgctgtcccc

SEQ ID NO: 1256 - DNA, 2300 bp, Homo sapien
tttttttttttgagatagagtctcactctgcccaggctggagtgcagtggtgggatcctagctcccattggccttgaattcctgggttcaagcattcctccagcctcaggctctggagtagccaggactacagatgcgtgccaccatgctcagctaatttttgtattttttgtagagatggggtctcactatattgcctaggctggtcttgaactcctggactcaagaaatcctcccaccctgtgtcagcctcccaaagtgtcaggatcacaagtgtgagccactatgcctggcattccaaacattttttagatttggagctgaatgcagcatgggcaggttgtcagggttgaagcactggtgatccagatctggaaggagccagaagcctctaaaagaggccactgcaggagcctcctgacctggtttctgggaatccatctgcttcaatgattttcctaaaacacaaatctgatcccatcacatctttttttttaaaactccttcagtgaagatagttaagaacttgtggcagactgcttctagagaacaaaacaggaacactggggtacagaaataagagatttacttttcatggatacccttgtgtagtgtttggggaaaaattataaccatgtacatatattcactattcaaaggaaggtcaaaagcctctcaaaagtttctacagctttccactatccctaggagaaagagaagcctttacttggtctataatgctcttcaccgtatggccctacccaactcttcaacctaatctcatgttaatctcgcttcctgtggcccttgtggacttggctagactggccttccaattcagctgtgccggcctctttgggcttgtacacaggcttttccttctgcctcacttttaaaaaaaaattattattactatttttattttatttatttattctttgagaaggagtctcgctctgtcgcccaggctggaatgcagtggtgcaatcttggctcactgcaacctccacctcccaggttcaagctattctcctgcctcagcctcctgagtagctgggactacaggcacccaccaccacgcccagctaatttttgtatttttagtagagacggggtttcaccatattggcgaggctggtcttgaactcctgaccttgtgatccgcctgcctcggcctcccaaaatgttgggattacaggtgtgagccactgcgcccggcctactattattatttttataagaaacggggtctcgctatgttacccaagttggtctcgaactgttgggctcaagcatgtctcactttcttatccccgcctctccctttcccatctttgccgtctacttaggtctctgcttcaaagttactttttcagggcgggcttcccgcctgaattcccaatcaccaccggacttgggtcagtccccgcgctgggcactcactgccccggcaccagcatctctgcagcaagcacccataacaaccataaagtgtaatgagctgctcagtgtgcctccctacatcgttagtccgaggagagggtccctcggtgcccagcacagtgcgtggcacagtcggtgctcagggagcgatagctagatgaaaccgtacttttcgggatcctagtccatccaaagcagccgccttcggggcaggtgtggggaggagggaggccgacgaggagccaacgccgcgcgaccctccgcacttccgtcttggaggccagggtggcgctgccgccgtccctcgcccggaggcagagatgcgctggcgcatcaccgccaggagcccacagtgaaagaccatcggatggaaggcgacgcccagaactccaggagaccgctgtgggaggacgcgaggccaggtgacgaataggccaggcgtgagttcccaaacagcctcctccccttcaagagagtaagcttgggccacaggctgggacggaagcagaggggcagacacgccaccacccgcccggcctcgaacctacggcggcacagttcagcggaggcggcccagcggtcctgtcccgcgcctgcgcactccaggccccgccccgccccgcgccctccaggcccggcccgccctccaacctctgcgtgcgcacagcctagagcccgcctccgtgaaagactgccgggcgcatgcggtcggggttgttcactggctgtccggggctccgcgcgcgtcgccggcccagctctgtcgctgacgggaggatctgaagccggccgcaggtaggctgactccagggatcccgggggggatctgttctcccgcgcaggagtcagcggcgcga

SEQ ID NO: 1257 - DNA, 2300 bp, Homo sapien
tctcatcgtccccctttatagtctaaacatgttttctgtctgcttccaccgtcactgaattactcatttatttgttaatgtttcatctctccaactggactgccagaaagttgagatatgggcccaaatctgattaatgtttgcagtccccaagcacagtagctgtcatgtaagtcagtagcccataaggatgaatgaatgagcctcccgcctgatctttatgtacactggcatatgtattgccaggcactgagactgcaagaatctaaagagagaaactaaagaacgtaaagagagatgttaaactcttagagtaaaattgggacaaatcaaatgtaattggatgagatgaatcttttgtagaagtaactcactcggtggcagaggaatttctaggatcatccaaaacttagggagaccagggtatagtctcagtaaggtatatgtctggttagaacatatctaaaatgtacctaagactgattttcatgtgtcaataaggaactgtaaagtgagagacttagggtcagataagcttggagacaccgcatactgtatagcagtgatcacagtgcgagtttacttgctaaacactcccaggattcttgcgttaaatgacttggtttaatcagcgtttctctgatttatatccataacaccctttttgagaatcccatgtgcattttgttgaaaccagggagcatgcttttggaaatgctgcagcagaggatgcaaagagcctttggagcggggaagacttctgagcattcttccttccctgccaagtgtgttctttcttgctctggggagggggtggggcgggggaatgcttcgagcacaactccttagttttcttgttccttagtttatttttatcataatttggcttcacatggaacgttcctgaggaggaaaatgtcctgaccatgccaaagtaagcattttctgctactttctaattgtgtttttcattttggtcacatttgggtttgctgaccaaatggacgatcctggacctctgaagctggggaccagtgataaatcctccgtggtgagcctgtcacggtctcctcacctcttgtcgatgctgttttcacctgcatcttgactctgctgcccttatatcttatttctcctttccctgccaccgtggcactgctttttggatttaatctcatctcccctctctttgagtcctctgcccgtcatgtgcttcagactggtttcttatctgatgtccctctcccccagtatttacagtctctcttcattgcatgcctgggagagatttctgacaaggagcaagttgttgttaaattatagaagagaactactttttctttttttttgaggtagtcttattctgtcgcgcacgctggagtgcagtggcatgatcccagctcactgcaacctctgtctcctgggttcaagcgattctcctgcctcagtctcctgagtaactgggactacaggcgtgcgccatcacagccggctaatttttgtatttttagtagagatgcggtttccccatattggccaggctggtctcgaactcctgacctcaagtgatcctcctggctctgcctcccaaagtgctgggattacaggcatgagccaccatgcccagccagagaactacttttaattaaaggaattttggtttagctgcaaccacttttaaatgttgatgttctttccttttagtctatcttttgtaacctagaggagctgtgttttcttgatgatatgttgtagtttagccaaagacattatttatttcctggagaactggagtacttatccaagtttgaatttttttcccatgtagggaaaataatgaggcacctgcctggtatcccagtgtctggcagtgatgtcagcaaacatttggggtgtagtgttctatcagccagcttagagctggttttattaggttgactctgaaggttattagttgtcaaagctttaaacaaaagctgtgttattagagtagcagttgtttttctacacgtatttgactaaagccattcagtgatccaagaaatgtttgttttgatcctatttaaacctgacgagaaccttctgaagtcctgtgacagagaaactgaggcttcaagagggttcatagctaataattggcagagccagtgtttgaacccagatgagtttggtttgttgagatacatttatatcatctgtaatttttccttcttccaggtcaaagagtaaaatgaagtacattctggttactggtggtgttatatcaggaattggaaaaggaatcattgccagcagtgtgg

SEQ ID NO: 1258 - DNA, 2300 bp, Homo sapien
tacgtggcactatattctggccagactcgatgtgtactctaacttaagaaataaatcagtaaggcagaacaagagacatgctttgcttctcattctctttatgtcattggccagatgggaagcgtctgagcacgttgctggcttgcttgtgtgcagtcagctgaattgtcagtgccgggtgctcctgcaggtgagcagccttgactcagcagacaacctgagagtttgtttaaaaactaagaaatgaggctttctttttaataggaaccagaatttttcataaagcttcaaatacaggttctcagcatgtagagcgagatgaaaaggtgcatgggtgctattatggtgctatttatgactgagaaaggggagggataagcatgatttaggaaggtggtcctttcctctgccaggcactggacgtgggtaccccatatacacagccagtgagcagtgggccagactgtcttcaccagcagaactgcttgttatggtactttgaacgtggctgattgagcataattctaacctcttctcccacctggtggtaccaggagattgtcttcattttaaattttatttatttatttatttatttttttgagtcagggtctcactctgttgcccaggctggagtgcagtggcacaagcacggcttgctgcagacctcctgggctcataagatcctcccacctcagccttccaagtagctgggactacaggttcacatcaccacgcccagctaattaaattttttttttttttaatagacagggtctcgctgtgttggccaggctggtcttgaacgcctggcctcaggcgatcctcccatagtgcagggattataggcatgagccattgcacctggtcaatagtcttttttttgagatggagtctcacactgttgcctgggctggagtacagtggcgtgatcttggctcactgccacctccacctcgcaggttcaagtgattctgtttgcctcaccttcccaagtagctgggattacaggtgcctgccaccacgcccatctaattgttttgtatttttagtagagatggggtttcactatgttggctaggctggccgtgatctgctcatctcagcgtcccaaagtgctgggattacaggcgtgagccaccacgtctggcccgttttttttcaaacattccccaaactgagggtctgacacgcccgttgttgacatcatggtcccccacaatggctgggtgtgtgggtggtgtgaaaaagcctcccagtaattaagttcctgcccctatgtttaagatcactttggctgatcacttgtcaagtgctggccacataatgtaaggtttctgaaaaaagagatcccagatggctctccagagcttgcaaagctcgagcagccccgccacgctggctgtggcagacaggatagggctgaagctggatttacaggagggcaacctgtgcccagtgtttactgacccgtccccggaggcttctccctcatggggaggaaagctggtcacattcctcgttcctttcttaatgtgacctaacaataggcacagctatgtgtaacttcccttcagtaacttccttcagtccagggaacttcccttcagtccaggggatctgggcagttcttagcagtctggagcagctgggctgaagcctgacttcacccttcctttgtagaaatctgctcttttcccccgaaaaacatttccgaggattgtggtgcctggactagcatttagcatggtacctggaccgtggaaggtgctcagaaatgccactcctccttcttgagtaacacatttgtgtagttttcaaacagtcttggtgaccttggggcagctcggggggtgagcagcaggagtttggtaacctgccaccatataggtgtctgtgatcacattggtccctaaccagcatgaatggcagccgaggcaggggttgtgtgctctttgctaagtgggaaaaccaggtctcagagcagttgtgatcacccagaaaatgtcacctggctggtgagtggaggggctgggggttccaaagttctcatctgtgtctgctgtggatgtggccagggtcttcaagttttaggggatcaactgaagtgtgttctgtggaacactagtcctgtgaaatgccctgttcaacaaggtttggtgattttctggtggctcagaccccaaatttaggagtatccttaattgtctcaccagcaggtatttattgggtgtctaccatatgccagccatacccaaacccctgtcccccagagcagttattcagtgggggaagcacca

SEQ ID NO: 1259 - DNA, 2300 bp, Homo sapien
ggtgctcacagaggctggcagcccacagtacccagggcacagacactaggctggagccactcaagtcagagatactctgcagtaactggggctgggccctgtcagagccaggtggggatctacaggctggaggcagcacgctaggggagggcttgagaccaagggaggctggagtgatgtgggtcccaggacctggaaagctatgtttgtaactctgctccccagagttcgctcttcttgatcatccttgttctctcctgcacctggctgggctcattcctcttccctatccctctgccccttgactggccttcctgggcaaacagcagattgtgaagtgggagctgtggggaagaggggatggcatgcctgctgtgggttcagggattgtggccatgtgggccacccagtggacactgtccagataacatgaaaagaggccatccacagcggctcagctctctgcccctcatctttgggccccacctcacattcataaagaggcttaaattctagggttttttccttcagttcaagatgaggtttgtcagtgaggtcacagacatccagcaagagggttaacggggctgcttatccccccactgggaacccaccactccaagctgcctgcagagcacctatactttctaatactattacctaatactagagagccagagacaccgtaaataaccttgttatcttatatttatgtatttaaaagatggttcataaatgtgtttagtgcttaccatgaaagacaatttttacccccatctccaaaaagaagtagaactgattcagctcacagaaggctgttaaaggcgccagagaaatatgtgatgcagtggcttaaagagactgccaggaagagtggggaaagttgctgcactcaagtcaatttgggaaatttcatgcagaacagccacccaatagcaaggcctctaggtaagtagggagaacgcctctggtcatgttcaggtgtttcgtctgtcaaggtgcttctcccggacagctatttctgcacagttcaacacgacttgagttggccatctcaaaacagctatagcctcagttgctgtgagggcacctcatggatgacagaggcaagaaaggcttgagggagagggggtgaggcagggggagcttggagccgtcattctctaaccctaagagctgtggacacaaagccgagcccaacctggctgctgcccgggcgggcaaggagagggcaccgaatgcactctccccagagcctcgcactgccaccagttgaggcctgcgcccctctcttccccgcacaccatagcctcttttcttgagtgctctacccaaactactgcctcaccccctaggaaacaaacatttggtaacatcttcagaaaggctgctttcaaggaaggcagcttctctacgctgtcaaacagctttcttagttgaagcatctaactgtggcaccatccttactgcccccaattggggcttccagaagcagtgtgggcaagcgctgccagccttctgcagaatgatgagcactggtcagtcctgtgctgataaagactgtgtgtcacccacgtcttggtttctccaacagcaggtaacaacctcatcttcccaaagagatagatagctacgcctgacctatttttcagggctcttctggacagcagcctctgtctccagcacagagaagggcctggcgtcagggggagccctggagcctaccatgtgcctcctgctccatcttgggagcagctgggccctgtcagtactcagtagagcctgggattggtgactgactaaagagggaggtggaggctttaggcagcagcgctgaaagaggtggcaagaggtgacctgcatgggaactggggcctgaagagacatcactaagtggggaagtgtgtcccacagccaagctgcatggtgggtgggccgctgggtctgcttccagtgtgtggtgggacccacagggagctgagttttcctgtttgatttcccgcacccagcctgcctgtggctggccaagaaggcattgttgaacctcatgagatcacagaggtagctgtgcaggccccgcccacttcctataaccctggttctggccgtccctgtgccaagcctccaagttccctgagagctaccggccaggggtcgggaggctatgggagctcagggcaggcacctcccatgctcccgcgggagccaccaggacatgaaggtcataggcctctcctctcctcctcttcctgtttgacctgaatgcccccaggccaactgcctcaaggattccatttgag

SEQ ID NO: 1260 - DNA, 2300 bp, Homo sapien
actgtttccctatcttacaggtgcttagagaggttaattccatagctgttaaggggtacatgtcctgctgcctgcaactctctcccgtgggcctttgtctcagatccagctaccattcagactccagacccctgcaggctacactgggcatgtcattaactttgaagactgtcaaacagaaatggcctggctgcagggcagcgggaagcagccctcttcaggggaggagggcagtcctcacagagcctctggtcatcaggagttattctccttggttgcccaggtgacagctcaggtacaagggaatgagacacatcagggagaagggggttggttcactgtggcttagaggcatcattccccaaaggagctcatatctctttgaacaactcaataggcatagctttcagggaccccataagccacatacccaattgagtcattccacataggacgcccaaccttatggctttttaacaagtgtttatagttcacacagaaaactccaagtgctgataatttacaattaggaatcatgcttaccataagtaatgttgcactgaaacagctaacatacttttatctggtttccagacaaaaagaactagaaaggtaaccaaatgtcaagttctgcaggaaaggagaggatgattcacgctgccataacctctggggtcaaaattaaatgttgtttaagaaagaaaaaaacccctcaactttggaaattgtttcaaaagccaaaagccttctaatagtgacccagaatcattaaaagcactcgaacgggcctcagacccagtgcacacatgctgcagtgttggagaggccactccgtgaaccccagcagtccagtagcccaccaggtggaaaggcacaggtgccagaggtctcatggcatcagcttcatgtgctcaccctcaatggggggacagggagatgacactgactttgtgctgagctcaggagggaaacaccaaacactttgggaggtaacagagatctaggccccacctaaggccgaatccatgggagtgtggggcatttttctggaacactccgccctccccagccgtggctccaccctgcctgctggccgtggactgcattgtccagacactctttgtgggggtcttatgggactccttaagattgatccctgaggtgtagcaatggtgggccaaatggacactgttccggccctcacactggtgccacactccctcgttggcaagagcctgaaggtgaatcatccctccttctttaccaccaaaacaaaaagtgtgggaaaccttgagaagagggtcccaacacttctcccctcagcagccctcagctttttgcagcctctttacctaagtaccctgagtcactggacatggtcttgccaccacattccgtcagggcagagccacagcttccagccttcagcccagaggcagtcacagccaagcatcagaactgcggctctgtgcctacagtgccaaagccactgcaggtgctcacagaggctggcagcccacagtacccagggcacagacactaggctggagccactcaagtcagagatactctgcagtaactggggctgggccctgtcagagccaggtggggatctacaggctggaggcagcacgctaggggagggcttgagaccaagggaggctggagtgatgtgggtcccaggacctggaaagctatgtttgtaactctgctccccagagttcgctcttcttgatcatccttgttctctcctgcacctggctgggctcattcctcttccctatccctctgccccttgactggccttcctgggcaaacagcagattgtgaagtgggagctgtggggaagaggggatggcatgcctgctgtgggttcagggattgtggccatgtgggccacccagtggacactgtccagataacatgaaaagaggccatccacagcggctcagctctctgcccctcatctttgggccccacctcacattcataaagaggcttaaattctagggttttttccttcagttcaagatgaggtttgtcagtgaggtcacagacatccagcaagagggttaacggggctgcttatccccccactgggaacccaccactccaagctgcctgcagagcacctatactttctaatactattacctaatactagagagccagagacaccgtaaataaccttgttatcttatatttatgtatttaaaagatggttcataaatgtgtttagtgcttaccatgaaagacaatttttacccccatctccaaaaagaagtagaactgattcagct

SEQ ID NO: 1261 - DNA, 2300 bp, Homo sapien
tgacatgcccagtgtagcctgcaggggtctggagtctgaatggtagctggatctgagacaaaggcccacgggagagagttgcaggcagcaggacatgtaccccttaacagctatggaattaacctctctaagcacctgtaagatagggaaacagtagttatactataggactgttgtgaggtttcagtgggatagtgtagaaaaacaactcagcacaatgagttctcacaacaatgctcagtaggaagttacatactcttggcgaagagggtaaggtggggtgggtgcccagctttgcagcatgtctggcctgcctacatatgccagtgtcacctttagtccctgtgtcttgagggtcacatctagaagtttgttgttagggttcagcaaggtgctcattgggaataccctgaatgaacagcacagtctacaagatcccagtgttggccgggtgcggtggctcaggcctgtaatcccagcactttgcgaggccaaggcaggcggatcacttgaggtcaggagttcgagaccagcctggccaagatggtgaaactctactaaaactacaaaaaattagccaggcatggtggcgtgtgcctgtagtcgcagctacttgggaggctgaggcatgagaatcacttgaactcgggaggcggaggttgcagggagccgagatcgtgccactgcactccagcctgggcgacagagacactgtcaaaaaaaaaaaaaaaaccccagtgtcaaggagttggtagaaaatgagggcctcaacttgtttggcagccttgaccctgactgtttcacagtgaccatggttagaacctcacagtggccaagtagaaaatatattctaagtaagttatgatattggaacttgtcactggtgaaagcttgaagggccttcacaagtctcctcatgcaaataccccatagccagatgggcccaaagaaaggaaatgacccacccaaagcttcctggcacataggtgggctggctagaacctcagccttgcagtcaaatgtctgctttggcacttcctgcctgtgtgacctgagcttaagtttccttatccataaaatgggtttgttgtgaagagtaagtgagatagttctaattcatgtaagcagctcatgtggcacacagtgatataagtgttggtggtggttattatcaggttatactgcactgacctgctgctcccctatgccttctcttcctcctgcaaaccctatactccaattataaacacgacgtgtggccctggagttgtgtgcctggcccctggtcagcacaaggggtacagtgcaggcctgacctggctgtgctggcctgcatctttccccaccctatatgggtgaggatatgcccagccactgaggctcctaggagttgctgatgtaagattgctccctcctgctctggctttgcatagctgctgtgcttactactgtctagctgcaccagagcaaagccctttgagggtggagactggattcacatactgactttccaaggggcctgtgtgatgctggggctctggtggacattcggaagaccacctgttctttagggactgctggaattagaaggacgcttaggaatcattttttccaagctctccattttatttatttgagacagggtctcaaattgtcacctaggctggagtacagtggtgcgaacacggctcactgcagcctcgatctcctaggctcaagccatcccctcacctcagctccccaagcagctgggactacaggtgtgcgccaccacagcaggctaatttttgtattttttttttgtagagctggggtttcaccatgttgcccaggctggtctcaaactcctgagctcaagagatcctcccaccttggcgtcccaaagtgctgggattacaggcatgagccagcgtgctcggcctcgttttatgtatgagaaaactaagaccaagagaaggggaatgactggtccaatgaatgcgtagtgatttggctgttaactgattaaaaagacactggtatctatattggtttttatttataaacagattgacataaaataagtccagatggcagcgtgagtagctgtgctgctgacttgcttacaaggaagcctgtggacaggcgagtgggtggaaccgactccagcctggaaaacctgccctcccatcccccttagcgccttcttggccttccggcctgattttcttcgacagcagttctggccagggcaaggagctgtggtgggggcagtataagccagggactcccttcccacagatgaggcctagggctgcaaa

SEQ ID NO: 1262 - DNA, 2300 bp, Homo sapien
tgcttttctggccggaaacctgtggccagtggtgcctttgcctgagttttgcttgggcccactgggctcgttccactcacttggcctggcaggctgctcatgctatcagcctggatctcacgcctccaagagagactggagttaggcatggagtggtgaggagtgtgtatgaacgagcttggggcccatctactgcgcagtcagacacaccagctcctgccgcaagtgggcagctccaggtgcagcatggatgccagctctctgtgaggctgcagctggaccaggcacaccacaagcagcttccctggctggcaccaaagaatgcagtagtccccaaaagcttggaggaaccacagggccggaaagagggagtcacagccctgactccggaagctcccaggtctgggctccccaaagggctgcagctcttccctccttctctttgcccaaactgcagcaagcagggggcatatttcagcccttttggtgttacagcaactcttttagccacgccgttcagcagatcccgagttcttgtcctgcaaccaggaagaatgaggtacgcagacaagtggagggtgagcaagatgaagaggtgctgtattgagcaatggaacagctcagagaagactcacagtgccagggcgtcccagtgagtgttcagcccctagcaggaaggatagctcctctctgcaggtaggttttcccaacaagtgttcactcacttctcagcagagagggtggctcctctgcagctggtcatcccatcttctgcagttctctgcagaggcagagaggaggccctagagtgggtggctcctctctgcaagcaggttgtcacgtcatctctgcagctctcagcaaagaggaggccctagaatgggtggcttctttctgcaggcagattgttcagtcatatcttcgtcctctgctctgctctggggctgatcctggggcttttatggacctcagaggggaggaagtgtgtgcccattggtctatgggtggccataggcaggcctggaaaaggcaccacaagtccccactccagtctgcaggactggcagttcagcccccagccttcaggctctccctggcctgaaggtgggcctcaccagggatccgcccttttctgcttaggaacctatctgcctcctgctgccattcatagcatccagactccaccctgactttgctccaagatcagaacaggtgccaacagcagggagaagccaggcagggggagcaggcatttctgatcctgggagggaagaggggtcctggctggacccccaagagtgcaggggtacctgggtctgcagccacatttgggtggctgcagctgtgcccgtcacggcagggctcctgcctgttccatggagcaggaggtctgggtttgcagcctcggtttgggtggctgcagctgcacccaggatggcgggactcctgcctgctcccaggctcccaccggctccatggagcatgcattcccagctgtgcctccctgctgcagccggcatgatgacagcagctgctccagatggcccaccgctgccatcacaaatacagttacattctgcggtactgcggagtggggaccttagcatgaagttttggaggatacagttgagcccataactggggtgctgtttgtttttagtgttttaaataattgtgatcattccatgaatataatttttatccccatattttacctaataacataacataaccattttcccatttgttctttagccttttaaaaatttaacagcttcaaaatactttgtcaagtgtttgtattatcaaatcttaatcagtcttctattttgaacatttaggtgttcctttttttgttattgtaaacaatgccaaggctttttacataaaacctttttcttgtattttggagtatttttccttagcatagaatctcggaagtggattactttattaaaaactgttaatacatactgccaaattggaaaagtatttaatcttatactttctttccacatgactatttttctctccctctgcagtgatagactggagtgatgttagaaaacacaaatatggtcacctatcagagtctgcatcccaatatcaaggtaagggggaaaaaactccgtttggtgtggaaaaattttactcggcatcttttcccataaaaccttcgttgttagaggtctgagtttacaaataactcaattgttatatcagaagcaaatattgcagtttacagaggtattggtcataagcaatatactttgttttagctggaaataggaaacctagat

SEQ ID NO: 1263 - DNA, 2300 bp, Homo sapien
taaacaaagtctaacttatagagaagtagagagtagaatggtgataaccagaggctgggaggggaggggtgagtatagaaaaaagggatacattggtcaacaggtagaaacttatagttagataggaggagtagttctggtgttctattgcagagcatgttgactgtagttaataataatgtattatgtatttcgaaatagctaaagagagaactttaaatgttctcaccacaaagaaattataaatatttaaagtaatggatatactaattgctatactctggtgtgatcattccacaatgtgtacgtatattgaaacatcactttataccccataaatatgtaaaattattgttggccaattacaaataaaagcaaaaaaaataaaggggatacttgcaaggtttttgagaggatgagagactctgggacctgcagctaaaatggagggttggcttttgataaaaacagagacacttcatccacagtaacaggagagaagtcagaaaaaatcatgaatgaataggtaatttattcaccagacatttaatgagcgcctgttactatactacttactggggattcaccactaaacaagatcaagtctctaccgtcgtgaaataagtggaagggtcttacccttatttctgttttctcaatgaatctgaattaaagtcatcccctaagagtgaagttggggagagtatatttggagtttgaggagagagagaaagatacgaatttttttttttagaaattggaaaagtaaacatagtgtagaaatgtggtatgatttctgggtggtgtaaagtggcatttgagaattatagctatgagtttaaaatgagaccaattagcttgcatatgtttttcttcagcactagtgagctgctggggtaggcacagtataggttgatacgtgatttaaccagatttaggattgagcctttagtaggtacgtttgacaaaaaagagatgggaaggaggaattaagagtgtttgccagagaatgatgttaatgagggaccatggagtctgagctgggcaagaaattaagtaaagacatgataggtgattgatggtgagaaagtagtagagtcagtagatgaatctaaattttcaaccaaggaaaatatattctccttatatgagtaatgtatcctttttatggaaaatttgaaaatatataagattataaagtagaaagtgggtgcagtgtcagggaacccagtactaccacccaaagataaccagttgtttatatttgctgtgtttacttatatgtttttttctaatgataatttccgcagttgtctaagtttccagggctgctgtaacaaatatcatggactaggtggcttaaacaacagaaatttatttcctcacaattctgaaggctagaagtctaagatcaaggcattgattggcaaggttgatttctttcttctgaggcctcactccttagcttctgaggcttctccctctgttgattacatgatattttctctgtacctgtgtccaaaccttctcttcttatgataacaccagtcatgctgaattagcgaccaccttagtgacctcattttaacttaattatctctttgaagaccctttctccaaatattgtgggatcctaggggtgttgcttttctggccggaaacctgtggccagtggtgcctttgcctgagttttgcttgggcccactgggctcgttccactcacttggcctggcaggctgctcatgctatcagcctggatctcacgcctccaagagagactggagttaggcatggagtggtgaggagtgtgtatgaacgagcttggggcccatctactgcgcagtcagacacaccagctcctgccgcaagtgggcagctccaggtgcagcatggatgccagctctctgtgaggctgcagctggaccaggcacaccacaagcagcttccctggctggcaccaaagaatgcagtagtccccaaaagcttggaggaaccacagggccggaaagagggagtcacagccctgactccggaagctcccaggtctgggctccccaaagggctgcagctcttccctccttctctttgcccaaactgcagcaagcagggggcatatttcagcccttttggtgttacagcaactcttttagccacgccgttcagcagatcccgagttcttgtcctgcaaccaggaagaatgaggtacgcagacaagtggagggtgagcaagatgaagaggtgctgtattgagcaatggaacagctcagagaagactcacagtgccagggcgtcccagtgag

SEQ ID NO: 1264 - DNA, 2300 bp, Homo sapien
atagagaaaatgttcaagagaacatttctcactggacgtagtaggcagaattctaaggtagcttcctagattaaccttcatgtacaccttctgcatagtccctgggacagtggctatgatgaattttactcctgtgattagggtatgtgatgtggcacaggtgatcttaaagtaggaagattatctaggtgggtctgacctaattacaagtcttttaaaagctcatagtgttctctgactggttgaagaagggaaatcagagatatttaaagaatgagagggagtgacatgagaaaggttctctgttgatgagataaaagggatcacgtggcaaggacctgagagtggtccccaacagagagctggcaaaacagtgtagctgtgggatcctagtcctacagggacatgaattctgccaacagcccgaaggagcctggggcagacctttccctcgtggaggtgctagacatcttgatttcagcctatgacaccacgagcagaaaacccagccacaccatgccagttttccgacctacacaactgtgagtaaatcaatgggtgttgctttaagctgcaaaatttgtgccaatttgttatgcaggaatagaaaactaatatgagcacttacaacactgtgctctcattagctattgacataatagtttccccaaatatgggctccttagatttaggctctaattatccttgtaacctcagggctcttcatgagacaggtactccccaaaacgccatggaatgaaagtttaaattagacaacagggatgcagatcagaacctggatagattctgaccatttccatttctcaagaatgggcagacggatactgacaccaataccaggatacaaggaggcggccccccttcagtccaaagctctaagacctattctagaggcaaggcaagtaatccaggctcagctgccccatctgctgctccagccttgcttaagtggacttccctccaaggaacattgttcacagaaggatcattaacaagacattcctgtgtgacctgaggattgccatgttctaaatgatgcccacacccactccacatccagctcagcagaggtctcgggatttatattgcactgtattttcaagcagccaaaacagaagtcaagacgtcagtttcctaagctgctaaaatgatgtggtggttaaaccaattgtgtgccaggcgcagtggctcacgcctgtagtcccagcgctttgggaggctgacgcaggaggatcacttgagcccagtaatttgaggttacagtgagctatgatggcgccactgcactccgaccttggggacaaagtgaggctccatctctaacaaaacaaaaatagaattgtgtagccaacatggctggtgggcctggaagaatgagcctgtgcattgtacctggcccatcacgggctcagtgcgtactcgttgaagggatcaccacagggaggaccgaggacgctgacactccctagggcatccaagcaccaactcatctctcacctaccctccgggtgcagtgctatcgtgttggagaagaggcccctgggtggctgtgcgaagtaactcgcccaaggtcaccacacggccagccactagcccggcgggagtcgcccgaggcgaggcccacgtcagccggtcttgggggcccgaccggtggctcctccaccagccccacgcggcctcagagcgggctactggcgtcctcgagattcgaacccgagtcctcggcctcgtccccgccctcgcgccctctcaggcctcagttttcccatctacaggacgcagaccggagagctggtccgggcgccaactgggcccccggacccgggtcggcaggccggcggggtacggccgggccgggttcccgcgcgccctccctcctccagcgcgccgccccgccccccgcgcgagcccaacggccgaggcgcgcgccacctcgcagcgggaggcgcgggggaggggccgggggagcccccgccccgccccccgcctcagccgccaccgccagctcggtggagccccccgccgcccgcccgccgctctcccgagccgcccgcccgcccccttcccgcgtctccgctccctccctgcgcagcggaaacatggcggcgggaagagagtgagccgccccgcgcccccgccgcgccctcaggtaagcgcctcgcggccgcctccgcccgcctaagagctcgtgccctgaggggccgcctggggccagaaggcggtggcgggacctgcgcagccgctgcgcctgctcccccgggccggggtcagcctgtccg

SEQ ID NO: 1265 - DNA, 2300 bp, Homo sapien
tactttctcaaatctgagttctttctttctggctacgcactgcttcctcattctccccctctctccctgcctgtctttatctgcctccctgtttgttttcctccccaccgtgaccccctccgtctccccgctgacctgcttttccttctttcttctcttcacggtccagcgatttgaattctctatccacccccaagcagcccccagccctgcttaattccgtattcatattcttgcagaggctgatagaaatgactgtgagtattgctcacctcattccagaaatactcttctaaattcttcgagaggcacgacgtgggagggcagagagcacctcacggggagtcccttgtgctttgcttgatagaccaagccacctgcccgctgggtggccttgaccaggccctgctcctctctgagcctcgtgggcagtcctgagctgactcccctgtgataatagctgcctcctggggttgtggtgaggaagagtcgatagtgctccaagcacgtagtaggtgctcaggaaacatttgtttgtttttttcacaggagccagctcagtctccaggaaggaagatcctgctctcaccctccatcagttctgccagtttctccaggatttcacacatgcacgcttgctctgggcacaccctaggaagatgcaaacttgcctgttcctggtggtcacctactgtccccttcataaatgtccaaggacaaaggagctgctgaatacaggaactgagcattgggcatcctgggttctgtaagtggaaagccaggtgtgcatctcttgacccccctgccctcaggaagcactcgcaaggcccctactgtgtgcagggtaggtgtcaggccctgcctcctctggggctctggaccttgagattgcaggggagataagtgcaatgggatgagtcaggcaggcacgagaggcacaggccctgggaattccaagaaacgagagggcctttcctgttgtgcctggagacagggtccctgagaagactccagcaggaagtggactctcagccagggcaggaacagagggtgcctgccggttccctgagctgctcagcacagctgtggttcatccctgctttcccctccccggcaaggcttctgggccagcagaggggcaggagcagaatgccagtccccagagaagtcccctggcttacttcttttgcagacagtagcccccggtggaagccaagacatcctgtcatggccaggacaggagactgttcaaggggcgctttgtgtgtgtgtcctcagggacatctttctggaaaggggtctgaagccaccttcttagtctcaaaggagcctgtaagccaagcaggtgaagtaccttcttgttttggccttgtttgcaaacaaggaaacaggcccaggaaggatgcccttggccatggctgcatagctgaacagcttctggaagggactagaactcctgccccaggccctggggtgacagggcaggggttgaggggggcatttcctgggtgaggtggggatgaagcagttccaggctggtcagaagtcaggcatgagctgtgtccttcacagagggaggcaggcccagagagggctctgactcgcccaaggccacacagccttgcgtgggcctttcacatcccacacaacagaggggcatcctcagcctggttggcagagggcaggcaggatagatggcagagtcttctccgaggagaggggttttgctcatggaacctcctcctccacactcacagccctgggcgagacctgtggagcagccgccaacagagtgagggagggggctcggggcagctgggggtgacttgaggaagtccagctggactgcgaggggcccctggggactgccagggagcctcaggactcccagaggtgctccaggcacagagggaggaatgggccttccatctccctccccccttcactgcagaggctgggtcgggccaggcgcccggggaggaggcggtgtccctggctcccagcccgccggtgcagcggggcagggctggaccagaaggggtggggcaccgtgcctggtataagaggcagccagggcaccgaggcaatgagctatctgctcagcttaatagcaggacgctggcaacaggcactccctgctccagtccagcctgcgcgctccaccgccgctatggtctccgtgcctaccacctggtgctccgttgcgctagccctgctcgtggccctgcatgaaggtgagctgccctggcctcacctgctgcctacagctcctgggtctgcctatctctgtctccctctag

SEQ ID NO: 1266 - DNA, 2300 bp, Homo sapien
gccaggaaagcaatgtctctttgagtgggtccagccgctcagcctcgtttgagagggatgaccatgggaaagccgaggcccccagtccctcatctgacatgcgccccaaacccctgggcacccacatgttgactgtccccagccaccacccacatgcccgagagatgcggaggtcagcctcagagcagagccccaacgtttcccattctgcccacatgaccgagacacgcagcaaatcctttgactatggcagcttgtccttgacaggcccttctgctccagccccagtggctccaccagcgcgggtggccccgccagagagaagaaaatgcttcttggtgagacaggcctctctgagcaggcctccagaatctgagttggaggttgcccccaagggaagacaggagagcgaagaaccacagccctcatccagtaaaccctctgccaaaagctcattgtcccagatttcctctgcggccacctcacatggtggacccccgggaggcaagggcccagggcaggacaggcccccattggggcccactgtgccctacacagaagcactgcaagtgttccaccaccccgttgcccagacacccctgcatgagaagccatacctgcccccaccagtctcccttttctccttccagcatctcgtgcagcatgagccaggacagtctccagaattcttctccacccaggccatgtccagcctcctgtcctcaccatactccatgcccccacttcctccctccttatttcaagccccaccgcttcctctccagcctactgttctgcacccaggccaactccatctcccccagctcatgcctcacccagccaacatccccttcaggcagcccccttccttcctccccatgccatacccgacctcctcagcactgtcttctgggtttttcctgcctctgcaatcccagtttgcacttcagctccctggtgatgtggaaagccatctgccccagatcaaaaccagcctggccccactggcaacaggaagtgctggcctctcccccagcacagagtacagcagtgacatccggctaccccctgtggctcccccagccagctcctcagcacctacatcagctcctccactggccctgcctgcctgtccagacaccatggtgtccctggttgtgcctgtccgtgttcagaccaatatgccgtcctatgggagcgcaatgtacaccaccctttcccagatcttggtcacccagtcccaaggcagctcagcaactgtggcacttcccaagtttgaggaacccccatcaaaggggacgactgtatgtggtgcagatgtgcatgaggttgggcccggcccttctgggttaagtgaagagcaaagcagagctttcccaactccatacctgagagtgcctgtgacattacctgaaagaaaaggcacttccctgtcatcagagagtatcttgagcctggaggggagttcatcaacagcagggggaagcaaacgtgtcctttcaccagctggcagccttgaacttaccatggaaacccagcagcaaaaaagagtgaaggaggaggaggcttccaaggcagatgaaaaacttgagctggtaaaaccatgcagtgtggtccttaccagcaccgaggatgggaagaggccagagaaatcccacttaggcaaccagggccaaggcaggagggagctagaaatgctgtccagcctgtcctcagatccatctgacacaaaggaaattcctcccctccctcaccctgcattgtcccatgggacagccccaggctcagaagctttgaaggaatatccccagccatctggcaaacctcaccgaagagggttgaccccactgagcgtgaagaaagaagattccaaggaacaacctgatctcccctccttggcacctccgagctctctgcctctgtcagaaacgtcctccagaccagccaagtcacaagaaggtacggactcaaagaaggtactgcagttccccagcctccacacaaccactaatgtcagttggtgctatttaaactacattaagccaaatcacatccagcatgcagataggaggtcctctgtttacgctggttggtgcataagtttgtacaaccccaaccttccgggggtttccactaaagctgctttgtccctcctgaggtctaagcagaaagtgagcaaagagacatacaccatggccacagctccgcatcctgaggcaggaaggcttgtgccatccagctcccgcaagccccgcatgacagaggtaagttcagccttgtttttcttctcatcactgatt

SEQ ID NO: 1267 - DNA, 2300 bp, Homo sapien
ttttgctttccagacgaacatgaacatcccaagtgaaatcccagcaagtaaatgcatttcctctcccctctcttggctccttttaaaaacccagtgaataagaataaaaaatgcaaataggcacttctgtgatctagttcatttcaatgataagggaactttaaggcagttaactatatttctgattgctttctaagacaagaaggaatggtttcagtgaagccaagggaagtctgctctacacaggagtcattatgaactcaggtgggtgagagatggctgtgctggcccagcagacactggggatactgccccttcctggagcagagttgacagtgtggaggagaagggaagcgagggtgggaaggagggcctgcagcttcttcctgaccccagaatgaagcaagtacaaggctgcctgggccagttgctttgagaagcttctccaccttctgggagaggggttccttatttcccctagaccccatggtttggtctcttgaatcccactcttgaattcactttaaagcttcaaagctctgggattctctgatatgaggaattctaatcctcctccttccctctgtccttttttccctccttcttcctttctgaaggtagtgaggtattctggaagagagttaaagagaattgattctccctcagaaaccaagataaagccagtgtgaaaaacacaagtcagcgagaatacagaaaacctaaatttatctaatttcagcttagtgtcttgggaagttatctcatgtaaaagtatcattacctctgaaataatgtagatcagtggttgttttgtaaacatataggtttttgtagtttccatactaattatatgacatgacattaaatgatgcttgtcctggccttagctgaggcccaaagctgagaacagtgggtgccgggatcccccaaattctaaaaggacatgctaggttatcggtgcctgggccagctgagtgcatgtccccggggcctagtggtacccccaagtcctgtctctcctagaaaattctgctggcaacaggttaatcaggactacctctgaaggcagatgaagagaggagcaccgaaggggctgcacgtccactgaaggtggggtgaaggtggccattttcctgtgggtgaagtaaacaccaggggaggcatctggctagagcagtcctgagcagaccctgcctgggaagccgcctgccagccccttcagcaaagcagcccccatgtgctttcagatgcactacattttctttcgtctcgtttcctcttttccttataaaatccagtaagtcctttaatagtaaatcagttgatcatttctgttattcaggataaatctggcattttcctagaaagttaaacatgcacagcatatgacccagtgattttactcctaggtatttactcaagagaagtgaacacatatgttggtggaagacttgtacgtggatgttcataagagctttattcaaaacagtccaagactaaaagcagcccaaatacccatcaactggggaatggataagcaacttgcagtccacccaaatagatattattcagtaataaaaaggaacaaactaccgacacatgcaaaaacatgcatggattttcaaagcattagactgaaagaagccagatatcaacaagtatatatatattgtacaattccatttacatgaaatcctagaataggcaaaactaatctatagggggaatgtcaaaactatggttgccttggggtgggatagagggagataagagcagggattaaccgagaaagagtgtgttaaagcaaactgcatatggcctgagaaggactccgtacttctatatttgagttcttgtggatgaattgcaacctagcttaataggtagacaagatttaggagtatgtgcctgtaacaatagctgggtcttggccaatccctgtggccatacttcaaccatttataaactgctaagtgttcaaactgtgttcaaataaggcaaatgccaacttgtaaccaatcccgccactctgtacctcacttccgttttctgtactatgtcatttccctttcttttgtctgtaaatcttcttccaccacatggctgcattggagtctttgtgaacctgctgtgattctgggggctgcctgatttgcgagtcattcatttctcaattaaactcctttaaatttaattcggctgaagtttttcttttatcaaggatgagggaactttctggcattatggaagtttttatatcttgattagggtagtggttacttgggtatatacatttgtca

SEQ ID NO: 1268 - DNA, 2300 bp, Homo sapien
agccaagttacaaagcctcattttctggagctgttctctttaaaggtaagaggatggactcgaatcaccttctgaattatcggacagccctgtgacatgattataccttggtgcctgagatgttagatgggaaataaacagcagcatctagtaaactctcctggggtaaaaaacaaaacaaaaaaaaaaaaaccatcttgttttcacccagtcttactgatttttttttagtgtgaagacagaatgtttttgtcaaaaacaagttctccaaatttataaacctgattggagacatctttagtttcttctcaaacatgctgggaaaataggaatgtcactgagactccttcaccatcccctcgcagcccctattccccggggggctgggtagatggagaagcagggggcaggggctggaccagggagagagtgacaggctctctgtggtaggtctgtgccttgtcacagagcctcctgggctcaggtctgtggtggccgcgggagagccagctccacgctgtgtggctggtgacatttccggctgccagggcccagccaatcagtgatggacccagcttgcttgggcgatgacacatgaaatatgataattttctgccaaagggccctggaagaggggaaggaagagagtgtgtgtgtgtcgctgggaggggtccacacaggagcgcctgtgatgaggtgggagggtgacagtgcacttgttttcacggtttgcctggcaggactaggcaagggagggaatgggctgtgatgctggagcggctgtaggagcgcccctgtagctcccgaggtgagccactgccgctgctcttaggcgggaaccagcggaggagcagacagcgccatgctggagctctggggctggggtgaaaaagaaactgtcaaagacatttgccttcttaacacacgtgagcaaggttaggactcttgtttcttctcagcgctacctctttaaaagccagaacaaaactgcagtaaacaccatctgggtggctgaagtactcgaagaataatttttttcaaaaaaatttaggctggaggttgtctctccccctaccctgtttttctacctccatacctccatgctgacccttaaaagaaaagtgaaaaacaaaacaacagaactcaataacaaaatcttgaagaagggcctaagtctgaatcgtaaagactctaactaaggttcaggtggtagttctgattcctgattctggttgaaagaaagtatgtcttggaatgcgatgtggctctggattatgttcgactttagaaatagtgccagaactattctttgatttgtggacatggaccctgagactgcagagcaaggcagggcagggcaaggagtgcccgtgttgagctctcaggtgcagagaccccactcccttcaggcactgttgaggctccccggcccctgatctgcagccagaggctggtgaggtgtgacacgcttgctgacaagagtgccctgtctcgtctgacccgtgaacatgggtgttcagaagtgaaggatcatagtgtttacataacgtgccaattagtactgagaagctcatcagtgcaataaatatttatgacttgcatttgcattttttctctccacgtatatatatataatatgtgtgcatatatatgtgcatatatatgcacatatattatacatatatgttgttttttaaaaagcaccaataaatgaaatccttatcactgtgtgcaagcctactgtgcctttaggcatgggactggcttcctgcgctgggagtgacagctattccgaagtgataattggtgtactgtgtctttaaaaggttaaaccccctttcaaaaaaggtctggactcctagtggaaaagacaagcgaggcatgggttggctctggattcagaaaacagctgctgattagattctgtgtctgcaggctgaatttattccgtgtttttcagcagcacgaattcaagagggatgcttctgtttgggtttctgatcgtgatttatatttattcagaggaataacagagggtggatctgttcccggcgcgagcatgctcacaaccagccgactctcccattatccagctgcctagtttggtgcttcaatgtacatggctattccgtgtgcatatgtgtgtatacaaacacgcatgcatgcctggatggacatacgtatgcacaggttattttttaaggacaattctttcaataaggtctttaccccttacttgaaacaggtgttcatgaaaaaaatgcacaaaatcctgcctggccggaataattcatgaagaa

SEQ ID NO: 1269 - DNA, 2300 bp, Homo sapien
tggggaaggggagatgacaaatagcttatgacatgccaagtttaagaactctgtgggacatcaggtggaggctagaatttgaagcatagtaactgaactgaactcataggcatggacgacataacctaggaaggattctggaagaagccacagaagagatcaaaataagttttgatctttgaagagattaaaatagatttgccaagaaaataagatcaaatgacaaagaacggaaggaggaggagaaccaggaatgtgcagggtcatagaaagccacaggataaaatttcaaggagagagcagatttgagctctggtgcaggtagaagccacattctagggagctaatgtataagtgggagtaaaaacgtgtgggctacccttgcaagaatcttggatgagaagggctggttaactgcatggtaacttggagggcatacagagtcaagagaggttttttttttttaattttttaaattttttggtcatttggatttttggtttaaattaaaatatcattcacataccataaaattcacccttttatacagttatgtggttttttattatattcacaaagttgtacagtcatcaccaccgtctaattccttaacattttaatcaccccccaaagaggctttgtactcattaagcagtcactcctcagtcccccctcctcccagtccctggcaaccattagtctactgtctctatggatttgcctgttttggacatttcatataaatagaatcatacactatgtgggtttttgtgactggtttctttcattgagcactatagtgttttcaaggttcatccatgttgtagcatgtaacagaatttctttctttcttttttttttttttttgagacggagtcttgctctgttgcccaggctggagtgtagtggtgcgatctcggctcactgcaagctctgactcccgggttcacgccattctcctgcctcagcctcccacttagctgggactacaggcactcgccaacacgcccggctaattttttgtatttttttttagtagagacggggtttcactgtgttagccagtatggtctcgatctcctgacttcgtgatccgcccgcctcggcctcccaaagtgctgggattacaggcgtgagccaccatgcccggccttattattttttatggcagaatactattccattgtatggatagaccataatttgctcatccatttgtcaatcagtggacattcagttgtttccttttttggccttctgaatacaccgctatgaacatttgtgtacaagttttagtacagacatgtttctagttctcttgagtggaattgctgggtctccattgatttttgttgggcgagacctgatactgtttacaggctgagggtagggcgccggtgctgagggagaggtggtagagccaggggttggggaggaggagggagggctggagcagaggaggccactttcttcagcatcactcactctctgtttggcacagtcctaaatgcgggctaatctcccttcacatcttctagaccctctgcaaatacctcatacttgctgaccagggagcgaacccagggcttgaataaagcacccctagacctggcagagccgggaaccggctggctggttcgttttctgatgcagatcacagttttggggtctcctctggttagagcctggcccattcgggtttggttttctcctggacgttcgttcacacgtgaataaggccaattcaccgtggagtctgcgtctgaatccttgttccttaggtcatcccggggtcccagctgcccgggatgaaaaaacgatgcccgggtaccaggggtcggggaccagcaacgccggcgctcagcgtaaccgctaccctccccagccacggcgcacgcgcctcttccctgccaaggaaggggcggggagtaggcggggcgggcacctttgaggccaatcgaaagcgagcatccccgccctccgggccgatggacccagtttgaccccggcggtgggcggaggaggcggggcaagccgcgcggccaggaagggggcggggcccggggtctggaggcggggcctggggctgtcagtcccgcgcccgccgccgcgccacggctcctcgcatgccgtggcccgggtggctgccagcgctgccgcccgccgcccgccaccccggcatcccaagccgcctcccgccgccccggcccggcgcgcaggtaaggctggccgcggctgccgagccatcgcgcccccctcctcgggctcggtctgacgcgcgggcgccctctccgggccgt

SEQ ID NO: 1270 - DNA, 2300 bp, Homo sapien
caaggtcctacagttgatcagacccaagtatggacattccagcccagcattgagttcagcctgtgcatgtcagaaagcagcactggtcctgctatagattgagagatggggcttgtcatgggagttacataaggagaggcagggaaaccccccttcatgacgcatcccccataagccaggcacatgctggggaaatggttggttttagggagagtcacaggctctcctgggacaggtatcgttcagtttttccttacaacaaccactatgaggtctttttaaaaattattattactattttctctactttactgatgaagaagcggaggctcagagaagctaagtaatgtaccaaagatcacacagctggtaagtgctgtcattcgggtttgaacccagctctcctcatctctaagtcctcagttcctttttctataacaccacaggctgagcaaaggcaagaattccaggtagaaaatctgcttacccctcttgctcccacagtgacaacaaacatggtgcttcattgggcctcaggttactcatctgtaaaatgggaataaccattatgcctatcctttaggattcaatgggattacgactataacatagctttgtgcacagtattcaagaaatgagagctattattcccagatggttgttttcattttacagattagagggcatgtaagattcccttcatttccatagactctaaagagcaaaggctgaagtctggattcaaagcaatacataagaaattccaaagttcacttgagcttcttcttcatttcagtctgagataagaaaaaggaagatggcatttcaggcaggtggaatgagtaggcaaagacatgagatgggattagacctgtgcaaatagggttggtatggggaagcacgatgacatcagattttagccacttttgggagtggcatcttaaatgccaaggtgagctatcagggcttcaatccaacgttcaggctcaatgtcaggggagcctgccacatgccagagtctgtgcctggcagagctgagccctggcacacgcactgtttacagctgcctggtatggcagtggtgatatcacccttagagactttgccctcttctctctgacccaaccttcaaccactggggcagtaggttatgcattgcctagaaggcaactgtaagattcaggggctgctatggatgcattacccaggagataagggcaacctcaggtgggccggggccctcacagcaaccttacgagaggggttgtatcatgcccatttgatggaagagaaaactaagattccattagaattgatgtgacgtatcctaaatcacacagctgcagcaggactaggatttgaatgcgggtcaatctgcctccaacactactgccttttcctccatgctggattaggctattggcttctgaaagcacagacaggtgagatgggtcaaacatggcctgaagcacccaggcacaggtgggagatggcaagcagaggcaggttcaaaacgtggggccaggactggtctgaaagatagtcgttaaatagcactgaggagagggagtgagagagatgtgggtcttgggggagtggggtcttgagaaccctgaaatcagcagtgtctgcccactttgccctggaccagcctctctgtctgtatccttcccccagagaaaggaccatgggctgacctgggccaaggacacctggctggagccccttctctgacattaactagctccgtgacctggggaaagccaccctccctcctgagcctcacttttcctgtctgtaaaatggcctccccgtcatcacacccacacaggtgtcttgaggagtgaatgatggtgtgctccaaggcccccatggagagcccggcacatggcaggcactcggtgttcaagcactgtgttcccatagactctgggctcctgccctcctcgcccccaacccccttcctaggaaccagccccggcttgtcagagagccagctagctgtcaaccccaccccagctggccagttaatgagtgaccaggactcctgagcctgacctataaggaggtgctaggcagggacacagatgggagacggtggacagcggcagggggaacccagggagcgcgatgggctgcagggctgcatcagggctcctgccaggagtggccgtggtcctcctgctgctgctgcagagcacacagtcagtctacatccaggtgagtcccttggccagcgttccctttgcctgaagggccccatggtgggaggctaggctggagagggtgtactgggaatt

SEQ ID NO: 1271 - DNA, 2300 bp, Homo sapien
acacctcagcacacacacacacctcagtgtatacacacacgtcagcacacacacacctcagcacacatacgcacctcagcacacatacgcacctcagtgtatacacacacgtcagcactcacacacgtcagcacacacacacctcagcgcatacatgcacctcagtgtatacacacacctcggcacacacacgcacaacacagcagatgcactcagctcagcatacacacacacacctcagtgcacatacacacacatatctcagtgcatatacacacatgagcatacacacacacatacctcagtgcacatacacacaccccagcagacaccccagcagacacacatcccagcaaacacacacacctcggtgtacacacacgcgcctgtgtatatacacactgacacacacacacctcgatgtatatatgcacacctccttgcacagacacagataccttggtgtacacggacacacatatacccctcagcatacacacacatacacctcagcatatatacacatacactcctcagtgtacacacatgcctcagcacacacacaccttcagcacaagcacacatacaaacacaccttggctacacacacccatcagggtatatacagacaccttggcatacacagacatacacatctccgcagacacacccccccttaacacacacacacacacacacacacacacactcaccagaaaggggtgggaaatccagtgcagctgtgaggactgccctgggagctgggccaggagctacctgcccctccctgagggccttgtccctgcagttccctcctggtcaggccctgctctctccaattccctcttcagtgttgactctccccacccaggaattcctgcccaacctcccgccctagggctgtcctggcatcgggccaggttggctgagtagaaagatgacaatcccagggctaccctttctcctgtgtcctggggattcctgctcacaacagcacacagtgaatgcacgctgccctgagggcgcagtctgaatggggtcagagtctataggggcgcgggcacacccaagcaattccccagtgagatccgcggaaaggggactgtatctgcaggggcaaggggggcgggcggattggggaggagctcattcgaggacaccctgaggctgcagggcaggcaggacaggatggggaccagcacaggatggggacagcctgtgactcagacaggcaggaggtcaccagaggggccagggaggaccaggagctgctgtggctgctaataatatgggaatggacctctgctgagcaccttctgtgtgccaggcattgagctaaatgtttttaaaacctcacttgattctccaaacagtaatgcctaccacacacctaccccatgaggtaggtattatttttggttcccacaggggacacaagggacaacgagactcagagaggggaaagcattggcccaagttcacacgcctcacaactgggcagtaggtggaacggaacccaggctgtgcggagggcttccttgaggtcgcggcaatcaaacccagaccctgacttgccctgcagcctcccccgtggaatttctcacatttccctgaatattccaggcccgtctcacctcctggctgtccctttggcatgaaatggccttctgtcctcagtcccttctctgggaaaacttccacccattctccagagctcagcccccagtgcagccccgtcacctcatcctaggatcaccccaccctaatcgccctgcgtttcactgtcgggctgggcccccctcctcaagggcagggtctgccggccccacacagcagcacagggcagtcgtgagtgaatgtgccttgttggtgaatgaatgcaggacccagcccggctgtgggtcaaagtaggtgctcagggaggggccggggccccccctgcctggctcttatctcctagggctgtctcgagccttatctgataaggcctgacaggtgagcagatgagactgacagaggcttccaggttactcagtaacctgccctctttaaaagtcccgccgcttccccctggcatccagaacagccacccctctctcgggcactgctgccatgaatgccttcctgctctccgcactgtgcctccttggggcctgggccgccttggcaggaggggtcaccgtgcaggtgagtcctgtgtccctaccccggcccagctggctccctgcccctagtgcccaggtctggtcccctgagagagtacctcctctttggggctggattgagggtgtgtgtcccag

SEQ ID NO: 1272 - DNA, 2300 bp, Homo sapien
tttcattgtggaggtctttcacttctttggttaattcctaggtattttattttatttgtacctattgtaaatgagattactttcttgatttctttttcggattgttcactcttggcatatagaaactctggtttttgtatgttgatttttgtctcctgcagctgtccgttctagtagttttttagtggagtctttaggtttttccaaatataagatcatatcatctgtaaacaaggataatttggacctcttcctttctaatttgtgtgccctttatttttttctcttgtccgattacttgagctaggacttccgttaatttggttcggtcaaagcaaaataggtttgctgtttcttagggcttgttgaaatggaacactttctgcatttctgaattacctaacatttattagagggtttattttatggttctcacatgtatacagcttgggacacagtagtacttgtagtagtttctggtgatatttaatgccttctacctgagatcacttctgctcacatttttctgtatttatccctttttatcactcatttttgttaacgcttcttccttaaagatgccttttattattgatctaatttgtctacttagcgtatgccagggaacacatagaaatagttgaatgccccagatgaatttcccgttcgtctgtttcctcatttccctcctcttgaaattgatgaccctgctgtttagaactaccagaaggaggcagatttatttcaagccttcttgctgcctcatttctggaagcatactggtattgataaagcagatgtggtgtatagacttaagataatgtagatacaggttcacatctctctcttcttactattagaccaggcattatttaagcactttaagtttattaagttcccccaacaattctatgaggtcagtaccattattatccttacttcacaagtgaggaaactgaggtaaagttaagtaactcaaagatatataggtaattagggatagagctgggattcatacataggtccttatccagtgcccatgctttaaccatttaactctactgcctcttggctataagtatttattgtaatttcaggcttttttcttaaatgaagtctgccaaacaatattcttcttaattgagggtactataaaaaataagtaaaaaagagaaatgtcagtgtaggagactgtggaaaaaggtaatagaaaaccagcactttaattttggaatactaaaattgaaaaaaaaatcttgtttaaaattgataaaatattttgctcttttgttagcaaaagacaggaggtttttttttttatttcagggagatggagaaattttgagtttttatgagggggaatcatatatcagaggtaatagggaataaagaacatcactgaatatactaagagttaaatataaaacacatgcctactaacagtgcatatatagtgcaaaataatactactgaaaaataaaaaaattaaatgatttgatataataagcttatcataggcaagctttatggttcagtggcacttagtgcagagatgtatctttaggcatttggagcacccacttttctagattagggtttaggctgtactctacttgccatacagagaacttggggcagtggagatttcccagctccatgcctaggcatacctctgggtaactggtggttgcccattggaccccagctctcccctgccccccatacctggtgcttgtgccctgctattgggagacctgtaggtgggcctgcctggtctggacccacctgtcttggtctcctgctccagggctgggcagggagctcagacacctgtgcattctgcagatcagccccattgcttgaggcaacagagagcttctctgtaaacaaggatcacatatatacccatctacaatggcttcagctggctcttaacctgtgagtgccaccaactgacctggaagtttaattgcatgacacagtagaaaatctgctgacacaagtgtgcagcactagggatctagataaacttcctgagacctccaccaccctggccccacaagatgcagtaagcctgctcacgtgcccagtacatcactgatataaccagcatttgggaaaactaccattcaaaggctgtctacaaccatggaacttaatgcagactctttgccactgaaagcacccagaactaaagccaaaagaccctacgcaacatatattatagacaccttctgaaggggagaaaaatcacatccaaatgaaagcaaattcaaaaaataaggagagacggcttatct

SEQ ID NO: 1273 - DNA, 2300 bp, Homo sapien
gcctttccaccagctagctgttccttctgcctgggacactcttccccagacaactgcatggctgactccctcagctctttcaggtctccgatttaaagtcattttataaatgaggcccatgctgacggctctatttaaaattgcaggccaggcgcggtggctcaggcctgtaatgccagcactttgggaggccgaagagcgcggatcacttttgagttcgggagtttgagaccagcctggccaacatggtgaaaccccatctctactaaaaatacaaaaattagccgggtgtggtagcgcgcgcctgtaatcccagctacttaggaggctgaggcaggagaatcacttgaacccgggagttgcagtgagctgagatcgcgccactgcactccagcctgggcgggagagcaggattccctcttaaaaaaaaattgcaaacccccttcctccagttttcctcataccccttaccctggtgtatttttttttccccatatgccttctaacatattacataattctcttacatttatcatctttctccttatattagaatgaaagctccaacagggaagggtatttgttttctctctctcttctgtttactgatacatcccaagcactaaaatagtgtctggcaaccttagtagtgattggcaaatatttgttgagtgaatgagtacatgaatcttcagaatcttgctagtcttataaagaaaaggaatatgtgaatactttgaatctccagtgcctagaaatgcttgaccaaacggcaggtgttcaatgtttactgaaggaattgtgtgctcagatctgctggaggtctttatctgaaccctttgagactatgtcaaaaaagtacccagggccaattcactcatgcctctccttttcctctcatccaatcagcctagtattcatctaacaaatatctaagtctccaaatattgagccacccattgtgagttcaaaagcgtgtttggcgctgcaggggaatatgtgactaacgcgaatgaagcaacagcaaatactacactggaatgtaattaagtgtgaaattatagggcagattatcagtgctaatagtttagagaaagaatcagtgaagactgacgtagaagtaaattccaaagttcactcgtcgaccaaactacccttctaaacgctccacctactgatagtagtaccataacctgggtagctaccttgagaattagaagggcctttagaggtccaactcctttaagaaagaaagaaagaccaggcacgggaaaggcctccgcagacatgagtctagcacctgggactcatgaagttctgaaaagaggggtgtcctgaaggtccaaggcgcctttgttgggggtcccggaatccgcggtgtgccaggtcggaaaaggcgtccgctttcctggagaggaggctaaggtgccgggcgcttcggtgaggtggcggatgttggggggcgggggagggcagaaggcaccattccttcggggcatggggccccaggtatccgtgggcagggtccaaagccaccgatccctactgtcctcaactgcggggttgcctccgccgcctttgctcccagacgccactccgaggcacaaggaccccaagtcgctcggaactgccggccgctagatgacaccggctgcgccgatgcagagcctcgggagtctcagggcactacttgtcccagcggagggatcctgcgtgcgtcgaagcgaccgtgaccgcgcagggacttgacgccgctgacgccgggccggcggcgcagcgacgccgcaggaggcggtggcggcgagggcgggcgggggatgcgggtcgggaagtagttccgggtgcgcggccccggatgttggctgctcttgctgccgccgccgctctcggggctgctcggggcctcgaccgctcgcagtaggcaccgttgggacctttcccgggggggcggagacgcacggagcggccgggggctcggccgggccgtcccggcctgcgcagcctgaggtaagtgccccccgccagggcggccgggcctgggcggcgggcgaggaggcggggctgtggcatctcccgggacggaggcaggggctgtcctccgcgagacgccctctctcttccagccgcagccgcgttgcggggtgggcggcgggtggggcagggggcctgggccccggctggggcctggcggacgccgagggctgggtccttccctcccccgcggcgcttctcagctgctgctgcccctcagctgggaagcagcggcttcgcgtctcccgcccctcccccaggcggggcac

SEQ ID NO: 1274 - DNA, 2300 bp, Homo sapien
taatggagcctctggcttccaccattgtcctcttagttctgctcttagcacggcggccagagtgatcttttgaaagcacgagtcagatcctatcactcctctgttcaaagcccagcagtggttctgtttcagccaagattcctacagctccctacttgagacccctctctctgatcttatctcctcattaggctcccatttgctcacggctccaaccgtcctggccttctcattatttttaacacttcccgaggcttttgtctccaggcctttccaccagctagctgttccttctgcctgggacactcttccccagacaactgcatggctgactccctcagctctttcaggtctccgatttaaagtcattttataaatgaggcccatgctgacggctctatttaaaattgcaggccaggcgcggtggctcaggcctgtaatgccagcactttgggaggccgaagagcgcggatcacttttgagttcgggagtttgagaccagcctggccaacatggtgaaaccccatctctactaaaaatacaaaaattagccgggtgtggtagcgcgcgcctgtaatcccagctacttaggaggctgaggcaggagaatcacttgaacccgggagttgcagtgagctgagatcgcgccactgcactccagcctgggcgggagagcaggattccctcttaaaaaaaaattgcaaacccccttcctccagttttcctcataccccttaccctggtgtatttttttttccccatatgccttctaacatattacataattctcttacatttatcatctttctccttatattagaatgaaagctccaacagggaagggtatttgttttctctctctcttctgtttactgatacatcccaagcactaaaatagtgtctggcaaccttagtagtgattggcaaatatttgttgagtgaatgagtacatgaatcttcagaatcttgctagtcttataaagaaaaggaatatgtgaatactttgaatctccagtgcctagaaatgcttgaccaaacggcaggtgttcaatgtttactgaaggaattgtgtgctcagatctgctggaggtctttatctgaaccctttgagactatgtcaaaaaagtacccagggccaattcactcatgcctctccttttcctctcatccaatcagcctagtattcatctaacaaatatctaagtctccaaatattgagccacccattgtgagttcaaaagcgtgtttggcgctgcaggggaatatgtgactaacgcgaatgaagcaacagcaaatactacactggaatgtaattaagtgtgaaattatagggcagattatcagtgctaatagtttagagaaagaatcagtgaagactgacgtagaagtaaattccaaagttcactcgtcgaccaaactacccttctaaacgctccacctactgatagtagtaccataacctgggtagctaccttgagaattagaagggcctttagaggtccaactcctttaagaaagaaagaaagaccaggcacgggaaaggcctccgcagacatgagtctagcacctgggactcatgaagttctgaaaagaggggtgtcctgaaggtccaaggcgcctttgttgggggtcccggaatccgcggtgtgccaggtcggaaaaggcgtccgctttcctggagaggaggctaaggtgccgggcgcttcggtgaggtggcggatgttggggggcgggggagggcagaaggcaccattccttcggggcatggggccccaggtatccgtgggcagggtccaaagccaccgatccctactgtcctcaactgcggggttgcctccgccgcctttgctcccagacgccactccgaggcacaaggaccccaagtcgctcggaactgccggccgctagatgacaccggctgcgccgatgcagagcctcgggagtctcagggcactacttgtcccagcggagggatcctgcgtgcgtcgaagcgaccgtgaccgcgcagggacttgacgccgctgacgccgggccggcggcgcagcgacgccgcaggaggcggtggcggcgagggcgggcgggggatgcgggtcgggaagtagttccgggtgcgcggccccggatgttggctgctcttgctgccgccgccgctctcggggctgctcggggcctcgaccgctcgcagtaggcaccgttgggacctttcccgggggggcggagacgcacggagcggccgggggctcggccgggccgtcccggcctgcgcagcctgaggtaagtgccccccgccagggcggccg

SEQ ID NO: 1275 - DNA, 2300 bp, Homo sapien
agtgagagaagcggagctgcccaacacttgtaagaggtggtgctaaacaggagttcaagacaagtctgagcaacatagtgagatcccatttctataaagttaaaaaatttttataaaggaagaaaaccccaaaagctccagacttggagctaagtctagtttctctctctttttttttttttaaagacagggtctcactctgttacccaggctggagtgcagtggcgcagtcacaactcactgcagccttgacctcttgggcccaatcctcccatctcagcctcccacatagctgggaccaaggatgcacaccaccctgccggctaatttttttatttttgtagagacagtctccttatgttgcccaggctagtcttgaactcttgtgctcacgcaatcttccgcctctgcctaagtgttgggagaccatagacagactgtacgttatttattttttagagatgggggcttgctgtgttgcccgggctgcacttgaactcctgggctcaagtgatcctatcctcctgcctcagcctccttaataactgggattacagtcaagcgccactgtgcccggctgagactgcatcttatttatcttactcattgctactatctagttcaagccatcattctgtacctgggtaatggagcctctggcttccaccattgtcctcttagttctgctcttagcacggcggccagagtgatcttttgaaagcacgagtcagatcctatcactcctctgttcaaagcccagcagtggttctgtttcagccaagattcctacagctccctacttgagacccctctctctgatcttatctcctcattaggctcccatttgctcacggctccaaccgtcctggccttctcattatttttaacacttcccgaggcttttgtctccaggcctttccaccagctagctgttccttctgcctgggacactcttccccagacaactgcatggctgactccctcagctctttcaggtctccgatttaaagtcattttataaatgaggcccatgctgacggctctatttaaaattgcaggccaggcgcggtggctcaggcctgtaatgccagcactttgggaggccgaagagcgcggatcacttttgagttcgggagtttgagaccagcctggccaacatggtgaaaccccatctctactaaaaatacaaaaattagccgggtgtggtagcgcgcgcctgtaatcccagctacttaggaggctgaggcaggagaatcacttgaacccgggagttgcagtgagctgagatcgcgccactgcactccagcctgggcgggagagcaggattccctcttaaaaaaaaattgcaaacccccttcctccagttttcctcataccccttaccctggtgtatttttttttccccatatgccttctaacatattacataattctcttacatttatcatctttctccttatattagaatgaaagctccaacagggaagggtatttgttttctctctctcttctgtttactgatacatcccaagcactaaaatagtgtctggcaaccttagtagtgattggcaaatatttgttgagtgaatgagtacatgaatcttcagaatcttgctagtcttataaagaaaaggaatatgtgaatactttgaatctccagtgcctagaaatgcttgaccaaacggcaggtgttcaatgtttactgaaggaattgtgtgctcagatctgctggaggtctttatctgaaccctttgagactatgtcaaaaaagtacccagggccaattcactcatgcctctccttttcctctcatccaatcagcctagtattcatctaacaaatatctaagtctccaaatattgagccacccattgtgagttcaaaagcgtgtttggcgctgcaggggaatatgtgactaacgcgaatgaagcaacagcaaatactacactggaatgtaattaagtgtgaaattatagggcagattatcagtgctaatagtttagagaaagaatcagtgaagactgacgtagaagtaaattccaaagttcactcgtcgaccaaactacccttctaaacgctccacctactgatagtagtaccataacctgggtagctaccttgagaattagaagggcctttagaggtccaactcctttaagaaagaaagaaagaccaggcacgggaaaggcctccgcagacatgagtctagcacctgggactcatgaagttctgaaaagaggggtgtcctgaaggtccaaggcgcctttgttgggggtcccggaatccgcggtgtgccaggt

SEQ ID NO: 1276 - DNA, 2300 bp, Homo sapien
catcaaggaaaaggccaatgtagaacatagaggttctagagctcaagcttacgaagtgttaaacaaaaattatgggaggccattgttttggactgagcttttgcaccaggccacaacagaatagaccaaaccaaatcgagtccctcctgctaaatgccacataatcaaacttgaggtacatcccacaacagaccagcttttcctgaaaacaggagatttcagtttacctgagtcagaataaggaagtcccctctgctttaacccttaccaaaaaagtaacccaaagtagcctgatgttaagcaatcagctcttcttccattgctctatttccttgttcccctcttttaaaacccactcttctgccattgcccagtgaaagctctcattctattctgtggaatggaggctaccccaattcatgaatctcaaaagccaattcaatctataactaaatttgttgtaattttgtcttttgccataaaatagttttgaaagttaccaatccatagggcactattgttactttaagaaaatacattcatagaacgggggaggagatattttgcaacatcaaaatacttacttaagattgcttgaaaaggccaggcgcggtggctcacgcctgtaatcccagcactttgggaggccgaggcgggtggatcacgaggtcaggagatcgagaccatcctggctaacacggtgaaaccccgtctctactaaaaaatacaaaaaattagccaggcgtactggcgggctcctgtagtcccagctactccggaggctgaggcaggagaacggcatgaacccggcaggcagagcttgcagtgagccgagatcgcgccacagcactccagcctgggccacagagcgagactccgtctcaaaaaaaaaaaaaaaaaaaaaaaagaaaaacattgcttgaaaaataacttttgaaattccagtatacagaactttcctataggctcatcttagtgagtaaatgcacacacctgcacaatatttacagagaagcctgtgccttccctgagacaacttaccccatttctaagttgccattgctgggtctaccttgaaactactcttgcttccctaagccaaaaaagaaattaaaaaaaggcatattttaatgaactggaagagcaaatgcagtctccaaaaatggctaacttcaatcctgcagttatttagaaaggaaaatctggcttcaaacactattgtctgcaggcagggtttgcaattggccaggaccaaggacagtgtttaaagatgactcagttgtatggcctggggagagcgggagtggtgaagggagaccagccagtggtccttctaactgaaaaggatgctaggtcaattttttatgacctcgagtctgtgaaggctcagacctgctgaaacctaggaggggatgtccagtgtaagaaaatctgagaccccaggaaatgcactttcaaattatctgaatgggaggtgggtaagactcaacttccccctctcctacatcctcccccacccccgtggggcttcaggctaggatttcggcagagaaatccctctccttccaatgctttagggtccaactggggacctagccgtgtgaccttcgccataccccggaatctcctttgggacgtccccgaggccctccctgtccggggctcagcaggcgtccgcccgtgtcccagcccccgagcgcccgggatcgcctgggagacgcatccgccgcccactgcgcatctctggcccgtcagctcggaaaccctccgagcctcacagggccgccgccccggcccctcctgctccggctgtcccaccccagcccgcagcgccacgtccaccgggtgtccggggcctgccggggctgccctcctccgcctcgcctgcgcccgccggcggctcgctccccggaaccccgggtcctttcccccgccgccgcaagccccccacccgccgtccttccccggcaccgcccgccagggtcgcttctgcagccgccagcgcccgccgccgcgcgctgattggctggcggggccgacggcggcgctgagtggccgggcggattcgctgggtcagggctgcagagacgcctggcgcacccgcgggagcggagccgtggcgcgctcgccccggacgccggccgcccctccgctcgccctactgagcgagcggcccggggcgccgaggggtccgcgccgcgcggggcgcaccgccctggccgccatgtgctcccagctctggttcctgacggaccggcgcatccgcgaggactacccgcaggtgcagatcctgcgcgccc

SEQ ID NO: 1277 - DNA, 2300 bp, Homo sapien
ttgagagcactgaggaaggacacctaggccagtatgagaaggtactgcaacagcttcttgatctgttatgcagccgtcagtgtctaccttcctctgtatctgccacactgcagcccatcctctttccttaacacaaatgagagcatgtcagctcaaaaccattcatggtttcccaggagataaattccaaacccttgatctcatgtcactgtctagccctaacctttatcttcttggtttaaacttctactacctatcacaatgatgttccaacttttttttttttttttgagacacagtttcactcttgttgcccaagctggagtgcaatggagcgatctcggctcactgcaacctccgcctcccgggttcaaacgattctcctgcttcagcctcccgagtagctaggattacaggtgcacgccaccacatccggctaattttgactcaacctatagtaagaaatacatttttcctgtacacacacacatgtccacataaaacactaagacaaaagttttaagaaacaattcaggtaggattaacctgatactttctactcattctgtgctcttttttgttgttgttgttttctctaaatggtgattgtgacttattcataaactgctaaagggccctggcctgcagtttgaaaatcactgactgctccctccactactacgttctccactcggcccttagcaaactctgttcttttgccatttgccctagcagtcccggatgccgggaatgccctacccttcttcactactcctgtacacagcaggttctgactgccctctcaaaatgcagctcaaatgtttcttccacagggaaagctttccacatactgccccattcactatcgtctcactctcgttgcccaagctggagtgcagtggcgcgatctccgctcactgcgagctccgcctcccgggttcaagcgattcttctgcttcagcctcccgagtagctgggattacaggcgcccagcaccactcccgcctaatttttgtattttttagtagagacagggtttcaccatgttggccaggctggtctcgaactcctgacctcaggcgatccgcccgcctcggcctcccgaagtgctgggattacaggcgtgagccaccgcgcccggcctgtttctttactgatttgtctcccacattggaatgttagatctttgaaggaactgatctaccgagctgccccagtaactttagcacctaaaatagtgcataacacagagtacgccttcagaaaacatgagtgacgaataagtgggagatgagacagacgaggccacgggagtcttaggggcctgtcttaaagccgttttgaggtgtcccttgcagagtcaggggcaacggctaacgcaaggtacccaagccagacccgggaaagggagagagggagggagttatagcgcccaggtgccacgtttcagggcctaccagtaataagtgactgtgcaggccgcgcacacccgctcggctggggcttcgcacacctcacagcagagtctgcgccccttggggactgccagtgggtagatcacattcatggtgcagccagcagtgctggtctctaagacggttgcccagcaaggatacgctgaaccccggcgtcacgtgacgatcgcggggctgcgtacttgccagcatttcaagggcagagggcggcgggacgtgactcgactaacatctgggtgtattgctgaagttggaaaaggggaagaaagaaagaaaaagcagcacaaaacccacaagtcccacgggtcaaatggccgagaaacgactcccaaggagtccaagtccagaaaggcccgtacagtggccggtaagggtcaaacatggccagttcttcacccaggctaggaaacgaacgtgagggaacgtgaccctaccagatgcccacccagccggggatccccctcgttgcagtgtcactttcgctgggctctggggcagaacaactacgcatttccagacttggcgagatcgggacctagtgtcaaaagaagggtagtgaaccgcccactcagtacggcgcggcgcgtacaccaggtaggcgagaaggggcgtggcgcggcggccgcgaaacgtgcgcaggcgccggccgctgcgctgcagatggcggaaatggatccggtagccgagttcccccagcctcccggtgctgcgcgctgggctgaggttatggctcgcttcgcggccaggctgggcgcgcagggccggcgggtggtgttggttacgtcaggcggcaccaaggtcccactggaagcgcggccggtgcgc

SEQ ID NO: 1278 - DNA, 2300 bp, Homo sapien
cctgaaggttccaaaaatctaaaatcacaaccacacctaccttatccatatttcttccttaacctacaatagcccccaactaatctacccactccactttctccttctctacttcgtctttcatactgatgccagaatgttgttctcaaacaaaaactttatctcattctcctacttatgtgtcccttagctccacaagaaaaagtccaagctccttaaaaaaggaaaataaagtcttctacaaagcaagccatctcttcagtcagctctccagccttaccaaagcacttcggttcacagcccactgcccactttcaaattcctactgccatactccacctggaatgacctttcccacttcgtacaccctctgctcattttgttttgatttttggtgtttttttttttttttgcgacggagtatcgctctcgtcgcccgggctggagtgcaatggcgagatctcagctcactgcaacctccgcctcctggtttcaagcgattcttctgcctcagcctcccgagtagctgggattacaggcgcctgccaccacgcccggctaatttttgtatttttttagtagagacggggtttcaccatgttggccaggctggtctcgaactcctgacctcaggcgatctgccctccttggcctcccaaagtgctgggattacaggcgtgagccaccgcgctcggttctgctcatcttttaaaacccagttcaattcatctcctccaagaagcttcatcgactcccccaggattcactcgccccatgatctgactgcactttgtacatacctccactagagcatttatcactctgtattgtaattatgtctgtgtccagctccctcactagattgtgaggtccatgagggagggcggtgtcttattcatctctgtatcccctgtgcctagcgaatacagatgcagaaaggccatctccagatcaagaggaaattaacccaagattggttatatgggattagatctctggaagagaagcgcccatcacctgcagtgggcccccagatgactggatcttgtgttcaggcatttcagagacaggaacatagaaatctgacacagccgcagccaggtaaaacatcgcagaagggcctgcaaagagaaacacaaggtgttaacaaatcggcgaggtacgatataggatcagctccttctcaactcgggttccccagctgagatccgtgggtaagcaggaggtaaggggataagtggctggaaagaaaggctgtgcttccaggcaaaaggggtactcctagggcacgcacctagcggattgagtgcctgggccgcagcctgcaacagatgcaaatagtccgccaaagtggtgaactctactgccaggaaggtgcctgcagccgcagcctcctggtagctcctcagagcctcagcaaaacccggaagtgcattctcctcggcctccaggctcagcaagcccgaaagggctgggcccgaaggccgcagagcggacagccaagtctggggtgggaagcggtgggcataggggaaggcagagcgagcgcgatacaagaacaggaccccgtagccggcggctaggaaggcctcggccgaggttgcaccgcgccgcccgctgctgaagttgtccaggaagcgcaccggccgcgcttccagtgggaccttggtgccgcctgacgtaaccaacaccacccgccggccctgcgcgcccagcctggccgcgaagcgagccataacctcagcccagcgcgcagcaccgggaggctgggggaactcggctaccggatccatttccgccatctgcagcgcagcggccggcgcctgcgcacgtttcgcggccgccgcgccacgccccttctcgcctacctggtgtacgcgccgcgccgtactgagtgggcggttcactacccttcttttgacactaggtcccgatctcgccaagtctggaaatgcgtagttgttctgccccagagcccagcgaaagtgacactgcaacgagggggatccccggctgggtgggcatctggtagggtcacgttccctcacgttcgtttcctagcctgggtgaagaactggccatgtttgacccttaccggccactgtacgggcctttctggacttggactccttgggagtcgtttctcggccatttgacccgtgggacttgtgggttttgtgctgctttttctttctttcttccccttttccaacttcagcaatacacccagatgttagtcgagtcacgtcccgccgccctctgcccttgaaatgctggcaagtacgcagccccgcgatcgt

SEQ ID NO: 1279 - DNA, 2300 bp, Homo sapien
ttcattaatcaggaaatgtgaccttgaacagaggaaaaatactgcagcagtcaagactgttctggaagcagcagtccctttgaacaaaaaaattttcttagagacaaggtcatgcttagtcacccaggttggagtgcagtggtccaatcatggttcactgtaatcttgaactcctggactcaagcactcctactgccacagccttctgagcagctgagactacaggtgtgtgccaccatgcctggctaaatattttatttttcatagagacaaggtcttactatgttacccaggctctttttttttttttttgagcggagtcttgctctgtcgtcctgggtggagtgcagtggcacaatctcggctcactgcaagctctgcctcccgggttcacaccattctccttcctcagcctccctagtagctgggactacaggcgcccgccaccacgcccagctaatttttgcatttttagtagagatggggtttcaccttgttagccaggatgttctccatctcctgacctcgtgatctgcccgccccggccttccaaagtgctggcattacaagcgtgagccaccgcgcccagccacccaggctcctttgacaatgattttaagtgaacttcaggtccaatttgcaaaaccccaaaagcagtgggctctgtcagtggctgcagtactgaagggcaagaagtagaatatgttcttctctgcattcatagctttatgtggatgatgactgtcatctttgaatgtacaatggggatatatggggttaaaagtagaagtgatcttaatgtttgtctttaccataattattacctcccttgggaattttatatcctgtcttgttaacgcttaaaaacaatcagtgttctacatgaaattatttagtgttttccacttcagtttaatttatattcagagcacttagattatttacacaagtaaaaattccaggggggtgggggagagtgtgtgtgtgtgttttaatagcaaatggaagtgtataaagaaaaggaacatgagtcaatgagggtaactaagaacctgatcttggatggaggatcaaggaatgtctccctgagtaggtgatacttaaactgataaacaggagtgaagtgggctacaagtgctggtggtgagccttttagttcagaaaaaaacacttgcaagaggtctagtgccagaaggagaggttgaggcactttattatataaagagtaaaatacgtccggataatgcatgtagaaccagcaaaaatttgtgaagtattctcttggggaactagagtaagaccaagaaatgttgtgtttgggataccagcaaagcaagggcccccaaaacatgactaaaatcgagtttgataattaactagaattttgcaataagagcatctaaaaagatgatataaattgagtatgttaaattttgtgtcatttataagtttttattttgcattacataggtggggaagataacgttcatcttacctgaattttcagtgcttaggacttctaaagggcttcagccttagggacaattctagtcaagcccagtttcttcctttttacaataataagctggatccaaaaattgtgatttatcttacgtgccccacgtggctagtgacacgatctaggcctaaaattcagagctcttgagctagcacttcctgcccctttaagaatgaaggaacttgtagaaaaataaatccaaggttagtaggcaggggctccagctgagtcctggcgggaagttctttgagagctagaacgccccaagacaaaatgtattcgctaagtcgcaaacgctcgacatgttaccatggttacagctgtctccaaagccaatggaatgagttgtactatcgatacggccgggacaactccgcccccgacccgaaggccaatggtgtgagacataataacagtctccacaagaaccacagtctctggttccactggcgtgcgtcgtctctatggttcccgccggaaggacgcgtctgcgtctctgcggcgagcgcggttgctatgacgcccaggtctccgtaggcacctgcagctagcagctgagcgcgtaggggccgagcgaccccgggacgctcgcggcaccctccgcaggaaaatttccgacttggttcttgaggttcctgcctcagccccaaggaggaaagcacccattctcccctcttttccgcattacgggccttttctgcttctccccagtatggtccgaaactacaggaggggaacccctcctggcccggcctttctattccctggctggagtgattcc

SEQ ID NO: 1280 - DNA, 2300 bp, Homo sapien
catttttgttcatgaagactgatttatgtacgtttcatttatatattgaattttgttaagaagaaattggaacaaatccaccagtctctacaaagagaacatcaagaacctgtgtaacagtctaaaaaaactgagtgaggtaaaaaagaaattataatcctttacttaataattgtggctaattacaaatcagctttcaccttagaagtattttgtttgaatgtatgataatgtatagattcatggccagatgtggtggctcatgcctataatcccagcactttgggagaccaaaactggaggatgacctgaggccaggagttcaagaccagcctgggtaacatagtgagactcagtttctatgaaaaataaaaaaaaattagctgggtgtggtgtagttccagttacaggggaggctgaggtgggaggattgcttgagcccaggagttggagtctgcagtgagctatggttgcgccactgcactctagcctgggtgacaaagcatgacctcatctcttaaaaaaaaaaaaagagtcatgctgtaagaattatcaaattatgcataaaagtattttgaacacatcacaaaaatttgaggaggaaaaaatcactcatttgacatgatagctgattttttattgaatgtatcaaaatttaaacaatctatgttatgtccttttaaaaatcaccatgggactaggccaggtgcagtggctcatacctgtaatcccagcactttgggaggccaaggcagacagatcgcctgaggtcaggagttcaagacctgcctggccaacatggtgaaaccctgtctctactaaaaaatacaaaaattagccaggcatcgtggtgcacacctgtaatcccagctactagggagactgaggcaggagaatcacttgaatctgggaggcgtaggttgcagtgagccgagattatgtcattgcactccagcctgggcgacagagcaaaaccctgtctcaaaaaaaaaaaaaaaaaaaaaaatcaccttgggactatacatattttttatttacaaatatgtttgtagttccccttttaaggagttctttagaatatatagcacattattttaaatatattcagttctgctcatggaatttaatgtttttgatctagggaaatgttattaaaaggtaagtctggtgaataaagtgtacactgtgaatttaagtatgggaggtaacccaagattaaactgtacatcacagtattattttcaatagcaaaaatcagaagctatccaaatttttaagtgagtacagaaataatgttatagccatgctggaacacagtacagcctttaaaaattatcattacaagctgggtgcggtggcttatgcctgtaatcccagcactttggaaggcccaggtgggtggatcacgaggtcaggagttcgagaccagcttggccaacatggtgacatcccatctctactaaagatacaaaaaatgagccagtcgtggtggtgcgtgcctaaaatcccagctacttgggagtctgaggcaggagaatcgcttgaacctgggaggcggaggttgcagttgtgccattagagactgtgccattgccctctagcctgggggaccaggtgagactccatctcaaaaaaaaaaaaaaaatcattacattagaaaatctgtacagcaatttacagagaagtgttcctgtataatgttaaatttaaaaagccagacagaaacttgtacatgtgttggtattatgactatgtaaaaatgtatataaataaaaaatactgcaaagaaatagaacaatacactcatatctcttggatgttaggttgaaccacatgaaaccaaatatttataagtaaaagcaatcaaatatcaccagttttatttggttcaacctaagaaaggaaatacacagacacacacacatacacacacacactcacacacacaaagaaatacacatagatattgtttgctaatttattggcttttaaacattaatagaaaatagcaaaatgtcatgagagtacatttgctctttgttttattactaatagaagttttatttcagtatcataatgaagacctggaaaaagacaaaacatcacaaaactgcctaggaagaggaatggaacaagtagcaaagaagttaggggtggctcatgaagagattcaaaggctcactgatgaactacaagtgaaggagaaggaacaatgtaaattaggtaagctgtggtttcagatgaccatttccgatcatgctttaactgtactgatctcatctcagggtggaacatgagaa

SEQ ID NO: 1281 - DNA, 2300 bp, Homo sapien
tgagtcaaaggatataaatgttaatattgctctaggacatcacttcctttgctttaaaaaagggttctgcctgaccaggtgcggtggctcacgcctataatcccagcattttgggaggccgaggcaggtggatcacttgaggccaggagttcaagaccagccaggccaacatggcaaagccctgtctctactaaaaatacaaaaattagccgggtatggtggtgcacacctgtagtccctgctatgcgggaggctgaggctcgagaatcacctgaacccaagaggtagaagtttcagtgagctgagaccactccactgtactccagcctgggcaaaaagtgagactctgtctcaaaaaataataataataaatacataaataataaaataaataaaaagtgtgtcaacatactgttttcatagtcaagttactcaacctccttgagcctcaatttcttgattcctaaaatgggaacaataatagttctctatcccatagggttgtgaggaccaaatgaaatgaagcatgtaaagtatttagcacgtagtaactgcttaataaatgctatcatcatttattttcactagaggtttatcaatgtactatttttttcacaacctcatcaacattggatattatcaattttaaagatttattctaaaacagttggtataaaattatactgaagcgtgactgctgctgttccttttccccctcctcccctttcttctttttcagttggaggagaccaagaggagaggatcagtaaccagaaataaaaatgaccctttacattgagacacactgtatttttatatgtaatccttgctttctcagacaacagagctagaaagatgatcataggaactaggaaataataactattttattaaatgcatgctgttatattgaatgagccttgcccaaggtccccttctttcactaaattcattgcatctattatttattgaatacctactatatgctattcagtaggcgacattgcagctacagctgcgaataggaccaggagagtctctactttcatggagtttatatgctatcagggaggaagattatgtgtgtgtggcaggaaatgaggtgtagacacataccatacgaagataatgtggaagtgggggtggcatgaagaaaacaaaccagtgatctgaatgaccaagggctactttagattaggtctaatgttgcctctcaggaggtaacatctggggtgagccctgaactacaaggagcattacttcccacacgcataccccaaccaacccccacaatcccccgccaacccacattaagttctggaaggaatatttcagacagaagtaacagctattacaaagccctaaagagaggagggatctcagtgacctggaggaacagacaggtcagagcacagtaactaagggcaagtggtacaagatgaggtcaggtacgtgatagccagataaatgcactgtagggcttcgtatgcacggaattggattttattctaaatatgggaagccaggagttatttttaaaataaataggaagcacaagagttattttaaaaataaaaaataaaaaactctagttgctttatgggaaatgaattggaaatgacaaaactggtagcttttgtggcagaacaaacattatctattgtcctgacttagaggaagggatatttacttagcaagcctgtacgtgccaagctgttctaaacgctgaggatgaacaaaccagagttcctgccttcacggtgttcacactagcgggcagaagacagacagcacgtgtggcggtgcagagggcttggctgcaagagccgataaggaggaccctggcgactgcctagtccaaaagtcctagctagagcaagatcaacttgtactgcccttagtacagccacgtgagtggggtgaccattgaccttaaccaaaaagatgtcaaggctttcctcctcctcactcccgcgtccccagtgccaggcagagtctctcagctagaccctagcagtctcagcacacaccgcacggggcgacagcttccgggggcggagcctggtctcgctccacgtctaccgcgcctgctccccggacgaaatccgcggaccgggctttaggttcgccggaatcccacgctcccgacttctgcttccgggtcggagccatggcggtggcaaattcaagtcctgttaaccccgtggtgttctttgatgtcagtattggcggtcaggtgagatccaggaggctgcccacacctgcgccgaagggaaactgctcggggctaggcaggcaga

SEQ ID NO: 1282 - DNA, 2300 bp, Homo sapien
cttcccttcttcttggtggtgttcttgagtaagataatctggactggcccccgtctttgcttccctgcctgctgctgccccatttgatcaagagaccatggaagtgtcagagattcagaatccaagattgtctttaagttttcaactgtaaataaagtttttttgtatgcgtatgttttttttttcttttggttttgtttgtttgtgggttgtttttaaatagttgtaatagccctgtctcctcacacctcagctttagctaggaggactggcactcctcagaggccagcatggaccagagccaagcttttgctgtgtatagttaatgcctcttgacttgcaggcagttgtagcaaacctaactctcttaggttaaagctgatggacaaagaaggcacagccccaggactttacagctctacttattccaaggatgttcccagaaggatcaatttggttagttctggattgagcccgtgaggaaagggtcactaacttgacctatctacttacctcagagcatccttgaaagagtcaaataagagagtggatatgaaggtaatttgtagtaaacagcaacaataccttagaaaatgttagttttgggaccgggtgccgtggctcacacctgtaatcccagcacttggggaggccaaggtggacagatcacttgaggccaggagttcaagaccagcctggccaagatggtgaaaccccatccctactaaaaataaattagctgggcttggggcacgtacctgtaatcccagccacccatctggtggctgaggcacaagaatcgcttgaacctgggaggtggaggttgcagtgagccgagatcgcgccactgcactccagcctgggtgacagagtgagactgtctcaaaaaaagaaaatgttagttttgaaaggaaacagttcaacatataaagatctcacttagctgggtgctgtagctcctgcctataatcacagctactcagaagcctgaggtgggagaatcacttcagcgtgcagaagttcaagacctgcctgggcaacataccaagaccttgtctgtacacaacaaacaaacaacagcaacaaaaaaattagctgagtatggtggcacatacctgtagtcctaactgctcaggaggctgaggcaggaggatgcttgagcctaggagtttggtgttgcagtgagttatgatcgtgccactacactccagcctgagtgacagagtgagaccccatctattttgaagaggcaaagaagaaagttccctgatgtttctttcatgaggcactttctgtttgctctcattcttatttgctttcttctgtcttgtggatggggatgcctcttaactactggcagcaagatactgcaagagcaaaggtagcaaacagctgaattctatgacaatagaacttggttaaaagtgttgtttcagtgtatcagatgacaagagatggtgataagggccctacagtacagacatttgcaactctagccaaggaaacatacttcagaggacattgtagagaaaggactgtcatctagtggaggagagatttttaagtaactatatagggtgggattgtaaagagatggggaggatgaacagctgtgatccggagttgacattcttgagatgggctggtcagctgcactctgttacatctggcacctacattctatgccagtctctgtcctaggccctggagctaggtaagatgtggctcatgcttgtgataggagacagggacagtttcaatgcatggtggtattagaatgtgagcccgtgtgagggcagggcaggatatttgggttttttgtttttcgttttgagacggaatctcactctgtcgcccaggctgcagtgcaatggcgcgatcttggctcactacaacctccacctcccaggttcaagcgattctcctgcttcagcctctcgagtagctgggactacaggcacatgccaccgtgcccgtctaattttttgtatttttagtagagacggggtttcactgtgttagccaggatggtctcgatatcctgacctcatgatctgcccacctcggcctcccaaagtgttgggattacaggcgtgagccaccacgcctcgccgatctttttgctttgttttgtttttagctgctgtgtccccaacacctggaagaactgagcttctggaatctaatagatgctaaataaatatttgttgcatgaatgatagtggtatgagaggaagagggaaaaaaaacggaaaaaggcttcttggaagaggtgacacttgaggtaagtattgacaggc

SEQ ID NO: 1283 - DNA, 2300 bp, Homo sapien
gtaatatttcaccatctcccttgtcatctgatacactgaagcaacacttttaaccaatttctattttcatagaattcagctgtttgctacctctgctcctgcagtatcctgcagccagtagttacaagcacctggaaggttggacagggaatacaagagaagactctaagacttctcttagaagtcatagagtccagtaaaccacattatggaatctggactaccctaagggtaatagtagtcactggaagattttaagtaagacagtgtcatgatcagatagatgttctcaaaagaactttctggctgttgtggtgggtaatattagagtaagaaagaggtagagaggtgtggttagtagccaacagcactgctctatgctaggggtcagccgactacactccgtttttctgtggctcatgagctaagaatacaaatggtttttaaaatgtttaaatagttgaaaatatgtaaagattcgtgtcatgtaaaaattaaggctgttttcaagctccaaacctgagtagtaagtcagaaccatatggtcggccaagcttatattattaactatttggctctcacagaaaaaggttcctaccccttgctctaagcaattggtgatgatggcctacagtagtgacagtaggaatgaaaagactctgaattgacatttagagggtttaggactgactcaagaacgcctttaggaggtggaactcacaggcctagacggcattggtaggggtaaggaatactgcattagcctcctaactgctttctctacttccattccttgcccctctgcaacccattctccactccgcagccatttttaaaaagatgcccctccctacttatgactctaaaattgctcttctcactcttcccctcaggatatatttccaattaaatatacctaagtgactgcccacctctgcaacccaatgtcacattcgagtcttactgaactacttgactgcatttcccgagatctcacctcttctcgcctgtaccctgtgcgcggaaagtcagccctccaccttctccctgcttccactcccaaaatacttcgtggttttgcagctctggagtatttaccgtgttggctgtttaaatttctgcctccatcagaaggcagaaactgactcgcgaactattccatccccagccgatagtagacgcttaaaaaagaacgaaagaaggtgggtggaggacttcagtaacatcaggtggcagcctcaattttatcgtttgtgaaacgtggatagtaatccctctatcacgtggctgttgcaggaataaagtgaaaaaacaaaacaggctagcttgttcaataaatgtgagttgaattaaatctgatttgtggtcagtagaaaaagatgtgaatacttggaaaggaagacacatttttttaaatatatgcctggtaaaacggatcagaaggcaggtccccatggagcacaccctcgccctaaacatgctgaacccgggctgccatagcctgcgtggtccctccaaggtgactgctccgacaaaagggtacgctcttcaaacgcatacgtttaaggcaattccagaaaccctcggctgtgccgcgactacacggccattaaagaaaagacgactctatgcccgccgtaatgttctcagatcacagggaccgtatttggagctgggagggagggaagccttttcttcacggggggctaaggcgtcttcgagcccccttccaatcccgggtccggccgggtaatccctgcccagcgttcgggcgtgcctttttttcagccgagacacaaccctgaacgtggggcccgccagcccggcggctgcctcgtggaagtcacgttccttctgcccgtcctctcgggtactctatggttttcgtggccgactactctaattctagttccggtctctatggcggccggcggaggcaggaacggttgtaggtcgactgaattagccgccaaaggtccaatgagaatggaggactgataaaatattagccaatagaagctagggattggggtcaggtgggcagattgacagtaccactggccagtgaacaacgcctagggcgggtcgctcgtagggcttatcccgcctgtcccgccattctcgctagttcgatcggtagcgggagcggagagcggaccccagagagccctgagcagccccaccgccgccgccggcctagttaccatcacaccccgggaggagccgcagctgccgcagccggccccagtcaccatcaccgcaaccatgagcagcgaggccgagacccagcagccgcccgc

SEQ ID NO: 1284 - DNA, 2300 bp, Homo sapien
aaaggttcctaccccttgctctaagcaattggtgatgatggcctacagtagtgacagtaggaatgaaaagactctgaattgacatttagagggtttaggactgactcaagaacgcctttaggaggtggaactcacaggcctagacggcattggtaggggtaaggaatactgcattagcctcctaactgctttctctacttccattccttgcccctctgcaacccattctccactccgcagccatttttaaaaagatgcccctccctacttatgactctaaaattgctcttctcactcttcccctcaggatatatttccaattaaatatacctaagtgactgcccacctctgcaacccaatgtcacattcgagtcttactgaactacttgactgcatttcccgagatctcacctcttctcgcctgtaccctgtgcgcggaaagtcagccctccaccttctccctgcttccactcccaaaatacttcgtggttttgcagctctggagtatttaccgtgttggctgtttaaatttctgcctccatcagaaggcagaaactgactcgcgaactattccatccccagccgatagtagacgcttaaaaaagaacgaaagaaggtgggtggaggacttcagtaacatcaggtggcagcctcaattttatcgtttgtgaaacgtggatagtaatccctctatcacgtggctgttgcaggaataaagtgaaaaaacaaaacaggctagcttgttcaataaatgtgagttgaattaaatctgatttgtggtcagtagaaaaagatgtgaatacttggaaaggaagacacatttttttaaatatatgcctggtaaaacggatcagaaggcaggtccccatggagcacaccctcgccctaaacatgctgaacccgggctgccatagcctgcgtggtccctccaaggtgactgctccgacaaaagggtacgctcttcaaacgcatacgtttaaggcaattccagaaaccctcggctgtgccgcgactacacggccattaaagaaaagacgactctatgcccgccgtaatgttctcagatcacagggaccgtatttggagctgggagggagggaagccttttcttcacggggggctaaggcgtcttcgagcccccttccaatcccgggtccggccgggtaatccctgcccagcgttcgggcgtgcctttttttcagccgagacacaaccctgaacgtggggcccgccagcccggcggctgcctcgtggaagtcacgttccttctgcccgtcctctcgggtactctatggttttcgtggccgactactctaattctagttccggtctctatggcggccggcggaggcaggaacggttgtaggtcgactgaattagccgccaaaggtccaatgagaatggaggactgataaaatattagccaatagaagctagggattggggtcaggtgggcagattgacagtaccactggccagtgaacaacgcctagggcgggtcgctcgtagggcttatcccgcctgtcccgccattctcgctagttcgatcggtagcgggagcggagagcggaccccagagagccctgagcagccccaccgccgccgccggcctagttaccatcacaccccgggaggagccgcagctgccgcagccggccccagtcaccatcaccgcaaccatgagcagcgaggccgagacccagcagccgcccgccgccccccccgccgcccccgccctcagcgccgccgacaccaagcccggcactacgggcagcggcgcagggagcggtggcccgggcggcctcacatcggcggcgcctgccggcggggacaagaaggtcatcggtgaggaccggacagggacgggggtggggccctcgggcagcccagcagcggaaccgttagccggagctgggcgagccggcgggcgcgcggccggtgggcaccgactccgcggcgcgcggccgcccatcccccccgtccccccctcactccctctcgcggggacccgcccggcaggcgcgcgcgcactgcctcccgcgccccctgtggaccccgcgcggccgcgcgcccctccccctgcggccgcgcgccgccgaccgcgtgtgcgacggggtcccctccccgccgaccggcctcgtgcgctcgggcccgcacgccgttgttcgcgtcacccccacccagctcccttccgcgtgtgctcggagggcgcggcgcaccgcctacgcaggccggagcggcttccccttccctcacgtgctctccgtccgcggcctgcgcacacacccatcctggggccc

SEQ ID NO: 1285 - DNA, 2300 bp, Homo sapien
cacagtatttgatgacaaggaggaagctatatcaatttctagtacacccaaacccaatcaggtagttcagggtcaaatgtaattatggaatcatttaaattctaaatgtaaataaatacaggactacttcagacaaaatgttgttttaaagtagatgttttataaaattggtattcttgtttggaagaacacagctcaactgttccttactccccttctgcatgttcaaaagaatgtgtagacttaggaacaagagacagcaaagtttctcggtcttgttgcctgttggcaacccttaagggttggggttggggcaggggtggagatgttgataaaaataaagagttgggattttaattatccataattctgctatcccctatgactgcaggtaattgatagttggctatatctgaaaggtatgaaaactatgtgacagtttagatgacagatgagatcaattatttgactcaactcacccagttgtactgattcacaaggtgccaccaatatgctttcatttttttggaagtggtttcaacatgtagttgtttcttgggactttggctgctcaggtcttagtggtgtatcagggagactgcagttctgggcagcttcacttaattggcctcagattcgttgattgtcctgtctcctctgcaatggaaatgcatgagtgatcctgtaatggatatagctgagatttggagtgaacatgggatttggagacccaatacctgggtttagaaagtctccttactaactgtgtgaccttgggcaagtcacctaactttaaagcctgttacattatctgtgtaatgggattaacaatactttcacatgtcctgtctcataatgagattgaatagatagtaagtgaaagaatgttgcaaaaaaatttcatagaaacgtgagatgttactcttcctcccttctcttaacagtctggagaaagtagaagcaacaagtctctaatacaagatttattgaattctggggaggtgataactaacaattccatgcagtcagatcatataaagaatgacatagttaatacacatgaattgcatttccactgatgtattatcagattggaagggattttggttgacatttgtaattgagtttgatacggtaacacaggggcaaagttggtttggtcagctttgaagcatgcaaaaccaaactcgcctgtcatctaaactgacgcagtgtggggccaccttctcctattaagtgcagtcctcaggggatagatggatatcctcatttgttaaaagttatatataatgcttttgcaaaaagcagtttttaaaatgatgtgtctgtcttgagtgttaaattacttgttttagttttgtaaatagtggtacaatgctggggccttgtatgattggagtgtttttgttgaagttggggatagtgtggtccccgctttcctaaatttattgatggtttggtcttatttaaagcaaatcttaagtgtatatccaagctaaaataatattgactctggtacattttaaatgaaaaagcacattattctcccctgttaatctatttttggaatgtgatattactagactgccataaagaagaataaccccaggaagtaccttcgcagtgtaggagatggagagactgtggagtttgatgttgttgaaggagaaaaggtgaggatgctttttgtgtaaaggtttgacttcagtatggaaatattttggaggtctcatccattaggatggtggctctaatgtggatggatgtgttcaggtgacctcatgaacacaggtgcatcaagcctaatgttctggctgcagttagagggcaatctcttcagaacagtgaggaactgatatttagtcatttctgtgcacccctggtcacgcagttgcgcccccccccccttttttttccttaactttgttgttttttgctttgtttgaaaatgttctgatttccttttgaaagtgttgaaagtgttctgatttcctttgtcactatcaatatgtaatggcttttgtagggtgcggaggcagcaaatgttacaggtcctggtggtgttccagttcaaggcagtaaatatgcagcagaccgtaaccattatagacgctatccacgtcgtaggggtcctccacgcaattaccagcaaaattaccagaatagtgagagtggggaaaagaacgagggatcggagagtgctcccgaaggccaggcccaacaacgccggccctaccgcaggcgaaggttcccaccttactacatgcggagaccctatgggcgtcgaccacagtattcca

SEQ ID NO: 1286 - DNA, 2300 bp, Homo sapien
cgcagcccatggtctctgaggcatgcttctgactggcctctgggctcctgacccaggtccccctgaaaccagaatgacccctggatcttccctacagagagagcgcctgcagatggcggggaaaaggggccaaggcccagcgtggagagaaggaggactttgcctttggaggagcatatgcggagcagctacccagcaccaggcccctgccctccccagacatcgcttactttaacggaccaccacaactccatgaagcaaacctcccatttagagtgaggaccctgaggcaccacagtcattcaggtcacccctggggagcatcttgtcactgcccgcagcccccttcaatctggacctggtgcctccctcaaaaagggaggagtgtgggagagagaccacaggggccagcaccacacagtttcaagcggaaagcccttcctgctgtttcctggctgggggtctattacctccctctgccgtggtctccttactgttaggaggcctgctgcctgcaacagtggcccacatgcttaaattaatgcactggtcacagggtgcccattgcggccccagtaggatggaggaggctcccctcaatcctactgtcttgtcattgtggtagaagaatctgagctcaggacttacttctctgccactgtcctagaccccatttggtcttgggacccacaggtcgtccaggaagcaggtctgtgtgtgctcggatccacgtggctctgaccctcccagcacagagagcctgagggtcccagtgtgcaccaccacaggtcaagcagtgcccacccttgaccctcagatggcagaccactcccccatctctggccagagctgcaggccataccagaggcctacgccctgggcgggcacacagggctgccattgtctgctcagcgcctggcaccctctcgtttgcatagccacgtgaagaatgcaagagcgggctggggacttgtcccttcagaggggggttggggctgtgggggaggaagccagcaggggtctgcagcaggaccctgccttcccccagtgcagtccaggaagggtgggtgggctgttggggacggagggggcggcggggggctggcaggagtggaagcagggttgtgacattccttctgcacccacgctgcagtggggcccacttgaacgtgaggggattgctaatgaggtggaagagagttaaacattcccctactcctgaagaccaagagagactgggagagagaagagggaggtgggggtgctcggagcgggcagcctgaaccccgggaatgtgcagaggccactgctccgcgccaggctgctctagagttgggggccagggcccagtgttccagtcccagcaggagctactaagccagccagcaaggggattaaggggctgagcaatccgccttccttcaggctgatgccagaaggttggggctgtctccccagctccccaccaggccccttgctggccggcagccagcgctggcccagcctcgatagggccccttttctgtccccctcagatctcaaaaagaccccacagtacatatttcctggtctggcctccctgatttttggcacacacagctcccaggtacccatgacccctcttcccaacaccccaccgctagctcagcctccccacatccagcttcagagcccctgccaaaaagttatccttgacatctaactctagttttacccgctgcaaactggcattcctttcccttctgtcctaaagtcaaagggcagaaaaccccaagggttagatcagccttgcaagagcaaagtccatcctcccagggctggtgtttgggttagggattatccgaattttaggacacccgaatcaggttcctaaaggggtttccctgtggggaaaggcccagagggcagctgggtcattcctctcagcccctcccttccctatccctgcggaacggggcggggcagggacaccacctgggccatgggccggccctccgcccccagggggctgggcatgagctttgctggggaccctgctctggcttaggcggctgctgtgggcgggccctggccttttccagcccctgggcctccccctgcattctggagtccagagccactgcctttgctccagccgctgccgccgcaccacctctccttctctgcctctgaccctccttctcgctgctccccctgcccagctgctcctcccacctggccatgaccaaagcccctgctggcaccctggcccagctctgagtcctgggaccctcggtcctctctcctgggccatggccaac

SEQ ID NO: 1287 - DNA, 2300 bp, Homo sapien
tggggggggaagaaaagtacaagaaaatcataatgaactcctagatatctttcatctagattaagagttaaatgttttttggccaggcacagtggctcacacctgtaatcccagcactttaggaggccgagttgggaggattgcttgaggttaggagttggagaccagcctggccaacatggtgaaaccccgtctttactaaaatacaaaaattagctgggcacaatgtaatcccagctactagggaggctgaggcaagagaatcacttgaacccaggaggtggaggttgcagtgagctgagattgtgccactgcagtccagcctgggcaacagagtgagactctgtctcaaaaaaagaaaaaaagagctaaatgtttttaaatttccagagctaaatattttgtaaagaccatttacaaaaggccttcattttatagtggtacccaggtcacccctttccatccataacctgaggaacaggaaattaggacccctgtgaaggtggctgagggcaaggagagagggttcctcctctgtggcctgcatttgagtgctccttcttcccagtagcaagaatttcgactgggagtgcgactctactcagaggaacagccacaggaagctgtgccccacctagaggcggcgctgcaagaatactttgtggcctatgaggagtgccgtgccctctgcgaagggccctatgactacgatggctacaactaccttgagtacaacgctgacctcttccaggccatcacaggtgcgtgcagttcagagccagaccttcagccaggcctcctgggactctaaggtcaccatctgataatataaatggggactcttcaccctcattcctcaatttattaaatctgagaagctgatgaaaaattgcttccatttgaatttgttcatcttaaccagaatttgagttctaaagagtgacctcatagttattccttctgtttgattcctttcagatcattacatccaggtcctcaactgtaagcagaactgtgtcacggagcttgcttcccacccaagtcgagagaagccctttgaagacttcctcccatcgcattataattatctgcagtttgcctactataacagtaaggcctactttccttcctctttctctgctggctaactaagaagctaaaggcaaggtgggcagggattacagccacttacttcctcaaggtgtttggcttatttcagtagctatgggaggcaccatgccaagtgatccctgggtagtttgttataaacaactggcctaggaagccaataccagcaacccaaaaagctgggggagggagacttaggacctcatctcttgtcccttctataacttgtaatctatttttgcttttgaattaaagttaatagcaaaataagggtatgccacagtttaaactagctcagaggacatttgctagccctctccctggtatagcactgatgcttttgtggggctgccaattaatacccagaaaaccaactctttgcagagtccctactgtgtgctaagcattacaaacatattgatgagtgtacaatatttacagttgagttgagatgactaacaaatatcaacaagaactattttgccaaagagacaatctgctattgtaatcttccttgtcttctgaaaatctatagaaaaaagaaggtaggaagacagggaaattgatctaatgattgagtgtattgaggcaaaatattaaggagtattggaattatttgtgaatcttaaaagatgtgggcatgcagagaattctgattcttttctgtttcattgttaggcagccctgaggacattgaccacctcaccttaaaattaatcacacattctatgtgtattacttaactcctgcccctgaaatcaggccatcatgttaagtagcaggcaccagcttgtcatgctgccattgcctcaagctttgtggagactgaacactaagtggtccctggtgctaggattttatcctttccttttgactctttcctctcagccattcttctttccactttgcagttgggaattatacacaggctgttgaatgtgccaagacctatcttctcttcttccccaatgacgaggtgatgaaccaaaatttggcctattatgcagctatgcttggagaagaacacaccagatccatcggcccccgtgaggtgagagacttccttctgttatgacagctgccagctgaactcagacctgagggcggaagagtggggtagcagaggggagtaggcgctgtgcgtgcagggcaggggccagatgtcagtgttg

SEQ ID NO: 1288 - DNA, 2300 bp, Homo sapien
tctcgacattgcaatcacaagagttcattttttttcctgaatacatcatgctttggttctacttttctctctatctggaggagccttctttcctctccccctggcaatacttagggcaggcttcaatattacctcttctttgaagtctaatttctctgagataaagctagagtctccctcctttgtgctcccgcagccctaagtatatgcccttgcagtagcccttactacagtaactcttaacagcaaagcaagacaaagcaaagacgttagtcgagcatttaattacttgtacaagaactggaatgcagtaggtatgcaatacatgtttgtcaaatagttttagaaagtgctatgatgaagcgacataaccaaagacataacgcaattattttgatttcaagtccagcgctcttccgagtaactaggaaaaatgaggggaactgtgtaggcagaatgctgtggaggggtggaaatctgaggtccccaagagtctctaagtgtctctttagatcgaatcgaaggtcttttaaacaacagatataccagatataatgcacaactctttctccccccacccccaatacagtgggactaataacagcatctacctgacaagatattatgaagattagggcaaatgcgttaataaatgcaaactgcttaaaatagtgcctggaagtatgtgctggctatcatcatcatcatcatcgtcaccatcaccaccaccaaacaagcctggaacgctccaagcccaagtgtacacttggacacatggcactctggcattccgaaaaatactcattttctttgtaaacctggcagactagccagagggtcccccccccgcccccacacacacacagaaagggccaggcagcccctgctggcgacgtggcaacctcacatcctgaaagagagctgctgaatcaaacagcaggaaaagcaccactggaaaaccaaccggaagggagatattgtagaccgctactagcttctcactcggacacttacaatgacatcagaatgggagacccaaactgccgctttaattccttccaggagatttcccagggaacaaaatggccatgagttttgcttggcctgtgccctaaccccaggctggacctttggggttagcatctgcccatgcgaactgggcgaggaaggtctcctgccagggagcagctctccccggctccgaggagagctccccagccaggaggccactttcccctccctgcggacacttccccgatcccccaagctcctcaggtcccctgcaacactcctctccccagaaggaccccggccgcctggttccaggcaggtctgcaccttgaagtaggcgacctgcaggtagttgtaggggctccgcttgcggaactccagctccatctcttcgctgagcgagtgggcggccggcggcccgaggcagcggcgcaggcaggcagcgcgacgcagaaggcccccgaagaagctcaggtcgcgcagggcggcggcgcccgaggcctgggccgggctgggggaccagtcggggtccagctcccacgggaagtcggcggcacactgggtgcggcagcgcaggcgaagggcgcggagggctgcccgggagcgcagcgcccgttccatgctcaggaccaccccgggccagtccccgcgcgcgtaggctgcggtcccctcggcgaagagcagatcaggcgtcaccatgccccatcctgcctcggactcgacctcggcttgggaggcagcggccacgacagccagcagtgtggtcagcagcttcaacgcgcgtaccgccatcgctccctcagacctaacggaaccgccagccacccgccaccaaggccggagtcctacccccggcgaaggcccgcccccgggcgaagccccaccttccaagccgggcggcgcatgcccacgaggcttgcaccgcctcttttcctttcagtcagcccggatccccccaccggccctcagcgaatcccggcgcgtcagccggagccccgcctccgagctcaggccttgctcagtcgaactgacgcccagtagacaagaaagacggaagctccgcccacgcgcctttatgcgcaggctcttcctactcgcacagcccagggagtggggaggataaggcgctgtcatggaggacgccgccgcgccggggcggaccgagggggtccttgaaaggcaaggagcgccgccagctgcaggccagggaggtatgcggggcgggagtcagcagggggaagtcagctcccgcgaggcagccggtctcggggctccgcgggaggccgacg

SEQ ID NO: 1289 - DNA, 2300 bp, Homo sapien
atgcctcagcctcccgagtagctgagactacaggcatgagtcaccacaccttttagtagagacggggtttcaccatgttggccagactggtctcgaactcctgacttcaaatgatccacccaccttggcctcccaaagtgctgggattacaagtgtgagccacggcacctggccaaaaagtacattttagatagttaatatgtttgattcaatttgtttgtctctaaagttttttttttcttcagcttctcaaatacagattgtattggggaaacagaggcagcataataatgcatcctctgtatttcataagattataggatgaaagacaaaaactgtgttctttcttccatctgttcaggccatcgtaataaacacgatagtcattcaatagcacatgaatacgttgtgtgcacaagattctgtccctgccaacctccctcccaataagagtaatctgattaactagatgcatattctcttaataaataaaagttgcactttgctccccagctcttcaaaaagaagaaagccaagttttgaattaaaggagctttctgcgtatctgaatttttcttaattttaaaaaaaaaaggattcgaaggatttctaggatcattgaaaaaaaaagagatgtgagggaatttgagcacattaaataattttgggcaaagcaaagaccctggaacataatcaaggccaaatctgatagtgtatacagggataaggggccatgataatctttaaaacagcaggaccctccatctgtggacactgaagagggtgtacaactggaagtcttgataagagataagaaggaatctggtttttcattgaataatgacaaaactttagatcttggagctctactacttcaaacctttcacttcacagataaaatagttgaggtccagagagaagtaatctgccttaagtcgcactgcaagttagtatcaaaagtgggattaatactcatgtgtccaaacttccagtgttttttccattatttcacatttcctccttatttgacttattttggccatccatatataaacactgggcttgggaatactgtgtttaatgaggactaaacttggagtccttgccctgctagaagatgtttaaactctcaggtaacaaagatcttatgggaagcagcttaaaataagcggaccttgaaacttcccgaagaacttttctttgtgtcaaatgggaagaataactctgtactgcctacctcacaaggctgtcctaaggtgcaaatgaaataatgaacactaaagtgttgtgtaaaccttcccacgaaggaagattatgggcactcaagttgcagttagaggaacctttggtcccagaaggtcattcgaatcaggccaccgactcacaatgacagtcggctttactcgtctgtaaaatggagacaagagcaaatgccacccccaccataggtggtagtgaggtctgagccgaaagacgcagagtacaacgtgaacgaagatggttattcgctgccccggccgcgcctcctcaccttctgcacctgctctgcgagcgccacgaggtctaaggggtccccggcccggtgggtgtggtaggggctcaccagggccaggccgccgggggtcggggtgagctccaccagggctcctgcgacacacacccaggaacacaagccgtgagctcccgccgtcggcctcccgcggagccccgagaccggctgcctcgcgggagctgacttccccctgctgactcccgccccgcatacctccctggcctgcagctggcggcgctccttgcctttcaaggaccccctcggtccgccccggcgcggcggcgtcctccatgacagcgccttatcctccccactccctgggctgtgcgagtaggaagagcctgcgcataaaggcgcgtgggcggagcttccgtctttcttgtctactgggcgtcagttcgactgagcaaggcctgagctcggaggcggggctccggctgacgcgccgggattcgctgagggccggtggggggatccgggctgactgaaaggaaaagaggcggtgcaagcctcgtgggcatgcgccgcccggcttggaaggtggggcttcgcccgggggcgggccttcgccgggggtaggactccggccttggtggcgggtggctggcggttccgttaggtctgagggagcgatggcggtacgcgcgttgaagctgctgaccacactgctggctgtcgtggccgctgcctcccaagccgaggtcgagtccgaggcaggatggggcatggtgacgcctgatctgctctt

SEQ ID NO: 1290 - DNA, 2300 bp, Homo sapien
tggcacatatacaccatggaatactatgcagccataaaaagggatgagttcatgtcctttgtagggacatggatgaagctggaaaccatcattctcagcaaactatcgtaagaacaaaaaaccaaacaccgcatgttctcactcataggtgggaactgaacaatgagaacacttggacacaggaaggggaacatcacacaccagggcctgttgtggggtggggggaggggggagggaaagcattaggagatatacctaatgtaaatgacgagttaatgggtgcagcacaccaacatggcacatgtatacatatgtaacaaacctgcatgttgtgcacaggtaccctagaacttaaagtataataataaaaaataaaaaataaaaagagactccatctcaaaaaaaaaaagcaatgtggcaatgtctagtaaaattgagaatgtacccagtaatttttctagttaaataacctacagaaattctaaggcaggtgccaaaggagacacctaaaagcttttcactacagcaatgtttgtaatagcaaaaaatactataaataatttaaatgtgcatctctgtaagaatgaataaatatactaagtaaaatggatgcataaaatagactattataaaaattaatgagaataaactaaattcttatattggcatgaatagttctaaaaaacaatgtaagcaaaatgcaaaataaaatgcaggaattttattaatgtaaaaatttaaaatactactgtatattgttcaaggatatctattaatatatttgaatgtaaaagtataaaaaaaagtagttgtccatggagaagtaaaaggatgtaagacaggaaatgaacaaagcagacagataaacaaaacaaagagggaaaaagagaccagcaagattttccctgacattaaatactaaaataaaatacttatgtctgtatgtggctcaatattggcagggtaaagtttaaagctttttattctcaagttgattgtaatcgttgagagaacaaaggaacacactggtgagtttaaagcttgggcctctacctggcatgagtagctgctttccgcaccaaatccagaacatctgtactgggggtgtctgacacttgcgtgctctctctcattctgaccccttctttccccttacatatcattttttttcctttcttccttcccttgggtctcttaccacaaaagctccgcaccagactggggttctgacactaacttggcatgtgattctgggctgccacctcaccattctgaacctcagtgttgtcccctctaaacctgggagaacacccatcctgcctggaggcaagtatggctcgctgtcagttctcctttctgctgtttctctattccagcatcatctccagcagactacaggcatacagagcctccgccttaatctcacctctgctctttgtctctgcttcagctcctgctgggctgatttctgtttggccttctcaactctgctgacagattctttaactttggttttttctttacgtgcaggtggatccatggcttgacttctggatatttcttaggaggctctgatctgggtggtacagaaagaggcagatcttcaaaacaaaacaaaacaaaaaataccctgccagttactcctctaatcctttagctccgccccatcctttgccaggtgaggcagagtggtctggtggcaagggcgctggatgtgggggagtaggaaccgagtcccaaggccacaacctcgctgggtgtccctgggcaagtctcctccccactttgagccttagttttctgtctgcaaaatgggttaagtgttttcctggcctccctccaggagctgctgtgtgcgggtgaaatgcaaagacccctgtgaaagcgttgcccactgtgcggcgtgcggcacccagcgcggaaccgtcctaatgggacgctgagacccagagggcgcccagggttttcccactgcggccggcctaactccgccgcagcagccgctcctggggccagggggccgggccccatagccagccgggcccgccccccaccgcccggccccccgaccccgccccggcccgcccggccccaggggacggcccccgcctcctgccctcttccctctcctggaggaaaatggcggtcgctggagccgccgaccaagaggcttgggagtctgtacctttcccgaccgggccactggaagttggagcctccgccgagtcgcagacaacgcctccgggagggtaatcctcgccttcccccgaccactggacccagcgctgcctgcccaccgc

SEQ ID NO: 1291 - DNA, 2300 bp, Homo sapien
aagaatgtagaatcccaaactggtatctccagttccgttcttttctgaaatcttctaattgctcactggacaattcttcttgcctattgccacttgaagcgtaatctagctctttctctctctcggtccctctcttgcgcgcgcgcacacacacacacacacacacacacacacacacacacgctcctaacttatcctcttcctcaccgtttcccaaaccaactcatcacaccttctccactttcaacagtggctcagtggcaccactacttttccagtcttccatgtggcttttccactcctccattccctatagctggtttgtttttagctggcttctaaaggtcctgccgtgtcttcagctgtaatctagttcatagcttatatgaacgttataaaccataccatgtgacacaaatgtaaaataccagtactacatcaagatttctgaaatagactctgacttggttacttttattaataataatcgaatcagcatttgtatagggtttttaaaaagacatttaatgtactttcctctgattgctaaagtataaacgtttactgtagaaattttggaaaagctgggcgcaattgctcacatctgtaatcccagcactctgggagactgaggcaggaggatcacttgagcccaggatttccagatcaccctgggaaacacagtgagactccatctctacaaaaaaattttaaaaaattagccaggcatgatggtgtgtgcctgtagtcccagatactttggaggctgaggtgggaggattgcttgagcccaggttacagtgagttatgatcacaccactgcactccagcctgggtgacagagcaagaccccatctattttttaaaaattaaataaataaaaaataaacattgtgcagtagatctctagaactttttcaccttacaaacctaaaattctataccctttaaacaattcctcttttccctctctcctagccactggcagtcaccattctactttctgtttcttagactttgattgctttagatacttcatatgaatggaaacatgcagtatttgtctttttggggcattgtgctcacttttaaggcttttgatacctagtactaaactgacctccagaaaggctgttaacgatttacagtttgactggaagcgtgtgtccatctgggctgagttcattgcttgcttagcatctatcagttgtttcaattcttgccagtttgatagaggaacaaatagtggacccaaacagggttttactttggataaggccattgtcctatgaatcctggctgaaatatttgctccagcacttagaagctgtgtgacccgggacaactcacttaacttttcaatgcttctgttcccttatgtgtaaatggggataataatatacacgtatacattatacacacttattatgaggaattagttaataaatgtgaagctgtaagaacagtgcctggaatatagtaagcccaaatgtaaggtagctattatcatttttgtcaatccttgctaatgtaatacctggaaaattacagccagctattttaatttacatctcctcggtaatcagttgaacgtgaatgttctctgtatttatactggctattggtacttctgtcaagatttcctttttcaaagcactgtggcaaacgggatctcacttgatcctcccaataaactcatgaatgaagaaggtggcaatcatcaatccccacttttcgaattaagaaattgagcctcggaattcgaattctgagcaattccaattccaggattcggatctcaccctctaaaacctagtagctgttgcagaaaatataacgggaaaaagctttggttagccgtaaccaccacccaccccggtgtggctccgcccctgccccgccccggcaccggcttgccccgccccgccctctacgcgggtttccagccatcctctctgcgcacgcgcggccgctcctgcgggcggaagcctcctggcgctcggccctgcgcccctccccccggcgcgcggccccgcccaggacgaggggcggtgggcaggcagcgctgggtccagtggtcgggggaaggcgaggattaccctcccggaggcgttgtctgcgactcggcggaggctccaacttccagtggcccggtcgggaaaggtacagactcccaagcctcttggtcggcggctccagcgaccgccattttcctccaggagagggaagagggcaggaggcgggggccgtcccctggggccgggcgggccggggcggggtcggggggccgggcggtgggg

SEQ ID NO: 1292 - DNA, 2300 bp, Homo sapien
aaagattgaatgttctcattgacaacaaacactgtcagttgcttttcctgaagtgacaggtgcactttattcattttggagaaaatgcctgccaaatacccaagtctgaataattatactttgtctttcagctgtactttcaggtaagaatggtgctccatgagtcaagcgattacttcagctcacaactcaatcacttaaggttttttcctcgataaagtcatcatactttgatatgcagcgtaactgtttatgcatccttcccattttgtcacacaaactattaaaaagatgtgtatctaagagttgaaatttaataaaatttgtaacttctactacagtttggtgccacttcctgatttgtgctagctgttttacccactattgcttttgcagtgtccttgaaaatgtcaataccgtgaaaaaggcaaataacgtctttattatgatgaatgtagttttaacctggatgatagggcctcagggacttcaagtgtttgtggaccacacattaagaactggtgctctagagaaattcttgcacatgtgagcaggaaatacctatcaagaatgttcagggcacgaggccgggcgcggtggctcacgcctgtaatcccagcactttgggaggccgaggcgggcggatcacaaggtcaggagatcaagaccatcctggctaacacggtgaaaccccgtctctactaaaaatacaaaaaaaaaaatagctgggcgtggtggcgggcgtctgtagtcccagctactccggaggctgaggcaggagaatggcatgagcccaggaggcggagcttgcagtgagccgagatcgtaccactgcactccagcctgggcgacggagcgagactctgtctcaaaaaaaaaaaaagaatgttcaggacagtattatttataaaagctaaagcccagaaacaacccacatttctatcattaagggacgagagaaactgttggtagatttatataatggtctactatatagcagtgaatgaatatcctagtgctctgtgaaacaacctggattaatttcagtgtcttaatttgtacacccccagaacagagtgtgaggtgtgagacaagtacttcagttcaagagtgtatttaggaggtaatcccaggaagcagaaatgggaatgagcaaaaaaggaagaaaagtcaataaaaggtgcagtacggagctacttaccactatgaaccaccgtgctcactcccattgggaacactcagaggaatcatgtcgaatacagctcagagctgaaggtgcaagcctggagcattttgtcttgactcctctcactgttgtttatgtctccgaggtgttagctttggtgaacttctgggctgcacagccttccaaggctttgtagaaagccccaagacaggcaagcagaaaaatgccatggcctatgaggtgacatgctagcagcttgcctgcaagtctcagctacaccaaaattgggtgggctgaggggacatggtgtgggccaccacagatgtctgctagactcagaagctaatgttgaataaaaaaagggaataattgggaattatgtacaatgggctccatctttataaagttcaaaggacataaaaatgtgtaatgtattgttaatgatataattatggagattatgaacatacagctaaggatattatgaaagcaagacaggcgggaagcgtttatcacatgttggaaaacagcaagcttgcttatcagaaggcacatgtcagggtgtagctggagataaagatagtgagttaaagaaggtggttaattggtggatgtctttgaaaccaatcttccaatttactctgatttgaaaagtaaagggggaaggttttcagaaagaatgtgataggatcaaaacgcatcagagggaattactattggcagcattggaggaaaagggagtggaggggcaaacgtgcctcctacccggtcagtcatactcagtggttccctcatttttgggagcctcctctttgctctgttcttttatcaggggcatacagacagggtgtggcttgctggtttacagggacagcgagaagggagttctgtgggggcagagagagccctggcctctcatatttcataaaatatgaacttttcccggcccacatccctaggccttcctgatgcgcttgcctgctccctggtctctctgcatggggaaggagtgttcccagcttgcaaactccagctttgcctgtgagaggaacaagcgtccctgatccagaaggtggtgagtcctcctctctctcttcatgctttttagtccttt

SEQ ID NO: 1293 - DNA, 2300 bp, Homo sapien
acgtgattatggaggcggttaaatcccaagatctgcaggataagtcagcaagatggagtcccatgagagctgatggtttagttccagtctgatggcagcaggcttgacgccaaggaagagatgatgtttaattcaagtccgaaggcaaggaaaaagctgatggtcctgtccaaaggctattaggcaggaagaattctcttagggcagagttagctcttttgttctattcaggccttcaactgattcagcaaggcccgcccacatttgggaggacagtctgcattactcagtctactgatttgaatgttaatgtcattgagaaacaccctcacaggaacactcagaataatgtttgaccaaatagctgggcatcttgtgacccagttaagtggatacataagattaactatcacagtgactcagtggaattttttgtttgcttttgtacagttttaaaataaaagtttggtatttgtgttttggtatgctgttattttcattgtgaatgaggagttgtggggaaggtaagagattggtttccaaagagctttgagtcccccaaggcaaggtttagccaccgttcatactaaagccatagttttattcctgagtctgctctctagtattttattttatcaatttataaacaaatagtgttcataaggcacacatatttcactcaaccatattcagttccaaacatgcattcctgaatatcccaatcttaaaactaactcacattgtcagcttgtggaggcagaatacatgcatacatatacacatacatacatgaatatacatataatatacacacacatatgcatacatacacatatacacatgtatacatgtatgtgtatatacatatctgtactacataggtgtatatatatgtatatgtatttagcatgtatgcacgtgtatatgtatacacatatatacatatgtatgtataatacatattcacacatgtatgcatgtatatacacatgtatacattagtatatgtatatacacatgtatgtgtattatacatgtatatatgtacatacatatcagtctactgatttgaatattaatgtcatcaagaaataacctcaatatatgtatgtattataaccttacaactatataaaacatacatacatatatatgtatatatgtatacacatacacatgcatgagaatatatgtatgtatatataatatcctcacagtaattctgccagggattttatgggggagggagttggtactccaaatggctaggtggtagagccagagttttatacttggtttatctagctctgaaggcaatgctccttgttctttgcactgaaacattgtgcagatacgagaagcctgtagtttacgtatttcattagccttttattattttaaaaaataaaacctgaaaaaaaagacctagtcctggatactttggtgatcttgttgtgtctggattgacgaacacgtgtcaggcttaattagggatgcacgcggaacccgggaaaatccctgctcaggggggctggaagacctggaggttgatccttgaacagggtacttttagcttctccgataaggagattgggttattttatctttaaactcccttccagctctaccctcctttgattttaagttataaaccttgagtgaggtgccagactctaggcttcgttggacgtctacaggacggtcaaggattaccaactcaaagtaaagaaggaaatttgagtacttgcccccttggaggttgtgtaggttggctatacagattctacaacttcccagacgagtggccctgagacttggggctgaacgcgcgagcacggaaagaaatcccaccgtaggacggaacccagtctcttcagctccatcctaaacttcgcaagttttctctgagtctacgcgcttccttaggactacaactcccagcatgccacgccagcggtcaaagcttattggtggtcctgccaggtcgcttgcgttgtggcagtcatggtagccaatggaaataaagaattatcccaagaaaccaatcctggagtagtagggcggatccttcctgggttccggctccggctccagctccttccctcgcctacagaggcggcgctgtccctgatcgagcggcgggagcgaggtgggtccgggttgggcccgaggtcgcggggggaggcggacacgacttcgcgggaaactctgtacacggccacttccctctcaccgaggatctggatgctgctgctttgctccctggaccgagtgggaagccaaggggccttgtggtccct

SEQ ID NO: 1294 - DNA, 2300 bp, Homo sapien
caccttgctcttggtctttcatagctcctctctcctcttcctccctgcagcccttgacttggccccaaagacctgtaacttcggacctccataccgcactatggcttggccccttgcctttaacctaggcgcttcaccttcatcatctgtgatcactagccccatcttcttggctcttaacttcttagacctggcccctcctccacttctcagccccttccaccgttgcttctctctgtgcagctgagccaccaggaagacaaagcccaatagaccccttttccccccagatctctgcagtgtgatatgaaagtgcctctgtacttcagctgcactgtcttctcagtaggtagttgcctctttatctctgcaagtcccagtcttacccatcctgcaaaccttaggtcaaatacctactcctccttgaaacttctcagccctgatttcatcagggagatacatctgtatcatgtgaacttcagtggtactgtttttatttccttccttcccgtcttctctccttttttccttcagtaatagtataatggttaaaagcactgactttgaagtgatgggcataggccccagttctgccacttacttgctgtgtgcccttgggcaagatacttaatttctctgagcctcagctttctcatctctaaaataaggatgatgtgaagtgaaattagatgattcatatatggtccttagtccacagcttagcacttgattcgagctttaaaaaaatgttaataatgtgccaggtgctgtgttagacactgaggagtgggtacaaaggtgactaaggcacagttcctgcccctgtcccctgaacttaaccttctgcattgtatgacaatttctggagttcacggtctgtttcagtacactgtatcacaaactgagtggtaatcataatcctaaatccttttgctcttacattgacctagcatccagccccgggtagagctggaacttggtaaattataggttctcagaatagcagtttcggaagtgagtggaggctgaatagctcattgcgtagagatactgtagctgtaggtcagatgggagcagggcagggggtgggggatgggatggtggcgtgaattaagatcacatcctgtcacttatacattcaaaagacatttgagcacccagctttatgctgcagaaggagattactaatatgacccagtccctttcctcaagttgcttataaactactaatagaaacagacatgttctactagtagttgcaaaccactataagccaagcacaagattctgtgactgcataaaggagaaagtaggcaggaatcaggagattgctgaggaaaagtgggtgagacagttcatggttacttgtgtcccatgaagacagagctggtgttttattcaactcattcaacaaatacttatgaaggatctactgtatatggctgccactactctaggagttttggttacattggtaaattaaaaaaaaaacaaaaaaacaacaaagacaccagctctcatggaacttatgttttagggaagcagacaataaataatagacataaagagaatgtcagaaggtaagatgtgctatggggcaggaggactgggagtgtgggagtgattttaattttttaaaggatggtcaggaaacagtgtctaagtatcaaggaatagtttctcatgtttacttgcatttttggaagtaaagcaaaccaattatttttcatattcttatctaaattcttcaaggaacactaacagggattggcaaaccacagctcacctcctgttgctttaaataaagttttattagagcacagccacacattcctttatgtcttgtctatggctgctttcatgattcatgatacagtggcagaattgaatagttacagcagatatcccatggccataaatatttactaaatattatctggccctttacagaaaaagcttgtcaacctctggttcttaaagagttgaggttctgtctgtatttcacattttagaaggttatatacagttttatgctatttttaagttaaaagttttttcttaatgagatcatttaaaagatctttttcttgtattcttcacagggcctggacgtagtgtcttcaacagttgtaacagcagctgccatttgctgaatgacagcatgtgtcacacactctgctgagtattacaggcatttttttctaatacaaagtcttgtagtgtgggtaggtatcacaattttagtgaagagggagtttaggctcagagtggttgaataatttgcagagagcgataaagat

SEQ ID NO: 1295 - DNA, 2300 bp, Homo sapien
ccaatagaccccttttccccccagatctctgcagtgtgatatgaaagtgcctctgtacttcagctgcactgtcttctcagtaggtagttgcctctttatctctgcaagtcccagtcttacccatcctgcaaaccttaggtcaaatacctactcctccttgaaacttctcagccctgatttcatcagggagatacatctgtatcatgtgaacttcagtggtactgtttttatttccttccttcccgtcttctctccttttttccttcagtaatagtataatggttaaaagcactgactttgaagtgatgggcataggccccagttctgccacttacttgctgtgtgcccttgggcaagatacttaatttctctgagcctcagctttctcatctctaaaataaggatgatgtgaagtgaaattagatgattcatatatggtccttagtccacagcttagcacttgattcgagctttaaaaaaatgttaataatgtgccaggtgctgtgttagacactgaggagtgggtacaaaggtgactaaggcacagttcctgcccctgtcccctgaacttaaccttctgcattgtatgacaatttctggagttcacggtctgtttcagtacactgtatcacaaactgagtggtaatcataatcctaaatccttttgctcttacattgacctagcatccagccccgggtagagctggaacttggtaaattataggttctcagaatagcagtttcggaagtgagtggaggctgaatagctcattgcgtagagatactgtagctgtaggtcagatgggagcagggcagggggtgggggatgggatggtggcgtgaattaagatcacatcctgtcacttatacattcaaaagacatttgagcacccagctttatgctgcagaaggagattactaatatgacccagtccctttcctcaagttgcttataaactactaatagaaacagacatgttctactagtagttgcaaaccactataagccaagcacaagattctgtgactgcataaaggagaaagtaggcaggaatcaggagattgctgaggaaaagtgggtgagacagttcatggttacttgtgtcccatgaagacagagctggtgttttattcaactcattcaacaaatacttatgaaggatctactgtatatggctgccactactctaggagttttggttacattggtaaattaaaaaaaaaacaaaaaaacaacaaagacaccagctctcatggaacttatgttttagggaagcagacaataaataatagacataaagagaatgtcagaaggtaagatgtgctatggggcaggaggactgggagtgtgggagtgattttaattttttaaaggatggtcaggaaacagtgtctaagtatcaaggaatagtttctcatgtttacttgcatttttggaagtaaagcaaaccaattatttttcatattcttatctaaattcttcaaggaacactaacagggattggcaaaccacagctcacctcctgttgctttaaataaagttttattagagcacagccacacattcctttatgtcttgtctatggctgctttcatgattcatgatacagtggcagaattgaatagttacagcagatatcccatggccataaatatttactaaatattatctggccctttacagaaaaagcttgtcaacctctggttcttaaagagttgaggttctgtctgtatttcacattttagaaggttatatacagttttatgctatttttaagttaaaagttttttcttaatgagatcatttaaaagatctttttcttgtattcttcacagggcctggacgtagtgtcttcaacagttgtaacagcagctgccatttgctgaatgacagcatgtgtcacacactctgctgagtattacaggcatttttttctaatacaaagtcttgtagtgtgggtaggtatcacaattttagtgaagagggagtttaggctcagagtggttgaataatttgcagagagcgataaagatagtatgtgtcacagttgtaatccaaccctaaatgtagtcagtacccctttctttattctgtgtttcttttttccagaaatacttgcagacttgaaggaattatcagtctttcattttctatcatcagtgtcctatgatagtttgtgcttccctccctcatccctttgttcatgtcactctgttcaccaacccactctgctgaaatgtcgttatttcttcaaggcccggaggaaatgctaccactctcatcagaggtacttttcccc

SEQ ID NO: 1296 - DNA, 2300 bp, Homo sapien
tgaaaccccgtctctactaaaaatataaaaaattagccgggcgtggtggtgggcgcctgtagtcctagctactcgggaggctgaggcaggagaatggcatgaacccaggaggcagagcttgcagtgagccgagatcgcgccactgcactccagcctgggcgacagagcaagactccatcacaaaaaaaaaaaaaaaaaaaaaaagacatagtccttcctgcaaggaacgcagaggaagtgaaagtactctgaacaaggtgctgggggaacacaggtgggaatggttaacttcacaggagaggggaatctgaaaggatgattgaatttggtctgaatgaataggtgtttatagcagagaaaagagaggaaagggaaagtttatttcagacagaagggaaggcttagtgttttaggaaataatgaaatgtttgatagtgtgccctgtgtgaggaggagaggaagcccttgtgttggatgccagggtaagaaattttggattgtggacaataaggaattttaaagctggggaatgacatgataatattcactctttatttaggaaaagcacttgggctagtgtggaggatgaactaaagggggatgagtgatttggaaacatgctgtctgtgtaaaccaggtgccaattaggaccctcctgatccacagagagttctgtatgattgcctcagagcattgccaattccacaagatgggaaagttcaaactttccacacaatttctgcagattccttgggtttatgacctcataatctcttgcctgagattcctgtgatctgtacaaaccttttctattttgtccccattagtcctgtcacagaactcagctcttttgataagtttagaatccttcctagagattgagaatcttagtgaggagttacattaaggcatgtgagtagcttccaattctgtcatctctgcttgcctccccaccctctctctggattgccacaataagactagggtgcatcattgttttttgtttgtttttctgagataaggtctccctcttgcccaggctggagtgcagtagtgtgatcacagctcactgcagcctccacctcctgagctcaagcaatcctcctacctcagccaccccagtagctgggaccacagatgtgtgccaccgcacctggctaattatttatttttgttagagatggtctcactgtcaggcctctgagcccaggctaagccatcataacccctgtgacctgcacgtatacatccagatggcctggagcaactgaagaaccacaaaagaagtgaaacagccagttcctgccttaactgatgacattccaccattgtgatttgttcctgccccaccctaactaatgaatcaaccttgtgacagtcctcccctggacaaagagtctcaggagctccccaccgagcaccatgtgacccccacccctgcccgcaagagataaccacctttaactaattttccactacctacccaaatcctataaaactgccccacccctatctccctttgctgactctgtttttggactcagcccacttgcacccaagtgaaaataaacagccttgttgctcacacaaagcctggttaggtggtctcttcacatggatgtgcgtaacgtttgatgccaaagaacccgggacagggggactcctttgagagattggccccctgtcctcaccctcacttcatgaagagatccacctatgacctcgggtcctcagaccagcccaaggaacatctcaccaatttcaactcaggtaagcggtctctttgctctcttctccagcctctcttgctacccttcaatctccctatctttccaatttcagttctctttcctttctagtagagacaaaggaacacattttatccgtgaactcaaaaactctgacatcggtcatggatttgggaagacagtcttcccttggtgtctgatcatagcagggacgcctgccttgatcattcacccacattccattggtgtctgatctccatggggacgcctgccttgatcattcacccacattccactggtgtctgatctccacggggatgcctgccttgatcattcacccacactcccttggtggcaggtcaattgcagggatgcctgctttgcctgttcactcacattacagcccaggactcagtcaaggatgcctactggaagcctggtaggtgcccacctccatttctccatgtctctaccttcctctttaaacttaccttctccattatgggcaactttccaccatccattcctccctcttcccccttagcctgtgtt

SEQ ID NO: 1297 - DNA, 2300 bp, Homo sapien
gtctgcacagccttcaggccaccagtgtgcagtggggtgattttagggatgatgacaccaagcactgtttcactgattccctgcagcactgtgaagcagctcctgctaatgtctgcactttagaaatggggccatggaaactcacagatgaaataacttgctcatggtcacactggaaataaggggtggagctaggacctgaatttagttgtgtccagaatcagagttcaggtttctattcactgccctgcatggcgtccttggaacggacaagcagatccttagggcttgcctctgccctaccaactgtcctcgccccttggagcctggcctccatcagatgcctgctgacttgggacaggttgtgacagggcaggggaaaagatggctagaggctgagcacccacagcaatgggaaggaaggcaccaggaggcaggcccagcatatttgaataggtgggcatttctgggactgcaggctttggtttggcaagtgtgcctgcccacaccttcttcttctgctagacctcagtgggttggaagggatagggaggaccaacagcagtgatggaggctgcagaggctgcataccgctgtgtgtgcatgaacctgtggcatgcacacacacggaggggtgttgggatgggttgggttcacatggaattgagtttgagctgtaagtggtaggggatgaggggcatgtgagtttgtgactggctaaagcaggaatatttagattctatgagcacgggtatgtgtgtgtgatggtatacgtgcataagaagccgtttctgggtaactagggcctgcactctgctatacgtgtggctgggtgggtctggccagtcccatggcactgagagtgtggtgagtgtgctcaggcagaacgggtgctgcctgcctaccacatccgtgggagctggccagggtgggggcagggctggtgggcagggctgccctaggacgggcgtttccagttcctggaactgcttccttgtgtggaacctttccccatacctcctagctgggcccttgggagaggggaggaggccgtgggtccttcaagggggtgctcgcaggccagacacaagggagctaggcctggggaacagaaagccacagcgtgagtctttcaagcacttctgaagggtgacatgtgtgagtttgtcacaccaggccctcagtgcggtcagggagtctgtacttcctggatggcggaacctgtctgtcaagccctgcttcctccccagcaaggggttggggggagggcctgatggcaggagatgggcccctggggctttgagacatggtgaggagaaaaggggcaagtgggaagacccttttccttctgtatttctctttttttttttttttttttgagacatagagtctcactctgtcactcaggctgaagtgcagtggcacagtcttggctcactgcaaactccgtgtcctgggtttaagcaattctgccttagcctcccgtgtagctgggattacatgcttgcgccaccacgtccagctaattttttttttatttttagtagagatagggtttcaccatgttggtctggctggtctcgaactcctgatctccagtgatctgcttgccttgatctcccaaagtgctgggattacaggcgtgagccaccacacctggtcttgtacctctctgttctatgcctgaacttccaccactgatcacttgccatcatcccagcaagtcacactgagcctgtgaaaccacagggcactggaaaccacacgttaggggaagtgggagagttggcggggctctcagatgaactccaaccccttgtttctcgcctggggaaagtgaggcccacaaaaatagagggacttggctcaagaacatgcagtgaatctgtggcagagccaggccctggccctctcttagggaggggtgcaaggggaaaggaaaaggaagactgggtcctggcccctggcttgctcacccaggctgcatctccccctgcaggtgatcgaggagttctacaaccagacatgggtccaccgctatggggagagcatcctgcccaccacgctcaccacgctctggtccctctcagtggccatcttttctgttgggggcatgattggctccttctctgtgggccttttcgttaaccgctttggccggtaagtaggagaggtcctggcactgcccttggagggcccatgccctcctgcccagggagtcccagatggggtgggaggtaggggagacttatctgcctgttccagggtattacctctgacccagcccctcggagcccaag

SEQ ID NO: 1298 - DNA, 2300 bp, Homo sapien
ctccacttttctgtctccacgtagtattcccttatccactcaacaaataaatacccatgtctggcatagtatgctgaatagatagttccttccctagaggaagtgacaaaagtgatctctttcagatggaaaaactgaggcccagaagttaagtggcctgcaagagccctgagatatttggacttccttgccactagctagaagagcttctcactgaacttttgtttagttatatcccacccttacggctcacctaagatcctgggagccttccccgggaacttccccggggtctcacctcaagcgagggcccaggaagggtgaaccaagtcgtctggatttatggattcaacaggtgtggggcggaaggccttttcctgccgagggtgcggcccagcgccaccccgctcagtctcagcgggacacctccacagccagtaggaagggcagttcaaaattcagtgctacccccgcgtcccagctaagaaaacaagggccatccaggtgccctcccagctgacgagatggaaaaatcaaagtataatagataaagagggaccgtttcaaaagaaaaaggggacttgaaaatattgtagactagggggaggaaaggaggtggaaagaaacaatgccctacacacaggaggggctccacaaacaatttgttgaaaagaaatcgctctgcggacgctacaaagatgccctgcaggacaagcccacttacacagaaaaaaagaaatcctatctagggagttgttggtccccagagtccccatccctcattccccaaccccgtggcgtgcgcgcttcccgctagacttcagcctggggctctttcctggcccccagatcccccgcccctccggttgcgctccccgcctggccccgagggtaaacctgcctccgcggaacacatctccgcgagactgggccaaagctttggggcctgcactcctcgcaaaggagagcctccgagaccggaggttcatctcaacccccgcgttcgagcccgggcctggagaaaagtgccctcccctcggcctcggcctcgtcaccgcgggggactggcgggaggagtaggggaggccggtgggacacctcgcaccaggccgcccacctacaggggcgtccgggctaggggagcagacggagagcgggggcggctcctgactcctccgcgcgccggggccggggccgggccgggggctcggcccgctcagccaatgggcgccgcgctcgggccccctcccccgcaccgggaggggccgaggctgggctgctgctgccgaggtcgtgtgcgacgtgccgctcccgggccctgtgtccccagccccagcagggccgcgtggacggcgcggcgcccccggaaggaggccatgtgctcagtgccggcgccaactacgcacgcggcgccctccggcccgctagatccgaagcccatccccactgcggccagcggcccggcggggcgctgcgctcgggacccgcaccgagccaggctcggagaggcgcgcggcccgccccgggcgcacagcgcagcggggcggcgggggaggccctggccggcgtaaggcgggcaggagtctgcgcctttgttcctggcgggagggcccgcgggcgcgcgactcaccttgctgctgggctccatggcagcgctgcgctggtggctctggctgcgccgggtacgcgggtggcgacgggcgtgcgagcggcgctctcccgctcaggctcgtgctccggtccggggactcccactgcgactctgactccgacccccgtcgtttggtctcctgctccctggcgtgctcactcggggacccgcgactagcgaccggcacgctcgctgttgctacctcttgcctcttgccagagagcgcgcggaccgtagcgtttataggaccccggccattggctggcgacgccggtgtgtcaggggtgtgtgggcaggacctcggggcggggcctggggcccagcctgtcctgggcggcgctctgcggggagggggtgaggggagtggccggggccggggccccccctaaccactgcctcgctcaggctgccgatcggctcgttctctctgcgttgggaccgcggagggcattcgctgtgtgactcagggcaagtgtgcgcacctctctgagcctccgcggccttctctagcaaaatggtggagccggtacccggctgtaaggcaagctgggatgcgcggagtagcgggtggaaagctggactggagttctcactcggccgctgggtgacttcggtgcactagggatagtaacagtaccacctcgtaggg

SEQ ID NO: 1299 - DNA, 2300 bp, Homo sapien
ttcccggaggaggaaggacccatggtgctttttggcatggtgaggtcggggagggcttcccaggcagaggagacaagctgagcaaatgtgtggatgtgagttgctggtgtgaggggcgaggctgagcgtgtaaactggtgccatgaagaaggaccgtgatggccaggcttggcccttactccctccatgacaatttcagacagatgagcaggagagtggcagggtgcaggactggaggacaaaagaccagaggagatggaggccctgcagacagcaggggagggaaggaggatgaggtggtgtagacagcggagtcagcaggacttggtctgtccaggggtgaggagagaggtggcccaagctttccaggctgagcatagagagaccacaggaattgaagccttgggcaggggggtgcccagaatgcacctgccttctgtttcagggctccatactcaaccaaggtgcccctcagccagaactggacacattgccagagaactccaggggtcatctggtcggctcagcctcccggtttccgacagacagtaagcccaccatgactccctccatcgggaaagggaccctcaagactttgatcagacctttggactgggggtccttcccttcactgtgtctcaagtaaggcactggtctagaggaaataaggtgaagtcagatgatagcaataccactaccagtgcagtggcacatgcctgcactcccagctactacggaggctaaggtgggaggatcacttgagcccaggagtttgagaccagcatttatttatttactaacagactaaataaataaaccaacaataccaccaaccagtaaatgagaacttccatgctaaacacttcatgagcttatctggaaattgcacctctcctgatagcaatgagattggtgtgggaattccatttactcataagaagacagcctcggccgggctcagtggctcacgcctgtaatcccagtactttgggaggcgaggtgggtggatcacgaggtcaagagttcaagaccagcctggccaaaatggtgaaaccccgtctctactaaaaataaaaataattagccaggggtgatagcgggcgcctgtaatcccagctactcgggaggctgaggcagagaactgcttgaatccgggaggcggaggttacagtgagccgagatcgtgccgctgcactccagcctgggcgacagagcgagactctgtctgagaaaaaaaaaaattaaagaaaaaaacgaaaacagcctcactggccaggaactcgcccaggatcgcggccgggccagtatacagttgagctggttcaaacccgaggtctatcatgtccttaatgtcctatcatgtcagtcagttagcctgcctttcatattttccacacttacaggtcaccatagactcacctgaactgtgagaagtagaggaaggcgtcccagaggaggtgattttaaagcccaggtttgagatgggtatgcatttccaggcaagagagcccggccggtgcaaaagcaaggcttggctcacaaacgggaatgtggggggtggagacagggaagggagaagtcaatccctgggcaagacctcctggagtctctctaacaaataaatactactttccatgcagtagacgctgttctaaacactttacaaatattaactcacttggtctttctacaaccctacgaggtggtactgttactatccctagtgcaccgaagtcacccagcggccgagtgagaactccagtccagctttccacccgctactccgcgcatcccagcttgccttacagccgggtaccggctccaccattttgctagagaaggccgcggaggctcagagaggtgcgcacacttgccctgagtcacacagcgaatgccctccgcggtcccaacgcagagagaacgagccgatcggcagcctgagcgaggcagtggttagggggggccccggccccggccactcccctcaccccctccccgcagagcgccgcccaggacaggctgggccccaggccccgccccgaggtcctgcccacacacccctgacacaccggcgtcgccagccaatggccggggtcctataaacgctacggtccgcgcgctctctggcaagaggcaagaggtagcaacagcgagcgtgccggtcgctagtcgcgggtccccgagtgagcacgccagggagcaggagaccaaacgacgggggtcggagtcagagtcgcagtgggagtccccggaccggagcacgagcctgagcgggagagcgccgctcgcacgcccgtcgc

SEQ ID NO: 1300 - DNA, 2300 bp, Homo sapien
gtatgttggattacatgctggcaatcccttcttccaaagttaaatgaggtccaagttctacccaactctaaattgtactatatctgaaccatctaagaatccctcattttacagaggagaaaactgaggcccagagaaaagtaattgtctacaagttctagcactgacagtggcaagggcacaagaatgctgtcctctctgcacaccatgtcatgaccatgccagctaggaaatgcactgggccatcttcacctcggggaccacacttcacacagcactgttcctctccttaattgctgattttagaaaaaatgtcatttttatatgcatctaattggtggtaactggcatgactctgaagtagccaatctatggaagaggtaataattgtcctctgacaactggctccccgttattgggctcatagctatctttctaagccagctgaatatgcttaagtacaaagttttgactttccagaggaaaacttctatttcttaccttctgcatctgcagatcagatttggccatttccgcaaaataatcagtgggtcgcttcgtagggactttgagctgatggaggcggggtaagactgcaagcactgcggcctgggcttggcgatagctgagaatcgtaggacaaaatgtgtaatgaggtgaaggaggaggccttacgttccttttcaccgccaatcatgagttatccaagctcagaaggactctcaaaatctgacctccattagcaagaacaaacaaacaaaaactgtctcactgatttagtatctaaaagaaatgtagccgtatactagtttttaaaaaggggaggggtgttgctaaaaatagtttaagagaatgactactctaaaggtacccattaacacaaacgaatgtcgattatggattcttatgtaattactaaagcaattccacacaagaacatcccataagcaatgtttgtttgtttgttttcctaataactgaagcatgcacaaaaagttttaacatgaatatttcaaattagcccataaagtggattttggatcgtgaccgtggaccaaagagctcttctctcaaacaggaagaatctcctagctattcttagtcaaaagaagccgctctctctactcctaggcttattctgagtgcagacttactaatttcccctctttcccactctcctgcacaaggatcctcaacttctccaacatttgaaaacaaacatacaaactcatctctcgctggaagtcgtcttctggatcaacagctttctggtccttgttctgaggtgctggcgcctcagatccaccgatctccggtaccggacccagtgtcacatcgagcctttcaacccattccagatcccgcttgaattctgccaaacattgcttcaggccattctaggaaatccagacactgagctcacaagaagggaactctgagtttgtctttcccaagcacaggctgttaggcgaagggacaaagtgctaatccccaatacccagacaggtaattgaccctcttggcgaggcgcagggtgcatctttcctgggacaagaatcggtctcccaagcccaacagcgcctgaagcgcatcccatgtccgagtacccccgaccctgtgcccacgctcaccacgtcgttcacggccttcttcggcccctctagcacgacattgaggcctggcttcagaagccctcgggaaaacgcatcctgcaactgcaggacacaatcacggtcactcccaggggtgtaaggccccctctcccacgcccagccccacgagctcggctgacacctacctctctgtctgtgacaagggattcatcggattccgactccgaatccgagagcgggggagtgtccatctcgccgcacgcacgtcccacacctacaggaagaaacggggtatcccgagacccaagcggctagcagagggcggccctggccgctgctgcctgccttcagccccctactcccacgccgtggctccacgtgccaccgaatcgctccagcgccagcaactcacagctactgctcaacttttgattgggacttccgcttccggcggcaaaccatacttccggtttgtcgttgctataggaaccgctacggcgtttgaaagtgtccgggttgcttaggatccctacaggtagcgcctctggatacatgcgtggtctgctgacccagagagaaacgaaaggtgggagggggtacctgggggtcgccagaaggagctggtagcagtgagggtacaaaggaaaaggcagaaaaaggagccgcgggggtggggtggcgcggagg

SEQ ID NO: 1301 - DNA, 2300 bp, Homo sapien
gacaaatcattagaattaataataatttagcaaatatgctggaaataaacatcaataaattaaagtcaactgtatttaatacagcttattccaacagaatattatgtggttgataaatttgactttattaaaactaataatttttgtccatcaaaagatacttgtaagatgggagaaaaatgccccaaactgaaagaaattatttgcaagacatatatatatatctgacaaattattgatatacagaatatataaattgtgcatgtaaatcaataaaattgcccaaaaatatcctgcacaacaaactgtaaaaaacaagtaaaagacttgaacaaggcatttaacatacgactaaataggaatagcccataaacagatactcatcatcattaatgatagcaaaatgcaaacgaaaaccacaattccttttctcaaccattgggttagcaaaaaattacgaagttggacaataccaagggttggcagggttgctgaggaataagaactcttatgcacttctagtgggagtgtaaattggtactatcatattgctcagtaattttagtcctggctgtgtgccctagagaatctgcacaaatagatgaatgtatatgcatgcaagaatgtttatagtagtatagtttgtaatagcaaatgattgttatttcccaaatgtccctcaatattagagtgaatacatatatttgagacattatattcatatgatggaacactacatagcaataaaatgaacttggctatatgtatcgagatgtgtgaatctcaaaagcatgacattgaactgatgcagcaagacacagaatacagggagaagcactagaactggtaatattctgtttcctatgctgggtggctgggttcacagatctacattctattgtaattctttaaatatgacatatatgtagggtacattcttttgtatgtatatgtcacaataaaaggtgtcaatgcaacaaagaatgggaaaatggattcggttgttgaaataatgaatatcattaacaggaccactgtgaacaaaaataagggctgtaatgctatacaaatggttatttgcgacttgggataaagtttacagtgtcttcatcatacttggattcaaacggtgatataatgaaggtggtgtgctcaggaaaactgttagacaactcaaaaagtggctctggtgatgacaaaggcagtgatattgaagacaccaaaagaggggttcttaacatattttcatgaaattacagtgaaaaaagtacttttaaattaacattttatatgtgattttaactacatatgcgtgactgattaatctagtttcataatacaagtcgccatttatttcctctacatttataatactgcatatatattcaaattggccaaaatctttctttccaatcatcatgctgggattatggggttatatgtggcacataccattcctgtatatgtcaggatggaaaaagttttacctggaatgaatttttgccatttctgatccacattgtacttcacacagtgatttcctgaaggaaatataatgatctgttcatcgaagtagaagatattgttggccacgtgggatcgaagaccaaaaacatgcagcgtctgagctaccacggctgacatgatctcccgccaaacagttctgctgaagaccaaggcagcgcttcagagtggagagcaccgccccgctccgaccccgcccccggcccggactcgccctccccgccctttgctcctccccttgtctctcccctttctcctccccttgtccctcccctttcccctccccttgtccctcccctttcccctcccccggggtcctcctccgcgccaccccacccccgcggctcctttttctgccttttcctttgtaccctcactgctaccagctccttctggcgacccccaggtaccccctcccacctttcgtttctctctgggtcagcagaccacgcatgtatccagaggcgctacctgtagggatcctaagcaacccggacactttcaaacgccgtagcggttcctatagcaacgacaaaccggaagtatggtttgccgccggaagcggaagtcccaatcaaaagttgagcagtagctgtgagttgctggcgctggagcgattcggtggcacgtggagccacggcgtgggagtagggggctgaaggcaggcagcagcggccagggccgccctctgctagccgcttgggtctcgggataccccgtttcttcctgtaggtgtgggacgtgcgtgcggcgagatggacactcccccgctctcg

SEQ ID NO: 1302 - DNA, 2300 bp, Homo sapien
aggaaaatttcatgggtcccctgctgcagctctgcctgggacagctggcccatgggtctggctgggactggacctggggaccagggtgggtaaataaatgtcagatgtgtgcaagaggaatctgcagccagcaagccctgttgggcccctggctcccctgctcctctgagtcaagcccctttattataaaggggatacctttataatgctttgcaaattggcaggatgaacacctgcaatgccacaccactgtctccccaccccactccgcccaaccatcctcctgatccagactgcactgacctttttctgagggaaaggacatctaaagccatgccatccagtaaggacacagccacatgacagatgtggtgcctgggcatttgcagtgtggctgggataaatgagatgctctgtaagtataaaataatacctaccaaattttcaagacttttggttcacgcctgtaatctcagcactttgggaagccaaggcaggaggatcgcttgaacccaggagtttgagaacagcctggacaacatagcgagacccccatctctatttttaaaaataaaaataaaataccctgtacaaaataaaactgtaaaatagctcatcaataacatatataaaaatgtgttttggaattaaaatgtattaatttaaatgtattaatctcatgggtttctttttcatttttgaatgcagctattagaaaagtttatatatgtagctcacgctatatttcttttttcttccccgtgccccagcccccgcccgcagacggagccttgctctgtcacccaggttggagtgcgatggcacaatctcgcctcactgaacctctgcctcccaagttcaagcaattttcctgcctcagcctcctgagtagctgggattacaggggcctgccaccatgcctggctaatttttgtatttttagtagagacgaggtttcaccacgttggccaggctgctcttgaactcctgacctcgtgatccgcccacctcagcctcccaaagtgctgggattacaggcgtgaggcaccatgcccggcggctcaggctatatttctagcggacagggctgttctagaattatgactggcctccagtcatctccgcagaacaaagcaaagagatgcgaaagcaggtcgagcaccattattttgtgaactgataataacaagataagggtgatcttgtttttcttttctagttcatacacatcaggaggagaaagcaagagacatcacaggggctgatccaggagatgagggacagcctacaacagctccagccagcctgcccttcaccagtccggagggtggtgtgtgtgtggtgccagatttgcctattagaagctcccaccatgtccctattaaactttagaaccctccatgggccccttacacagcccaagtgcctcactatgggccttcaagaccctgaacagcctgagccaaacttgtctttccagcttcctctcacatgcttcctgctcaaaacccccacagctgtcagttcatgctatcatttagtctgctaatcaatcattcaacaaatatgtattgattacgtcctacatactagctactgaggtcatgatgattagcaaaagaggcactgtccgtctgcttgctggggaccacacatctagcagggaatgacaggtaaatacataataggcaattaagcatattgcagtaagagtagttgttggggaagcacaggggccatgggtgcaccaaagaggcacctctaaaccagcctgcaagtcagggaaggcttcctggaggaggtggcatctcagttgaagaatgcaagttgcccagactgaggctggggagtggcaaatatcccaggcaagggagaactcttgagttcaaaaactggaagggcagagaggagggcagggtgccagtggcaaatgactggcctggtgtatatggcaggggctttatgagccttgtgaaggagtgtggcatttcttctgaagtgtttattctgggagttcctgtctcctgcctgaaaggccttcacccctcctccctgttcactcaaatcctgcttccccagtaggatccagtctgtggggctcatttgagggagaatgagcacggggcttttggaggctgcagcctagggccaagggatggaggtactggggctgtgtttgggggtccgctgatgttggaatttggggctaaagctgggtttgaggttggcgttgggtttgggggctggattcaggaacaggagtcgaggttcgggctgagcgtgaggttgggatctaggac

SEQ ID NO: 1303 - DNA, 2300 bp, Homo sapien
ttagaaaagtttatatatgtagctcacgctatatttcttttttcttccccgtgccccagcccccgcccgcagacggagccttgctctgtcacccaggttggagtgcgatggcacaatctcgcctcactgaacctctgcctcccaagttcaagcaattttcctgcctcagcctcctgagtagctgggattacaggggcctgccaccatgcctggctaatttttgtatttttagtagagacgaggtttcaccacgttggccaggctgctcttgaactcctgacctcgtgatccgcccacctcagcctcccaaagtgctgggattacaggcgtgaggcaccatgcccggcggctcaggctatatttctagcggacagggctgttctagaattatgactggcctccagtcatctccgcagaacaaagcaaagagatgcgaaagcaggtcgagcaccattattttgtgaactgataataacaagataagggtgatcttgtttttcttttctagttcatacacatcaggaggagaaagcaagagacatcacaggggctgatccaggagatgagggacagcctacaacagctccagccagcctgcccttcaccagtccggagggtggtgtgtgtgtggtgccagatttgcctattagaagctcccaccatgtccctattaaactttagaaccctccatgggccccttacacagcccaagtgcctcactatgggccttcaagaccctgaacagcctgagccaaacttgtctttccagcttcctctcacatgcttcctgctcaaaacccccacagctgtcagttcatgctatcatttagtctgctaatcaatcattcaacaaatatgtattgattacgtcctacatactagctactgaggtcatgatgattagcaaaagaggcactgtccgtctgcttgctggggaccacacatctagcagggaatgacaggtaaatacataataggcaattaagcatattgcagtaagagtagttgttggggaagcacaggggccatgggtgcaccaaagaggcacctctaaaccagcctgcaagtcagggaaggcttcctggaggaggtggcatctcagttgaagaatgcaagttgcccagactgaggctggggagtggcaaatatcccaggcaagggagaactcttgagttcaaaaactggaagggcagagaggagggcagggtgccagtggcaaatgactggcctggtgtatatggcaggggctttatgagccttgtgaaggagtgtggcatttcttctgaagtgtttattctgggagttcctgtctcctgcctgaaaggccttcacccctcctccctgttcactcaaatcctgcttccccagtaggatccagtctgtggggctcatttgagggagaatgagcacggggcttttggaggctgcagcctagggccaagggatggaggtactggggctgtgtttgggggtccgctgatgttggaatttggggctaaagctgggtttgaggttggcgttgggtttgggggctggattcaggaacaggagtcgaggttcgggctgagcgtgaggttgggatctaggaccttagtccagaatttgagttggagttaggagttgggggctgaggtttctagccagattaggggttggatttggagttgggactggaattgaatttggaaatggggctgggggttggggctgagatgtgacgcaggagctggggcaggggtggaagctgggagttctagctagggtttgcagctgcagctagagttaggggttggttttgaagctggagctaaagctaaatcggggtcggagctgtggaatgggttggcgcccaggctctggggcagatagacgacattcctcctgctgcccaggtctgcgaattgtgttccgagccctaactgcagcggacagaagcccctcccttcacaggaatgcctcagcccagcagaaggagcagtgccacgtcagccaatcggctcaggccctgccctggaaacgacacctgttcatcctcctcccggcaggctcacctgagtgcaggttaggcaggtgaagtgtctccccggaaaccaagctagagtgccccacctgctcggccctgccttctcggatcggatccagcacatccaggcttctcgtgagttcccccattgtcccccaacgccccaccgcccccatgttctcccactcgcttctcccctgagaacctccaccccgcccccagcctgacacccgttgtctcagcacacctgtgcaagcattttcagaccaacgaagtc

SEQ ID NO: 1304 - DNA, 2300 bp, Homo sapien
agggccacatggtgggcctggcggatgcagttcatgtcctgcacagccgagctcatcagctgtttcaccagaaccagcagagccagcaaacagagcacagtgcccgttgctagccgccattcacctgagcggctgctggtggttgacagcagtgccacgccgcccgcgccacagcctgccacgaggcccacggccacgacgaagcagagcgccgagcgccgcggctgctgggaccaccacagctccacctgctctgccagcatgtccgggggcagcccccggccccctggggcttgagcctcctgttcagacatggcttggtcaggcaggggtcagggtaggaggtcaatgtcaggggtcagagggttcagatcacagcctggagcacctgccacctgcttggcagctacaggcccagagtcccattcctctcacagtccaggatatggtcaccctcacctgtaggggaaggatcacagtcttaccttcccagcccacctgtcccccacggtcccacctgggagccttggggatgatccctgagaatccaccccagtgttcccccgaatctcccctgggatagccccctctgcagtactgtcccttgggaatggctctccaatgaccccaggggagtaccctgcccatagggtaccccctaaaaccctccagggaatcccctcacccaggccctgacctctctgcctctggctctctcagtcgctggtcccatcccggctggctgagggagctggtgccacggtggacgatgggacgaacagccagagataaagcctcattcaggatcctactcacatggcctcagctgtcaccactggttcctcgggaggagctgtggggatggagggggcgcttatgacttaacccttctggaaccagaagcctgactgaccttgacacttctcttttagggctgtgtctcctccttctctgtgggttaggaccagacccctaacaccctccctcccctaacatcccatccaatctcacagccatgagtttggtaatataagctgccagttcccaaattcctctctccaacctacatctccgtcctgagtcaattgtcaccttgatgtccctgtgatgcaacaggtcccaacccaagctcgttgtcttactccaacctgttccttctgcgttcctcacttcaggcatggcatcactgccctctcagccagctcctcctccctctgctgtatctaatccacgtcctgtccctggggctccacctctaaacatttctctagccagttccctgctctcgtatccttggctcccgcctccacctcctcactggtctttctgctccccttgctcttctccacactcgccattcccccatgccatcctcctccacgatttctctaaagtggagcaaaggaaaaaggagggctctggatttgaaccccagctccagtccttcccaccggtaggaacatggccaggcacctaacagtggctgctgatttaacctgtcctccagaggaaagcatgtctcacattgggcaaaaataaagcacatgaggtccctgccttcaaggagccccagtctgcagcagaagacagagacagaagcaagcaggccagtgcctgtgctaagtgtgggtgtgggttagtcagcccagagccctgcagagcccaggagaggggtctgggggaggggccaggaagcctgaatggttcgtctcttagagcctcagtctccttgtctgaaaagtgaagacaataacatttatcttgaggggtggggatgagtcacctgacatcttcgtttcagaattccagtggggcctagagcctgcatagatgctcaaagcgtgctttttgaatacatgaaaacgatgttacccctccaaggcaggacagggcagaagacgtaggtcctgggtcattctgggaatattactatgtggccgtgcacaggttacatcctgacgaggtatctgtcctcccggagactcctctgcagaggctgacccctacccccgaggtgggcgggggctggtgccgatgctctcaaggaagtgggggaggtgggcgtggccgtggagtcagtcccagcattcccctgggctgtgacttcgttggtctgaaaatgcttgcacaggtgtgctgagacaacgggtgtcaggctgggggcggggtggaggttctcaggggagaagcgagtgggagaacatgggggcggtggggcgttgggggacaatgggggaactcacgagaagcctggatgtgctggatccgatccgagaaggcagggccgagcaggtggggca

SEQ ID NO: 1305 - DNA, 2300 bp, Homo sapien
gacacgctaggtgctcaatgaatatcagttgaatctcatgatttccttgcttcaaaaataaagtaaaaccctaagccctccttggcacctcattgccccatccaggataatcctttctttcctcaaatttgtttcagaagggtatacttttgccattttagatatgggggatatgatggaaacaagacagatgcagagtccattcccagagtttacaggttggcagggaaactaaagagaaaatcacaccccacatgttcagggatataggggagaagggccaccatctgcaggggtgcagtggagagtggggaaggcaggagtcccaggagaagggagcagagcctgcagagccagggagaggagagggcatggtgagttctgggaatagaaaagagtttggtggctgggcgcagtggctcatgcctgtaatcccagcactttgggaggccaaggcgggcagattgcttgaggtcaggagttcgagaccagcctggccaacatggcgaaaacccgtctctactaagaatacaaaaattagctgggtgtggtggcacatgcctgtaatctagctactcaggaggctgagggaggagaatcgcttgaacccaggggctggaggttggagtgagctgagatcgcaccactgtactccagcctgggtgacacagtgactctgtctcaaaaaaaaaaaaaaaaaaaagaaagaaaatagaaaatagtttggtgtagctgcagcagaggaggcaggaaaggtgggaagggatggccctgagggttcagatttcatcctaagatcttcagggccaagtgtgaactggcccccaccttccagccacagttctaccatgccttgtttgcatcccctctctgtaccccccttttatttttttgagacagggtcttgctctgtcgcccaggctggagtgtgatggcgcaatcatggctcactgtagcctaaaacttctgggctcaggcagtcctcccccctcagcttccccagtagctaggactacaggtgagcattaccacgcccagctaatttttgtgtttctagtagagatggggtctccctatgttgcccaggctgatctccgctcatgggctcaagcaatcaacccgctttggcctcccaaagtgctgggattacaggcgtgagccaccatacttggcctctctgcagcccttgctcccactgtgcccggcctatccttgcgaattcggggcctccaggccttggcgcgtgcggtccttcctcccttaggtagttacggggagcctgccctgggtcagtactgtgctgggagccacaggctgtcaaagcctggccccaccccaggagagcgaataatcacaagataatgaggaatgctgcgacagtgggtgctctgggcatggaagagtggggacttgcagggtagagggaggactcagggaaggtgattcctgaactggagcttgaagaacagggggcaccaggcccagagacgaggagtaaagctaaagggaatcagagagcacccgggagaggttcagagcctggcttgtggggtcacgggatcctgagatccagatgaaggctgagcccccatccagatccacccctcaccccctacacagttacacacacatttgtaggcaatttgggagtgttcttggtcctcctggctttgcctggaaagaatgccctccccacccgctctggttccagcccaccacccttacaggcctgcaaagctccctcttcaactctggactttgtaccagtcaccggacgttcagttgtttatcaacctgagcacctgcctgctgaggtgtctgcccctctagggcccgctggacgcttctctggatcccagctgtacaaaccgcaagcattggggggtgagggtgaggtctacacccataaagttcttggcaaaagcttgggggagaggtagaattatccctccccactggaggcgctgccgcagcccgccctctgccagacctgcagcttcagccccgcccactgcctccgcaggtgagtcaagctctgccttgacccgcccacctgtccaggttctgccggccccagccggaagcttactccgcggattgtgcacagttcttgaaggtgggaacagaagagaaggcccgggggggccggggagggggtacccaggctctgcacagtacccaaggggcttctggcagcaggaaggaagctacacatcagagttggggtaggtgtctgtgcatgtcagaggggtgtttgttggtggaggaaagtgtgacctggggggaggggctgtgcgtat

SEQ ID NO: 1306 - DNA, 2300 bp, Homo sapien
agatgtgcattatggcttaagtcgtcttatacatctgcaacagcagatgtatacacaacccactcaaaatttgtgtgtgcagtaatatttcatttgggacatattgtttgtaaactgatgctatttaaattacttgcagcataatctcaacacatgtaaaaatacttttacacttgtaggatattgttttataatacaaattcttgtgtacaaactccattaacattttatttatgtacagatcattattaccagtttttgtttcccagttgagagtggggagggcagatgggctcagaatctttgcatgtgccagcatcctgcagtctcaaacttttccattcaaagcaaatacctgtgccaatatctgtgtcacttccaacaagaatgaatgctgcctaagtgctctccacacatttgcaaaatgacatcaggccccccaggtcttccaagaaccaaaggaaaagttccacaaaagtgaatcctgccatacaaacagtcccagcactttccagctcctttttcattccagattcaaaggtctggcaccaggatgagctgaagtgtaaggcatccaccactctccccctgctcctactcccatcccacccaaagccttgtctagagaaagctcctcccagcctcaggcccaggaatgggaatctctgtgggtcacacatcagtagggaggtctttcccgatccttttctatgctactccaggagtcaaagcgtctcctgggacttttcagggcgcttcagaagagccctgggcctaaaccagctcaaccaagctgcagggacccagcctcctgagaaaagtgaatgtgagcccggtgcattcagaggagaatgaagccttcacccagaacacactctgggaagatgtcccaggcccagggggagggtttgtactaccagacctaagtcacctaaactgacaccaagtctcatccatcccaaccattccattccgggtcagaggggtcatcgatttaaccagcaaggctgcccatccaacggttgctccctctgctccctggaagggcctcctcgtgggcgttctgtacctacaggtcttgttccgttctgggaactgccagtggtggcaagaggtggagcaacgggtgccagggcagggagaggtgagtctgggagggaagcagaggcaagatccatggggctttagagactttgccaaagcagtgcgactgctcccaggttgttgtcagccgtcaagagtgagtgcacctccctgggcagacttctgctgccccagtgcccaggaataggcaggggtttgccgcaaaatgaatgacacctggcagacaataagctgaagctttcattagcagcttaagctgaggactatctatgcaaccgatactccctgtgtgctccccgggactgcttaatgtgagcccttgtggagcgattggcaccaagaaagcaaggactaagtcagaagttcaagtcccagccttgccacagcctcagggtgccctcgagcacagcaagcctcagttttcccatctgtacaatgagagaggtacacaaggtagactcgaaggctctttgttgccagggccctgtgttcctttgagtgtatgtgcttctcaggcccacagaggtcctttgtgtttcgtatgtgaactgctctctaggaaacccatgtaactgtctgtgtcctggggcacatacatgaggactcatgtgggccgtattgtgtgtttgtgccggggggaggggagaccccagaacaatgtcccccaccccacccccctcctcaataggcggaagccactggcttcctccctttcctgcctcctgcctcctttgtgccagcaagactgagtactggagagagacaggggatgggaaaaatcagtccagctgtccccaggtctgcccttaccataaccttccccccacctcaagtgactcctcccaggccacacccatccccagccttgtgggggccagattggggggcctagaggctcaaaggcagaatgagtcctcccaccccctaccctgccacccctcccacccaagccacctcatttcctcttcctccccagcaccgacccacactgaccaacacaggctgagcagtcaggcccacagcatctgaccccaggcccagctcgtcctggctggcctgggtcggcctctggagtatggtctggcgggtgccccctttcttgctccccatcctcttcttggcttctcatgtgggtaagtctcccctgagtccctcaccccatttctaggccccgaggccctgatttctacccaaga

SEQ ID NO: 1307 - DNA, 2300 bp, Homo sapien
gaagtcaagtaggcagttggctatccaaatctggagcccagggaagaagtcacagctagagataccatttgaagtcatcagcatacacagagcatcaaagccatgggactgcatgaacactgaagttgtgttttccctctcacttgatctcacagaagtttgggtagcccttgcctggggactggggaaggcatccaaagtcattaccatcagtcctcgtaatgtgagagccaggtacagctaaagacaaatctgagtcagggactgcttgcagagaaatggtgccagagaaactaagacttcacaggagagctgaaggtgttccatctcctccttgatactgaggatacttagtctgtacagccagcaatgggagccctagctgaggcctgaggggctaaaaatgggagttgatgtggctatgcaccctccccacaactcacctcctgtccccacctccacccacacaagagtcaagcctcctagaattggcataaaatccacatacagagcagtcccaggaggaggcttggggttcagtgacaggagatgagcacaggctgaagagctgagaccagccatccactgaatttttttttttttttttttgagacagagtcttgccctgtcacccaggctggcgtaccgtggtgcaatcttgggtcactgcaacctctgccccctgggtttaagagattctcatgcctcagccttctgagtcgctgggactacaggcaagcactaccacgcctagctaatttttttgtatttttagtagagacagggtttcaccatactggccaggctggtctcaaactcctgacctcagatgatccacccagctcggcctcccaaagtgctggtattataggtgtgagccactgcacccagccccatccactgattcagagcaaacaggataaaagtactgaagaccattgcttctccaactttaagttacattcaaaccatctagggattttggtaaaatgcaggttctatttttgtaggggccagctccacagggtcagtgggtttttctccctgtgtgcaaagacgagagatcatagaaataaagacacaagacaaagagataaaagaaaagacagctgggtccaggggaccactaccaccaagacgcggaaaccagtagtggccccgaatgccaggctgcgcagttatttattggatacaagacaagggggcagggtaaggagtgtgagccatctccaatctgagcaaacaggataaaagtactgaagaccattgcttctccaactttaagttacattcaaaccatctggggattttggcaaaatgcaggttcaactttaataggcctggggtggggcctaagattctgcatttctaataagtgcccacctaatgctgttgctcctggtctacagaccacattttgagtagcaagggattagaggcagccgtggaggccacccataatggagagggcatttccagttccagggagaatgtgtttattcatgcgcaaagtcacagaactattaaagtggaaatacccaccatttggcatggttgtggggcagagagttatttctcagcagattagcctcccaagagcatagcacagcatggctgttatgcaggtgggttctgaaggttgacctcctgagctttatgtcttagtatgtaatcttgggcaaatctttaacttctctgtatctccgtttcctcatctctataatggaaataacaagactattgtgcggattgtctaagtgaatggatataaagtgcttaacacacggcagcatagtaagtgctcagtaaaagttgctattctgatgctattataccattctataatcgttagcacagatacagaggctgagttgccttttggtacacggtcaaatatacaacccccatctccctcacaccaaaaggcctgtgtcctctctttcaaattcctccttccctcctgcccactccccctcccctggcccctggccccagtgtggtctggatgggccccagaggggcagggacagggacaggacgtggggctgtatctgacaggaacctgaggggctggcctgggaggggattggggcccagcttcctgaagggaggatgggctaaggcaggcacacagtggcggagaagatgccctcctgggccctcttcatggtcacctcctgcctcctcctggcccctcaaaacctggcccaagtcagcagccaaggtgaggtgcacagagggtggagatcacctatgcccaggaagagggagccctgggaggtgatgcagggccccgggag

SEQ ID NO: 1308 - DNA, 2300 bp, Homo sapien
accaccacacctggctaattttgtacttctagtagagacagggtttcgccacattggcccgactagtcttgaactactgacttcaagtgatctgcccgccttggcctcccaaagtgctgggattacaggagtgaaccatgacaacctgcccaaatcctttatttttaaatgtacaaattccctgaggctataccctttatccttctctatagctaccaccagaagttgcaaattattgccatatcccccccctcagatgttttatttggtccttccctacacagaaaccccacaggtaccacaatgcctagcagatgaagtccaaagtctttagcttaacatttaagaccctgaccaacttgacatgagacaaccttttctatgttttctgggaattccccacctctaacctaagcatatccaattccttattttccaaggtaattggaaatagagaatgcaaaggcttcaagtcaaagataataacattatctgtaagcatcggagtggactttaagctaatgactgaaaatgatttttccagcctctttctgggacagtatagcgtattgtttagattgcagggattagtcagatagtttgaatcctgggctcccctacttattattggctgcatgcctttgggcaagtttctaatctttctgacccagtttcttttttctgtaaagggaagatggggtatctatctgccttatgggattaaggattgaactcgataatgtatgtaaactttttttttttttttcagacagagtatcgctctgttgcccaggctggagtgcagtggctcgatctcggctcactgcaagctccgcctcccgggttcacgccattctcctgcctcagcctctcgagtagctggaactacaggcgcccgccaccaagcccggctaattttttgtatttttagtaaagacggggtttcaccgtgttagccaggatggtctcgatcttctgacttcgtgatctgcccgcctcggcctcccaaagtgctgggattacaagcgtgagccaccgcgcatggcctgtaaattgttttaacacagtagttagatggtccataaatggtaccattattacttttatgattgctgctccacctctgagcacattcatacaattcactcaagtcattattagagcactagattgagtgcgagtcagacctggattcccacaaacttctttgtatgacctcgggcacatcccttccctgggcctccgtttctccatctgtaaaatatggatttgttgtcggggtggggaggctgcaccacgcacaggttagactaatggatctctaaggtcctcacatctttaaagccccaaggggataagccacagtgcctcctgtagggcagtctaagcttatcttccagataggcaggtttgaataccgatcctttttcttgaccttaaggaattcattcacccttttcaacctcattttccctgtttgtaaaacaacagcaaacgagacaaacacacgttacttcctttctagcagggttcctacccggcgccaagcaaaagtggaatgtaccctaagtagctctggccttcttcctgctcccaagcttcccaattccgtcccctgccccgctgccgcccgcggctctccttccccttctaggaacggctcaagcgccttgggcactccatcgggttctgcaccgagttctgcatcataaatacgactctcgtgtaggatttaagtgtgaacttctgcaggttctcggaccctgaagcacccggggccagacattccgagctcgcggcggtggaaggcacgcaaaagggcgaaccgagacgactccaggacgctgaggcagcgcaggccccacccggccccgccctgccccgccctgtcccggccggctttccagtactagtcctctggcgccggctcccagcccctctcgtacccttcaaatcgcgctccgccgctagactctcgtgatagctgagactttccccggaaggcccgcccccttcgccggagaggccaatgggctagggcaacggttgcgacggttggattttgaaggagccaataggcgctcggagcggagagtttaagaggcgtaagccaggcgtgttaaagccggtcggaactgctccggagggcacggtgagaggtggtggggctgagccgaggtggggccgtggccagggggagggggtgctaggccggaaggggctgcagccgagggtggccctgattttgtggccggccaggagcgaaggggtccctttctgtcccctgagcaccgtcgcct

SEQ ID NO: 1309 - DNA, 2300 bp, Homo sapien
tttttttttttttttttttttgagacagagtcttgctctattgctcaggctggagtgcagtggtgcgatctcggctcactgcaagctctgcctcccgggttcacaccattctgtctcagtctcccgagtagctgggactacagacgcccgccaccacgcccggctaattttttgtatttttagtagagatggggtttcaccgtgttagccaggatggtctcgatctcctgacctcgtgatccgcctgccttggcctcccaaagtgctgggattacaggcgtgagccaccgcgcccggcctttttttaaaaaaatgtgtttattttccttgcggagcagggctgccccataagcagtgtgcccagagtagcccaaattccctaattctgtccgcacttacaccatccaatcatacaagcagttgttagatcgttgtgtgctactgttccaggggccgctggaggtagaaattccatttcactaaaatctagtctgtcctttgcccccactagttgagtccagttagtgagtgtggaggtgggggctggaggtgtagaagagataaataaatatatagagagccagtccagctgtctggaggacattgtccgcctcctccaatcccatcagttgccacatcttctttggtcaggctggctttctcacctggtctcctttctgtgccctcctcacactggctgccaaagtgattcagccagatagactgcaagccccgtgagtgcacggacggtgggtggtccataaacgtctgatgaactaatgatacaagcttgaatatagtctcctaaaaaaatctttagtttctcctctgcttctagaataaaaatcagatcgccccatttggccttcaagacctactacattcagccacagtcagcttcatttcccttttttcctttcactacctcgaaggccagattagccagtgattcactatgcttgccccgggccacttgtatcctctcacctccgttccaggcagccctcgcagcagatcctaacgcttagggctcctccaagtgtacaggctcgtgaggcttccctcccgctaagaccagtgcgccctcagcacacgcagtgtggtctcgcccgccgctctgcgctcgccctgcaggagagggagctctttgaaggcaaggccgaacctcccccgagccctgagctgggcctgccgccacagatgtgcagtcctgccggggagcagtcacccggggacagggccgggccccgggctgcacgtcgggaagagacagcgtgctcctgaggtggccaggccgctgcaactggccagggcgggcccgggcggcgagggaaggggtgggaagcccgggccgcggcgcttcctgctgggacccggcggcacgcccctgcccccgccccggccgagcctgcgctgccggcctccggccctgccggccgcccaatcagcgggcgccccccgcgcggcccgcccctccccctctggtgacagaaagtcggcccagcagatgaggaagtggcaggcaggcaggctggccccggggacttctctctggccctgctccctccgagcgctccgccgttgcccgcctggcccctacgggtgagtctggaccttccacggactctccacgtgccggcgccccctgcctggccagcccggcccagcccggcccagccctgccctgccctgcccaggctgtgggcgagggtgttcccggggccagtgggtgggaggtcccagctccctggggccgggcctcgccagcaccctccctcccccacacccccgtctctggcccccatttgcctacacccgggccttcctccaccacccctgcatttacctctctccctcctcctctcccctccctccccccgctaccctaactttgccaggcaccttttcccttccatccatcttaaaggaaggaagggacgggctgagttccccgacgagagacacacccagattttcctgcagcttggggagaggtcctcccaggagccttggtccctcctggcctgccgggtgtgtgggttgatattgggggctggtggttgagagataacaggctggctggctcccatgtgtcagggaggaacctgtgttggcgccctcgccccggcctgggccctgccggcgatgggcggccagcaagcccgatggtgggggagcaagtaaggaggggatccgagcgtggccaggcagcgcgcacacgtgtgtgagtggccccgcgggtgagcccgtgcgtgtgcctgggcggtggccgagctgcgtgagggccgggagccatgcgt

SEQ ID NO: 1310 - DNA, 2300 bp, Homo sapien
gccctgcactccaggctggagtgcagtggcttgatctcggctcactgcaacctccgcctcccaggttcaagcaattcttctgcctcagcctcccgagtagctgggattacaggcttgcgccaccatgcctggctaatttttgtattttcagtagagacggggtttcaccatgttggccaggctgttctcaaactcctgacctcaggtgatctgcccgcctcagcctcccaaagtgctgggattacaggcgtgagccaacgcacccggccttttttttttttttttttttttttttgagacagagtcttgctctattgctcaggctggagtgcagtggtgcgatctcggctcactgcaagctctgcctcccgggttcacaccattctgtctcagtctcccgagtagctgggactacagacgcccgccaccacgcccggctaattttttgtatttttagtagagatggggtttcaccgtgttagccaggatggtctcgatctcctgacctcgtgatccgcctgccttggcctcccaaagtgctgggattacaggcgtgagccaccgcgcccggcctttttttaaaaaaatgtgtttattttccttgcggagcagggctgccccataagcagtgtgcccagagtagcccaaattccctaattctgtccgcacttacaccatccaatcatacaagcagttgttagatcgttgtgtgctactgttccaggggccgctggaggtagaaattccatttcactaaaatctagtctgtcctttgcccccactagttgagtccagttagtgagtgtggaggtgggggctggaggtgtagaagagataaataaatatatagagagccagtccagctgtctggaggacattgtccgcctcctccaatcccatcagttgccacatcttctttggtcaggctggctttctcacctggtctcctttctgtgccctcctcacactggctgccaaagtgattcagccagatagactgcaagccccgtgagtgcacggacggtgggtggtccataaacgtctgatgaactaatgatacaagcttgaatatagtctcctaaaaaaatctttagtttctcctctgcttctagaataaaaatcagatcgccccatttggccttcaagacctactacattcagccacagtcagcttcatttcccttttttcctttcactacctcgaaggccagattagccagtgattcactatgcttgccccgggccacttgtatcctctcacctccgttccaggcagccctcgcagcagatcctaacgcttagggctcctccaagtgtacaggctcgtgaggcttccctcccgctaagaccagtgcgccctcagcacacgcagtgtggtctcgcccgccgctctgcgctcgccctgcaggagagggagctctttgaaggcaaggccgaacctcccccgagccctgagctgggcctgccgccacagatgtgcagtcctgccggggagcagtcacccggggacagggccgggccccgggctgcacgtcgggaagagacagcgtgctcctgaggtggccaggccgctgcaactggccagggcgggcccgggcggcgagggaaggggtgggaagcccgggccgcggcgcttcctgctgggacccggcggcacgcccctgcccccgccccggccgagcctgcgctgccggcctccggccctgccggccgcccaatcagcgggcgccccccgcgcggcccgcccctccccctctggtgacagaaagtcggcccagcagatgaggaagtggcaggcaggcaggctggccccggggacttctctctggccctgctccctccgagcgctccgccgttgcccgcctggcccctacgggtgagtctggaccttccacggactctccacgtgccggcgccccctgcctggccagcccggcccagcccggcccagccctgccctgccctgcccaggctgtgggcgagggtgttcccggggccagtgggtgggaggtcccagctccctggggccgggcctcgccagcaccctccctcccccacacccccgtctctggcccccatttgcctacacccgggccttcctccaccacccctgcatttacctctctccctcctcctctcccctccctccccccgctaccctaactttgccaggcaccttttcccttccatccatcttaaaggaaggaagggacgggctgagttccccgacgagagacacacccagattttcctgcagcttggggagaggtcctcccaggagccttggtccctcctggcct

SEQ ID NO: 1311 - DNA, 2300 bp, Homo sapien
tgcctcagccttacaaagtgctaggattacaggtgtgagcctccatccccagcctatcctaccatttatgaacatcttttttttttttttttttttttctggagacgagtcttgctctgttgcccaggctgtagtgcagtggcatgatctcggcttactgcaccctctgcctcccaggttcaagcaattctcctgcctcagcctcccaagtagctgggacaacaggcgcacaccaccatgcccagctaatttttttttaaatgtattttagtagagatggggtttcactgtgttgcccaggctggtctccgaattcccttttttttttttttttgagacggagtcttgccctgcactccaggctggagtgcagtggcttgatctcggctcactgcaacctccgcctcccaggttcaagcaattcttctgcctcagcctcccgagtagctgggattacaggcttgcgccaccatgcctggctaatttttgtattttcagtagagacggggtttcaccatgttggccaggctgttctcaaactcctgacctcaggtgatctgcccgcctcagcctcccaaagtgctgggattacaggcgtgagccaacgcacccggccttttttttttttttttttttttttttgagacagagtcttgctctattgctcaggctggagtgcagtggtgcgatctcggctcactgcaagctctgcctcccgggttcacaccattctgtctcagtctcccgagtagctgggactacagacgcccgccaccacgcccggctaattttttgtatttttagtagagatggggtttcaccgtgttagccaggatggtctcgatctcctgacctcgtgatccgcctgccttggcctcccaaagtgctgggattacaggcgtgagccaccgcgcccggcctttttttaaaaaaatgtgtttattttccttgcggagcagggctgccccataagcagtgtgcccagagtagcccaaattccctaattctgtccgcacttacaccatccaatcatacaagcagttgttagatcgttgtgtgctactgttccaggggccgctggaggtagaaattccatttcactaaaatctagtctgtcctttgcccccactagttgagtccagttagtgagtgtggaggtgggggctggaggtgtagaagagataaataaatatatagagagccagtccagctgtctggaggacattgtccgcctcctccaatcccatcagttgccacatcttctttggtcaggctggctttctcacctggtctcctttctgtgccctcctcacactggctgccaaagtgattcagccagatagactgcaagccccgtgagtgcacggacggtgggtggtccataaacgtctgatgaactaatgatacaagcttgaatatagtctcctaaaaaaatctttagtttctcctctgcttctagaataaaaatcagatcgccccatttggccttcaagacctactacattcagccacagtcagcttcatttcccttttttcctttcactacctcgaaggccagattagccagtgattcactatgcttgccccgggccacttgtatcctctcacctccgttccaggcagccctcgcagcagatcctaacgcttagggctcctccaagtgtacaggctcgtgaggcttccctcccgctaagaccagtgcgccctcagcacacgcagtgtggtctcgcccgccgctctgcgctcgccctgcaggagagggagctctttgaaggcaaggccgaacctcccccgagccctgagctgggcctgccgccacagatgtgcagtcctgccggggagcagtcacccggggacagggccgggccccgggctgcacgtcgggaagagacagcgtgctcctgaggtggccaggccgctgcaactggccagggcgggcccgggcggcgagggaaggggtgggaagcccgggccgcggcgcttcctgctgggacccggcggcacgcccctgcccccgccccggccgagcctgcgctgccggcctccggccctgccggccgcccaatcagcgggcgccccccgcgcggcccgcccctccccctctggtgacagaaagtcggcccagcagatgaggaagtggcaggcaggcaggctggccccggggacttctctctggccctgctccctccgagcgctccgccgttgcccgcctggcccctacgggtgagtctggaccttccacggactctccacgtgccggcgccccctgcctggccagcccggcccagcccggcccagcc

SEQ ID NO: 1312 - DNA, 2300 bp, Homo sapien
ggaacagactaacagggatgacagggctatgaaagagggacatagtttcagtttatgaaacagacgtagaaaaaacccagttcattgtttgaatggggtgaggaacagtggcaaaataggaaccagggctacactgttataactaaaacttcagaaaccgggtaaaagcctcctttccagcctggaaataagatccacacttcagagtaggttggctctaaaagactcagccacatctgtggcaagagatccagcacgaatagagctgtagtgggaggacctcctcaccagagaagtcaaagggtaagaattgaaagctagaaagaacttgggttaggaaactgagcatttctctacttccttgccatggaatccacttgctaaatgttaggaaacccagctctttccaaatcaaaagatgtttgcaaactgataaatggttacatcattagaaatgtcctattcatcaggaggctaggcccccccacccataagcccttcctagcttgccctggtaactcttaccaggtcagccggccatactcgttctccaacttgcaaatgaaactccccagagagttcttcagatcagccacttgactcagcagtgcatctaatgatgcctcaagctgcttctcctctctctgcaccaataggaacaggttggtcacccagataaacgagtatgacacatagaaaggagggctggaaagccaaggagatggtgtgcaacaccagtcaggtaacacaggatctcattggcataggatagccaggttgttttctatctttggtatttgggttatagacagcatcaaccctgagaccttccaacctgtttgcctgaccccaagtccttccaccaactgattccttttccccatcacctcctaatctatgcctggtttttctctgtgttaggtacaccctacactccctcactgagacattttcgacagacctaatgccaggagatcattctctcatgtgcacctctgtagcacatgcactccagcttcctccatcctagcatctgtgagcctggctgtcttgtcagtctctgggaaatctgcctactcatgaagacttctctgaacaccagtcctgctctcccctttccctcccccaaccaacgactccagctttccatctgctctcatcattttgtttcaaccttctccttgctgaattaatatgcaatcatctatctctgtgtcaatattcccgtgcctctttcacaagctcagtcaacccattaacatttattgagactaccagctgcaagaaactaagtgacaaatgaaaaacaaaaaccacacatgcttctaagcactggacaaacaaattaaaatgctgggggtctgcaaagcatttccttcccatcggtggtctcctgttttactccatttcttcacccttaacaactatagggcacaggctgggaagagggatgcaaaactgtcttgcaaacctgcctgacagaaacttgatcccgggttccaccatggcctctgattataagctgcttagctttcagccatcgcggcccacaattccctcactgcttgggcttctttccaattagatcccctgctatatcggcaaccaacagcctccatccagcagcttaggacagggcctgagccaacccaccaccttcttgagccgtcttccttggactgcatctcagcctccccgtattacaacctaatcctttcccacgccaagcaaacaggtgctgcctcctccctccggatttagcccgactgtctcctgtcaggcaagctccacccccacctctaatcgccgccgctcccgctccaattagcctcgccccccagcccacattcccttatcagccgtgggttctgccctctcttctcagtcccaactcttcattctccttagccagcccactctcggtccctgtacccgaagcttgccagccgctagtacgcccaacgcaactctcacctgcattgcggcggccgaggcggctgccacgatttcacttccggttttccagtcagcaaacgcctacgagaaggcttcgtccaccaatcagaaaactggaactcggccctcccaccaacttccggttcctgctgggtgccgaggtagcgaggtcaggggtcaagagtggaacaccctcactggcccgggccggcgcgggagggctgtgtgatggcctcggagcgcccggagccggaggtgaggggcgggcgggcgcagcactgggccccgagatccgagggggagggtccggcgggcaggcgtggcgttggcctcctctaggtctg

SEQ ID NO: 1313 - DNA, 2300 bp, Homo sapien
gaagactcgcctgaggttgcacagattagctacatgacagcgccaatattggaacgaggtctcagtccgactcaaatgtttttttcatgaaattaaagctgcttttctaaaagcatgagccctagaactaaataaattcatgctgtttatggtattccaatgcctaaagaaatgcaaaaaccagcaaagtaaatctactgccgtgttgcccattgaaactgcaacagaaagtcaaaatacaagttttgttaacaccgctataagtcttagagacgacgacgcgggtgacatgtcagtaaacaaaacaaagcgaacagttactcctttagctccccgaggaaactgcggaccgcgtcccatacacagtccgcaggggtaccatagtcgggccttccgggctgggctggtccctgccgaggctacgcagcccggccacccccagacctagaggaggccaacgccacgcctgcccgccggaccctccccctcggatctcggggcccagtgctgcgcccgcccgcccctcacctccggctccgggcgctccgaggccatcacacagccctcccgcgccggcccgggccagtgagggtgttccactcttgacccctgacctcgctacctcggcacccagcaggaaccggaagttggtgggagggccgagttccagttttctgattggtggacgaagccttctcgtaggcgtttgctgactggaaaaccggaagtgaaatcgtggcagccgcctcggccgccgcaatgcaggtgagagttgcgttgggcgtactagcggctggcaagcttcgggtacagggaccgagagtgggctggctaaggagaatgaagagttgggactgagaagagagggcagaacccacggctgataagggaatgtgggctggggggcgaggctaattggagcgggagcggcggcgattagaggtgggggtggagcttgcctgacaggagacagtcgggctaaatccggagggaggaggcagcacctgtttgcttggcgtgggaaaggattaggttgtaatacggggaggctgagatgcagtccaaggaagacggctcaagaaggtggtgggttggctcaggccctgtcctaagctgctggatggaggctgttggttgccgatatagcaggggatctaattggaaagaagcccaagcagtgagggaattgtgggccgcgatggctgaaagctaagcagcttataatcagaggccatggtggaacccgggatcaagtttctgtcaggcaggtttgcaagacagttttgcatccctcttcccagcctgtgccctatagttgttaagggtgaagaaatggagtaaaacaggagaccaccgatgggaaggaaatgctttgcagacccccagcattttaatttgtttgtccagtgcttagaagcatgtgtggtttttgtttttcatttgtcacttagtttcttgcagctggtagtctcaataaatgttaatgggttgactgagcttgtgaaagaggcacgggaatattgacacagagatagatgattgcatattaattcagcaaggagaaggttgaaacaaaatgatgagagcagatggaaagctggagtcgttggttgggggagggaaaggggagagcaggactggtgttcagagaagtcttcatgagtaggcagatttcccagagactgacaagacagccaggctcacagatgctaggatggaggaagctggagtgcatgtgctacagaggtgcacatgagagaatgatctcctggcattaggtctgtcgaaaatgtctcagtgagggagtgtagggtgtacctaacacagagaaaaaccaggcatagattaggaggtgatggggaaaaggaatcagttggtggaaggacttggggtcaggcaaacaggttggaaggtctcagggttgatgctgtctataacccaaataccaaagatagaaaacaacctggctatcctatgccaatgagatcctgtgttacctgactggtgttgcacaccatctccttggctttccagccctcctttctatgtgtcatactcgtttatctgggtgaccaacctgttcctattggtgcagagagaggagaagcagcttgaggcatcattagatgcactgctgagtcaagtggctgatctgaagaactctctggggagtttcatttgcaagttggagaacgagtatggccggctgacctggtaagagttaccagggcaagctaggaagggcttatgggtgggggggcctagcctcctgatgaataggacatttctaatgatgtaac

SEQ ID NO: 1314 - DNA, 2300 bp, Homo sapien
agacagggtttcaccgttttagccaggatggtctcgatctcctgacctcgtgatccgcccgcctcggcctcccaaagtgctgggattacaggcgtgagccaccgcgcccggccttgtttcatttttttatgtggctatcagaaaatttaatattacacatgtggcttgctttagatttctacaggacggtgttgtcctagactatctgcctaaaaggtatgttgcatttccccacaacatccctccacctcctttcactttaatctataatgaaacatcctctaaactgtttcatagtttttcttgtgttaatatttctgattgatcttgattgatatttctgatgcatgagctattctaccacctctgtgaacatgactattttaaataaggcatagtttcctaccaccatattcaatgttgggtcttaccacaccaaatcccagtgaactggagatttaccattctgtggctactttattacttataccatgaacaatatggttaagaacacaaggactggagcctggccatctgttttggagtcctgactctaatacttaatagctgtgtaactttgttacttttttttttttttgagacggagtttcactcttgttgcccaggctgaagtgcaatggcatgatctcagctcatcgcaacctccacctcccgggttcaagcgattctcctgcctcagcctcccgagtagctgagattacaggcctgcgccaccatgcttggctaattttgcattttcagtacagacaggctttctccatgttggtcaggctggtctcgaactcctcacctcaggtgatctgcccacctcggcctcccagtgttgggattacaggtgtaagccactgcgcccggcttactttgttactcttaatatctctgtgcctcagttcctaaactaaaaaaaggagatgatacagtgtccacttcatagggctgaggattaactgatattggtaaagagcttagaatggtactgagcatgcagtatgtatgcagtaatgaatactatttctatcattatacacatctctcacccttcccacctactgatatgttggcacctttcctggtggtggtgttttatccgaatctgagattttaagctcagatcttctaactccaaactgctagttcctggatgagtggcatttgagtaaggtactaaatctttctcatttttcagttttctcctctgtgagaatgccaccttccttgcacaagtctgaatgacacaacatatataaggttccttgcatgttccttagcatttaacgaatatatcatatcacctttctggtttattacatgtgattctcacaacacactataagacagatattttataaagaaggaaacaggatccgggaagactcgcctgaggttgcacagattagctacatgacagcgccaatattggaacgaggtctcagtccgactcaaatgtttttttcatgaaattaaagctgcttttctaaaagcatgagccctagaactaaataaattcatgctgtttatggtattccaatgcctaaagaaatgcaaaaaccagcaaagtaaatctactgccgtgttgcccattgaaactgcaacagaaagtcaaaatacaagttttgttaacaccgctataagtcttagagacgacgacgcgggtgacatgtcagtaaacaaaacaaagcgaacagttactcctttagctccccgaggaaactgcggaccgcgtcccatacacagtccgcaggggtaccatagtcgggccttccgggctgggctggtccctgccgaggctacgcagcccggccacccccagacctagaggaggccaacgccacgcctgcccgccggaccctccccctcggatctcggggcccagtgctgcgcccgcccgcccctcacctccggctccgggcgctccgaggccatcacacagccctcccgcgccggcccgggccagtgagggtgttccactcttgacccctgacctcgctacctcggcacccagcaggaaccggaagttggtgggagggccgagttccagttttctgattggtggacgaagccttctcgtaggcgtttgctgactggaaaaccggaagtgaaatcgtggcagccgcctcggccgccgcaatgcaggtgagagttgcgttgggcgtactagcggctggcaagcttcgggtacagggaccgagagtgggctggctaaggagaatgaagagttgggactgagaagagagggcagaacccacggctgataagggaatgtgggctggggggcgagg

SEQ ID NO: 1315 - DNA, 2300 bp, Homo sapien
gatcgtagttggggtttcgaagaagcagatgagagtgaagagggccagggatttgagagcgatgcttatgaagttgtctgaatgtagggtccaagctgggtcgagaaaggagggtcaggacaatgtggatagatttggagagagcagaggttcaaggcctggcagtctcagtgaggtcaaagagcagcagcaggaggagggtgggaggaagctaagggaatagtgttgtatgtaatcagtgggttatggcaatttgaaattgcaaagatgaatttgttccacatgaagccaagagccagcgtgtagcctataggcaggtgaatggaatagagtaagttactggagatgagagttaaggaactgagagggcagggacttgaatgagtaatctggagcaggtctgcaaacactttctgcaaaggccagtcagtctttaagccttgtgggccacttggtccgtcacagctactcagctctgctgttgaagcgtgaaagcagccacagacaatacaaaatgaatgtgtgtggctgtgttccaataaaactcgattcacaaaaataggtgatggactagatttggccctcagggtatatgtagtttgctaatttcccacctacagctattgtattcaaaatgtagtccacagaccagcagaaagcttgtttgaaatgcagaatctcaggccccaccccagacctactgcattttaacaaaatccccaggtgtttttcatacaccctaaagtttgagaagtgttggtaagctgaagtctctcaggatgatgacaggaagtcagtgaaccagttgccaaaatctttagtgaaggaggtggtgggcctttaggtatcgaggaggaagcaaagaggatgctgtggccggttagcatgggcatcagacagaagggcttaaggaaggaaagacacagacagtggtctgtcctgggaaaacactggcctacttcccactctgtggtccagggaatgggagcagccacctagcccagtctctttctctcctgttcttccttctcctatgcctctgtcagagctaggtcttcagttgctcactttttccaggtgggaggagtttactcttatgactgcagttttggccatgtgcccaatgtggaattaatgaagttcatcgcaatggcaacatttgggtcctacctgtccacttgtcctgagccggagccaggcaacctgggtctgactgtctaccaccgggcatttctcctctattccttcctgcgcagtggggaagcactgaaccctgaatattactgcggtgagaggcacactgaggtgggtgtgggaaggagggaatatagaatgggcccagagatgatggggccctggaggactgaaagtgtaactggggctggctctgctggcactgttacctcacagtcatttcagcatagccccttccccctacagatctgtcagttggcagataaccagtttctccttccccatctccactggtcttccaggctctcagcaccgcctatttaatgagcacctggtctctgcaagcagcaaccctgccctggccttgcgccggaagaagcacactgagaaggaggtgccagccgacttggtcagcactgtgtccgtacggcttcgagagggctacagtgtccgagaggtcacactggccaaaggtaagggtcattaggccctgctgtaatcccatagatctctcaagaatttgtgtgtgggaagacccacatgtatcacacatgaaagagtgtcacattgaagtccttatcacttgagacagtgggttttgaattgtcatcagggcttaattctcttagcatggagcttcccaattctatctccttttgcccaaggtgaaccagctgagggtggtatagggtcctgaacttggcttagttttcagattgtttctacaaacttgtgtttgtgtcagtgggccaactctgggcctgaaacctgtggaaccatgcttggaacctttggcaggactgggttccatgaggtaggtgggggtttcagatagaactcgatcccaggcctagagtcctatgccttctcctaactggcccttccgcttctccctaaggagggtcccaattggaggtaaagctggtgctgctgtggaaacacaacatgcgcattgagtatgtggctatggcaccctggcccctggagcctgagggccctcgagtaacacgggtggaagtgacgatggaaggcggctacgacattttgcatgatgtgtcctgtgcactaaggcagcccattcgttcattgtatcgtacccatgttat

SEQ ID NO: 1316 - DNA, 2300 bp, Homo sapien
gttggcatgcagccccctcaggcgccccgagacctcatcttccggtgagtgccttcagtgttgacctaagtcctcgccgggccatggctcccagccaagaaataagtacacactaataggcgtgggcaggtaagttgctgccatatcctgctggctccttgcttgatttccctcagcaaacccttgaacttgctaggccatgaatacacttgatatgtgtctatagatgatccattggagtgtggatggctaatgagtgtgaggtatcacttaagggagttggtcaagttccattttcccttcgtttcctaggactcagttcctcgaccacccctccccatcctcagcctggatggaaccccggtacaaggaggcagctaaccactgtgccctgctgcaggagcatgcacagcggtgctatgtccgtggtgagcaggagggccgtgggagggaggagtggggccctgcgggagatacagggattacagggtggggactggagaggccattccagagctcaagcctcatggccccttccacttccatcagggctattccgcagcttgcagcaagcacagagtgtgacctcccaggatttgctgacagcggtagatgcctgtgaggagctactacaagaaatagacatcaccccatttctccttgcattgtgtggccacacttggggtttgcctcatgcacccccaagtcctggtcctctcagccctgggcccttcagcagcagcatggaggagggtgctgaacctcgggaacgagctatcctagcttctgaatccaggttaggattatacttgaatgatggataagggggtacacagaccaagtccctataaacaaggaccttccagtccaggggaatgactgtgcaaggtagtatctaagcacctgagaagcagtagtgctttgtcgccggctcacggactcccatgcagccttcctcaccaatttggcacaggcagcagtctccctcccaggctctccccatctcccctgctttggtgttgagtgatgagctgagtcagggatagggagtcccctggtgctaaccgtgaacgtagagacttgttctgaggacatccacacaatagtaggaatctccccaaccaatctgtgaatttcatgggggccaaaactgtattttgctcactgctaagtccccagctcaccttaggggctcagcaggtccctgttgaagggaggaaggggaggagagaaggagaaaggcaagcaggcagacagctatgggtctagcatctgcagtgtgttagcgttggggaaacagaagaactagaaggatggatatgctgatgactcctagattggaactccggtccggttctttctctggagctctagatactcactttttgtgccccccaaatgaatgcattttcttcccactaacccttgatttttcttcattcatggtgaaaaatatcaccctcaatctagtgatccaagtcagaaaactgggagttatcgctactctgtttcatagaaatccccatccatcaagaaatatgaaagttaaggctgtaatatgaaatattacagtcactcactcctgtaatcccaacactttgggaggctgaggcgggaggatcacttgagcccaggagttcaagaccagcctgagcaaccaggggagaccttgtttctacaaaagaatttaaaaattagctgggcgtggtggcatatgcctgtggtcccagctactcagaaggcaagtggtgatggcgccactgcactcctacctcagcaacagagtaagactctgtcccaaaaaaaaggaaagaaaaaagaaaaagaaatatggaggttaaagccaaaatgtgtaggttggttctctttgcctcttttaccacccatgccattacgctaagtactcttcctgtggacaaaaaggcttcctgtgctgctccccagttgagaggcaggctacttcagagcttgatggttcttaacacttcaacatccttaccccaaccattcagcatagagaccgaggacctaagcgagcctgagtttcagagcacccgtgtccctggcattccagaccctgggccagagatctctctgacagatgtctgccagctcagaggagaggcccatggtgcccttcatagcgtcatccaggtgggaagcttgggtgagggtagaagaggtgttagagtcctgcctgtgcagagggacaggattctctcctgggcggggggtatgcatgtgtcctgctctagggtagggagtagtatcctgttgaggggtgactgacattctaacct

SEQ ID NO: 1317 - DNA, 2300 bp, Homo sapien
cttactatgtgccttcacttccatttttcttgtcggatcctcacaacagcttgcaagataagtagagcttttacagtgaggaaggtgaggctcaggaaagttaggtaacctgcccaaggctccttagccagcccctggggaagccagggtctgaacccagacctctgaatcctcctagctcactgctgttccatagtgcccccatcccacacctttcctcttcccagtagcccttcctcattcactgcattgcccccagagtaaaacagaatgtggggatttgggttcccccaaaacaactgatgacattgtcctggatcggccagaagacactcggggccggaggcgtcacaaaaccgagagtgttcggactcctggtggagctgagcgggcgccaggctcagattctggagcccagagacaaaagtatgtgtgtggtggtggtgtgccctgggagggtatgggtgtgaagtcacagatgggccttggtctgtataaacatacaagtgtcatgtatggacatgaggctcttactcccactgtcttcaggcgccggacaacacagctagaagagggtgaggtggggacccttcatcctgtgtttgcccgtgttgctcagcgctggatggagtttatggttcagattggtgagaccccagcctcccctcccatccctcaaccccagcctggtctccatcctgcagctccacagtgactcctctgcctcctaggttgtgcctcagtgtccagaagctctgcccacatggtgtcccggttcctccttccatccatcctgtctgagttcaccgcactggtcacctcaatggctggagacaccagtgtccgcatctttgagcagcatttgtgagtgtagatcctatagaattgaagggaactcccctagacttcctaaaagctgggcctacaggaagccaaacctgaggaagctgagctaggagaggtggaaacaaggcccagggaggtgaaggctaggccagggagtggtgtcatggatggcctttctgtctgtcctccctttcaataggggttcagagccagagatcttcggcccttgttcccctgggcaactgggcccctctccccgccctgcagctgagcggcatctgctgcttctgggaaggaacttcttgcagtggaggagaccaacacagcagggtgagggcatggcccgggggggcggggggcgggtaggctaagagtaactggtggggtctccaaccttgcagaggggagggtgggatcaagggggatctgttcccaggcccctattgtgcccctcccccaccctgtagctgccaaagccatgcagcgcttcgagccaggaggtgatgggagctcagggcgaaatgctccccggcagaggctcttgctactagaggttgtggacaagaaggtaaatatggggccagggactgggtgggaagaggggttccgtgatctcactgaccctgacccccgacctccagctacagctgctgacctacaactgggctccagacctgggggcagcattgggccgagcgctggttcgcctggtgcagtggcagaatgcacgagcccatctcatcttctgcctactcagccagaagcttggcctcttccatcattatggccagttggacttccccgtgcgagatgaaaaggtgcctgctgctctggttcttcctatagttttggctactgaggggtcagttaaaggaaaaaccagctcagaagccagaaagatgggacagactgagggcagaggtagtggggagggagagtctgagagaggaagccctgggatgagagagagggtccgagggcaaaggctatgaacccattgcaatgctccatctctcaggagccaaacccattcctgctgccgaccatggaagtggagaccctcatccggagtgcaagtcccccgctgagccgtgagcagggccgactgagtgggtcctctcgtggtgggggtcctcttcccctggacacattcccctttgacgaggccctaagggatatcacggctgcccgccccagctccgtacttggtcctgtgcccagacctcctgatcctgtcacctaccatggacaacagttcctagagatcaagatggcagagcgcagaggtgagggtactgggccaggcagcagggacaggaaatctgtggagtctgggaggaagggagtgacaatgcctggggctactactaatgccctcaaccctcagagctggagcgccagatgaagatggaaaacctgtttgtaacctggcagcagcgttctaccccagccac

SEQ ID NO: 1318 - DNA, 2300 bp, Homo sapien
atgcctggggctactactaatgccctcaaccctcagagctggagcgccagatgaagatggaaaacctgtttgtaacctggcagcagcgttctaccccagccaccatgcccatcagtgtgagtgaccccagcttgcatcttccttgagtatctgtgatcctgccccgtcactgctccatgctcactgccctgtttccccaggctggagagctggagaccctgaagcagtcatcccgcctggtgcattactgtgcaacagccatgctcttcgacccagctgcctggctgcatgggcccccagagacctctggaccccctgacgggcaggtaaggctgactcccagacttctagcagacctttgcttaccccacagtgacccccctcctccatccccagcaggatggttgacagtggggagagtcttccttgatctttactctcatagcggcgccatcgccctgagtcagggtctgggagccgagaggcccccacaagctgtgaatccttggatgtgtcgcccccgggagcccgtgaggagccttggctgaaggagctgagcttggctttcctgcagcaatatgtgcagtatctgcagagcataggttttgtgctggtaccactgcggcccccctcacccgcccgcaggtgagcccgtccctgttttcccttctgtcttctcctcctgcactgcaagtgaggccccacaggcccttcctctctttacaaggtcctatgttgacaatttgggctgggcctgtgcatgtttatcccaccaggcttgcactcatgtgagggtctcagatactttcacacagccctcatgcgtgtcctgcagaccttgtatgctttatggaactcatgatgacactcatacaaaactgtgtccattttcacaaagctcatgcccacacacatcttgtacacttacacacttgcatacatccccacatgtgaatttttttggagatggaatctcactgtgtcgcctaggctggagtgcagtggcgcgatctcggctcactgcaacctccacctcctgggttcgagcaattcttgtgcctcagtctcccaagtagctgggattacaggtgcacgccaccctgcttggctaattttttgtattttagtagagatggggtatcaccatgttgcctagactggtcttgaactcctcaactcaggtagtccgcccacctcagcctcccaaagtgctaggattataggtgtgagccatcacgcccggcctgcacatgtgaatcttgtacatgctcctaagcctctggatctaggacttaatgattcctgtccttatcatcccactgacctctcctgagatttgatgtagttctcggcccagggaagtccttttctcaccaaggacctctgtgctaggcctacttgcatcactgtccttggcctgttcttggtcatgttcacccactggccagtactgacaggtctgagtcttgggaagtaggcagcccgtctgttgccacctccatctcccctgagctcagggacaactctgcagccaccttttcatccactgtcaaatctcagattcccgtgtttgtggcccctgctctatgttcctctccagattctgtgttctctgccctttcccagtggctgtatgcgaaaaatgagctgttcaccttacacatagctactttcgtgtctccagatttgtgagtttatcaaggcatgttctccctcctctctgttttcagttagaaccttttcaagccagtagtccagaaatgccagttccaactctctcatgtttctgtgaccagctccccactccccaggtttccctctcttccaggcattaggaagagaaggcgtgcctgcccctcctgtgatcccatctcagaggccaggctggcccctcctaccctggggaggagctgcccagcttgctatcttgacagccagttcccagctctaggagcttctctaaaggactttagtttgcacacttgccataagttatgctctttcccccaaatctgaattcctttagacactgggttaaaaaaaaaaatgtttctacagcaaaatttaaagccaggtcttcccttcccaccaatctttaacaatcaccaatcactaagtcttgtcccagtttccttgaggtttaaatgggacattttttccaccagaggttttgacccccagcaagaattctggcagtttatagccccttggcgtgagtgggtccccccaaccccttctgttctgtcccttcttcccagtccctcccctgcttcccttctcccctatcctctgcactaaac

SEQ ID NO: 1319 - DNA, 2300 bp, Homo sapien
gagctgcccagcttgctatcttgacagccagttcccagctctaggagcttctctaaaggactttagtttgcacacttgccataagttatgctctttcccccaaatctgaattcctttagacactgggttaaaaaaaaaaatgtttctacagcaaaatttaaagccaggtcttcccttcccaccaatctttaacaatcaccaatcactaagtcttgtcccagtttccttgaggtttaaatgggacattttttccaccagaggttttgacccccagcaagaattctggcagtttatagccccttggcgtgagtgggtccccccaaccccttctgttctgtcccttcttcccagtccctcccctgcttcccttctcccctatcctctgcactaaactgtaacgagcagtaggcctctgaaagcctggaactgccatcccccccaatcaaaagacagcagctttgccctttcagaggaaggtacctaaccaggcatcaagcatctccttgaattttcctaatcaaattgtagacaggcatcaccttcccccttctctttcctgcccagcacacaccctctcagtagcagaggcttagtctccacctccccactgagcactgtttttgcctcccttgaagcagcagctgctatggagagagcccagccttgcagtctagacctggactccaagcccagccttgccactcacagtggcagctttgtgggtctgtttcctcccttgcaaaatgattccatataaaacagattctgggtctgatcaccatgactgcatgccactagcctgcctcatcctcttatccctcctccttttctatagcaccagccggccacgggccatggctatccttggaacagagggtcgaggctccttctcctgccctaaaaccaagactgatgggagccccaaggtaacttgtcatataatggtaaagttactgatgctaaattactttcccacggcctgaggtcattgaccctgagtgatgtaccgaggtcactgatcccagactgacaccattaaagtcagggtccaagggacttccaccctactgattcgaggctggtgagcccccaaaccttgcccccttttttgtttcttcagagcactagctctccggtaaccacctaccacctgcagcgggcactgcctgggggcatcatcctcatggaactggcattccaggtaagcaggaggagcactgagtggagacagccagacccacctgtctctcgccttcctgatctcatcttcaccttccctccagggctgttacttctgtgtcaaacagtttgccctggaatgttcccgaatcccaatggggcaggctgtcaactcacaggtatgtgaatgagctgcgggcacagtcagtgcaccccagtgtgctgtgggcagcatggctccatgtcccatttgctgggcagtagagtaatgcagtaggcgggctggcccagtgattgattcactgctatggcctggctaggtcagtgctcattctggtgccatgactgcactcactacaaggctgaccccatcggtcatccaaagcgtgttcagctgtagccctgaggcagcacagtgcctggtctggcctgtagtcatctagagtctgtggcagaccctgatggaatctgggatagagcaaaatggcccagtttctgaaaatggccctagtttcatggagatagttacaatacagtatgaaaaagggaggctagaatggggaggccttcccacagaaaccattctggcagagggcgttccactaggccacagcagcaggggaaatcttgtgcttcttcccacggaaggagggaaatgtgttttgggcagccagtgcagccataccttaaccctgtctcctgctgctgcctccccagctgtccatgctgttcacagaggagtgtgacaaggtgcgggacctgatgcacgtgcactcgttcagctatgacttccatctgcgcctcgtgcatcagcacgtgctaggtgcccatctggtgctgcggcacggctaccacctcaccacctttctgcgacacttcctggcccaccaccctgacggaccccactttggccgcaatcacatttaccaaggtcagtgcccaagggcaagccagtgaacccaaaaaagaacaggccacaggtgcctccaggtcagggctggtgggaccacctccctggacaagtggtcccatgttgttaatcatctcatgtcacacataccacgtccccatgtttctgtcctgtgtctgtttcttaccagagtttggaccccatgtcacat

SEQ ID NO: 1320 - DNA, 2300 bp, Homo sapien
tacaagttgttgttactttaaaatcacacctgtgcaaattatttggttaaaagtcaaatacgtacctgtgaagtgtgcacaataaagcaaaaaaaaaaggcaaatgcaaagaatcaaaacttgtgataacttagtgtcatgcctgtgttgcaaggtgggataagacatagtcaaaggtgaataaagcaaataattttcatggacattgcactccttatatatttatttgagcatattatgtgaaggtggaaggtgttgtaagggaattaaggggaaagtgagtcacctatgtctagtttatgtataatctttactgccctaaggcatgtccaaggaaaaaaggggtggacaatcgggagttggacacattttgtttctgacgcagagctcagcagctgtcaacatcataaatagaatttgcatactcggagatcaacagtgaggtggtaataaaggaattacttcctctagatgttactctttgttgtcaattttggattgcaaacacactaaagttgggactgattacaatgttaagcttagtgaggtcttgattggacgagaaacacgttccaagacaaggcaaaggtcctagtgtaaaaccagctgcaaaagagcatgaaatcaggtgatcagtgtcagctggcagcagtctgttcttggaggcagagctgaagaaacagaacctgccaagaatttgggttcaccacgggatcaggctggatccctggtgtctgagctggcctcatttgagatggagttgagtgttgacagaacaatcagtgggagctgggtgttcctaatgttgcactttaagcttctctgtcaaagttagcacagacgatagatcaagatgacgtttactcatgaattgttgggatataaatttatatttttcaaaggaaatttaagatatcaacaacttaaatatgttcctatttttgaccatgtaattctacccataagaacctgcccaatcagttgggttattgtagatgaaagtaaaatcattcaaattatctcaagaaacattaagaggctatacagagacagaaacccaggaaagtctaagcatcccagccttaagtgcacagacctgggggcagctatgggtttgggcacccttgggatgacatgggtttctcagggtgctacctctattcacaggacttggttcccctcctttccgctctagcttttctttaccataggactgtcttatttcgtttctacagcccagtcaccttctggcaacaccacctgttgactctcagcatttccttgtttgaactcttgattggttaaattacctttccaaacgacgcaagtaagaggtttttggccagtctatggattggctgccctgggatcagatgacctccctggtccaatcagctgaggctaaggctaaaaagggacagctcacccatagctgctccaatggggcggtttcccttgcaaaagactagcggcgtgaacgggcaaacactgtgatggacatctctagaaaaagactcggaaaagagtcagagatagggactaagaagtgcctgaaagtgcgcttgcagcgcgcgtgcacacacacgatatccaaccacaaagtacaataatgacttgctgcttaggtgtgcgacaatgagcagcgaaggcactgactttgaaggctattggaaaacacgaggaaatgctcacaaaataatattccatgaaaaagagctataaaacagcatataccgaatgatcagaatttccaaagaaaaaaattgcatattttaaaatttggacgggaaagccaacaggctagtggtgtgataactggcggtataaaagtgcttctttatttggtcatacagctttcaaatgttgcttaacgaacagatagcatttttataatcagaggaaagactcagtattaaagtgcgcgtcccatcattgcaaccgggccctcgggcagccagctctctcttgcttcgcgtccggctctcaggccctggagctcggcctccctaccttctccaggcgcgggtcctgctccttttccggccgccctcgctccgccccttcgcctctccccgtgatccctctctcgctaaccgtaggcgcttttcgtgaaggcccgggtttttacagcacttcgcttttctaaccacgaacagtgctcgttcgttcgcagggccagcaaggagagccccgcccccgcccgccgcccgccgcccgccgcccgccgcctttggatcccgcggactccgcccggcccggcctccccaggcatggcgccgctgcgcttctccgccaatctg

SEQ ID NO: 1321 - DNA, 2300 bp, Homo sapien
gatcataggcatattagctttaagagacaatgccaaattgttttccaaggaggttatagtgatttacactcctgttggcagttgttccaaatcctatccaatatttgataatgtgttttttatttttgccaatgtggaaggcataaaatagaatttcattgaggttttgatttgcatttcacatgagttgtaatatgttttactgcattgccaaatgttatccaatgatcaaatgagactctgaactctgtactaaagtttttgccattatccatgcaactatttacaagttgttgttactttaaaatcacacctgtgcaaattatttggttaaaagtcaaatacgtacctgtgaagtgtgcacaataaagcaaaaaaaaaaggcaaatgcaaagaatcaaaacttgtgataacttagtgtcatgcctgtgttgcaaggtgggataagacatagtcaaaggtgaataaagcaaataattttcatggacattgcactccttatatatttatttgagcatattatgtgaaggtggaaggtgttgtaagggaattaaggggaaagtgagtcacctatgtctagtttatgtataatctttactgccctaaggcatgtccaaggaaaaaaggggtggacaatcgggagttggacacattttgtttctgacgcagagctcagcagctgtcaacatcataaatagaatttgcatactcggagatcaacagtgaggtggtaataaaggaattacttcctctagatgttactctttgttgtcaattttggattgcaaacacactaaagttgggactgattacaatgttaagcttagtgaggtcttgattggacgagaaacacgttccaagacaaggcaaaggtcctagtgtaaaaccagctgcaaaagagcatgaaatcaggtgatcagtgtcagctggcagcagtctgttcttggaggcagagctgaagaaacagaacctgccaagaatttgggttcaccacgggatcaggctggatccctggtgtctgagctggcctcatttgagatggagttgagtgttgacagaacaatcagtgggagctgggtgttcctaatgttgcactttaagcttctctgtcaaagttagcacagacgatagatcaagatgacgtttactcatgaattgttgggatataaatttatatttttcaaaggaaatttaagatatcaacaacttaaatatgttcctatttttgaccatgtaattctacccataagaacctgcccaatcagttgggttattgtagatgaaagtaaaatcattcaaattatctcaagaaacattaagaggctatacagagacagaaacccaggaaagtctaagcatcccagccttaagtgcacagacctgggggcagctatgggtttgggcacccttgggatgacatgggtttctcagggtgctacctctattcacaggacttggttcccctcctttccgctctagcttttctttaccataggactgtcttatttcgtttctacagcccagtcaccttctggcaacaccacctgttgactctcagcatttccttgtttgaactcttgattggttaaattacctttccaaacgacgcaagtaagaggtttttggccagtctatggattggctgccctgggatcagatgacctccctggtccaatcagctgaggctaaggctaaaaagggacagctcacccatagctgctccaatggggcggtttcccttgcaaaagactagcggcgtgaacgggcaaacactgtgatggacatctctagaaaaagactcggaaaagagtcagagatagggactaagaagtgcctgaaagtgcgcttgcagcgcgcgtgcacacacacgatatccaaccacaaagtacaataatgacttgctgcttaggtgtgcgacaatgagcagcgaaggcactgactttgaaggctattggaaaacacgaggaaatgctcacaaaataatattccatgaaaaagagctataaaacagcatataccgaatgatcagaatttccaaagaaaaaaattgcatattttaaaatttggacgggaaagccaacaggctagtggtgtgataactggcggtataaaagtgcttctttatttggtcatacagctttcaaatgttgcttaacgaacagatagcatttttataatcagaggaaagactcagtattaaagtgcgcgtcccatcattgcaaccgggccctcgggcagccagctctctcttgcttcgcgtccggctctcaggccctggagctcggcctccctaccttctc

SEQ ID NO: 1322 - DNA, 2300 bp, Homo sapien
gggcgggacagaggaggctcttagttatatggatctggagctcacaggagcggcccagactggagatagagacttggaagtcatcagcatatggttggtagtggtcaagatgatccagagaaaaggggcagagcaggagaaaagaggaggcctaggacagagtcccggaagagcagaagacgaggtggtaaaggaatcagagacagtagccagtgaggagagggtgggccaatgaagccaaggaaaagaactgttttaataactcagcaatgggcaggaataattggctgaaaagtatacttttaaaatttgggggccgagagggaatctctaaatcctcaaagttctggaaaaaaaggcaaaaatgcttaaagatgcataaaatttgcaatacctcccccgtggtgcaccaaaattaccaatggtgaaaaaccactcactggaaatattcatttttgatccgtttgtcatccaaaccaaattgtccagaatcactggagccagtcccatcccctcctcatacgccagggggcgcacacgcactgtttgtgaattcaagttcaggacaaaaacaggcagtgaatcaggtggttaccagaacctgattcctcagcccagatccctgaacaccacagcaaccatgccctgcacattaccacgtgatccctgaatccaggcacctcaacgatctccaaattttatttctcacctgactccaaacttacagggttatcagaaagaccccacagaagaaaccccacagaggagaaacctcatctctttttctgctcagttacctgacccagggcagtgggggtaggtcccccatccttcatggtgaagcctagcaagcggcggggggaggaggggtggggtagataggaaagagctggtgtggctttggctgactcttaagtggttttaacacggattgcgtgggggcggggtctggaggcaggggcgcttggattgaagctcatcaaatccctctgatcagtaggtcttggaataaatcttcaggtaggttattggtttcacccagaaatttctagggtcattatttgagtttggtatgagaagtcagaaactcagtactgacatttaaattacatttagagggcattatcatgtctttaattccgaggccaatgtaaggttcacagctggaattggtataatattggggtattagtcagtctctgcttggggttgacactaggtcagagaagtggagggtgaacatgaggatgaaggggctttgtgtggagtttctgcaaagccagtcttatcttgggttccaagattattattaaagctgggttggtttagggtcctaaatggtctcaagtttgggtggggtttcaggtcagtatctgtgtttgggggtccttttatggtgacccaatcccaactctggaattgagaatcgaattcagagtgcattggtgttgatctgggaatgggagagcagtactggagttttatgtaaggcttggggttcagaagagagataactggggtccatagcaaggtagcttttggactttagggttcatttagggactgggggctgagcattagtacagggttccatttaaggtccagcgttggtgctagcgtcactatcaaggttagggcaagtagaagtaataaagagatttagagtcagaattggtatttgggatcagtatagaggttcacaacaaaattactacttgtgctaatttgggggcagattaagggctttggactcaatattgggtttagggcaaggtgtgggctcagtatcaggttcagatctgtatggggaggaaatggggtcctagagtggtattaggttcatgctagggctgggagccactagaaggatctggatgtagtatcagagtttggtctgtctatgttcattattggggttcgggttcaatattgaggttccggtcggtttcgacttggcgttgggttgtggcctgtctgggcctcagcggctccgcggctctacgagcgagagtgcacgaggggaggggcgccgccgggggcgcgcacggcaggggcaggggcgcgggcgcgagcgcgaggggagcgcgcggctggagctggcgcgggagcggcgggagcggtggcggcggcagaggcggcggctccagcttcggctccggctcgggctcgggctccggctccggctccggctccggctccagctcgggtggcggtggcgggagcgggaccaggtggaggcggcggcggcagaggagtgggagcagcggccctagcggcttgcggggggacatgcggaccga

SEQ ID NO: 1323 - DNA, 2300 bp, Homo sapien
accattcaggccctttctgagtagctttctagtcaaccttccagatgtcagctctggctctgttctgggggtgtatctggttgtcctggttgttctgggctctgtcccagtgtgagtgtagagtgggttctgggagctgcagttggtgaatctgagtctttatttggttgcctgataggttgttttgaggtcagtttgatcccagactgacgtggttcaaagttactgtttggcttttctaggatcctgccctcatgctgttctgtgtgcctcagggtctttgcaaatgtttagtcttctaaaatggcccctggccactttgggtacacacctctttccaggtgtggcttctgctccatgtagggcctgtctcagtctccaagcacgagaccctgctgtggctgggtgtggcagcagcgcctggccagcttggggggcctttcccattacccagttccctgccttggactctgcccctctgcccagggtctctgcacaatggtgcagccaaaaacctcacttgaatactgtgaggccctgcgggcatctctagacaaatgggcctttaagtttggggcctggaagctggtttgtctggccagacctgctgggcagcctgtatgctgggagcagcagctgctggaaactcagcttggggagcggggagggaagcatgcagagagggctgcgggttctggtgcaggtaggtggggcagtggaggctgggtcgccaagctggcgagggccatcttgggtcagttgggatggccttcagtcggtgagagtacccccatattggcagaggtggttagtgcaacttgagggtaattcccaggtgcagaggtgtgtccttgatttcatgatgagggtcagtcttgggccggtgaggacattcccacgcaccaccctcccactgtggtttctttgtgtccgttataggaggagccaaggtggcagagtggtgtggggtggggatcactgtgcatgtgggggcttgaggtgagaagcctgctgcaaggtgcagcttgcgtcgagtaggccaaacagctgagcttccgtgaagtggtgatgaggtggtatgggtgtgtctgacccccacccccacccaggatggtacccacgctggtggggactcaataatggctctagaaggaaggggctgggctctgtcgctgcatgtgtgccagcggaggaggcatccaggggcacgccttcattttaaaaattatagagtagagaaagtcaaaaataaatattgcttctgaagcttctttgaagactggcatgtatgttggggtgtgttcttccaggctgggctgttttctttgaactcattcatgcgttcatccactcattcagtgtatgctgactgagcacctactatgtgccagctgtcagccaggcgctggggatacggaaatgagctgggcagccacagtccatgctcctatcaagcttatggtagtgactcagtaattgtaaaaatatataaatagtcatgtttgtggtcacggctccaagccaaggtccaggcaggtagtctgggacattgtggaaggcttccctgagaaagtgccactggacttgagatccgagggtaagttggccagaagagcatgggtagcctgtgccaggcagtggcattcagcactggcaaggctgggagacaggaagaaatttggcacatttgaggatcagaagaggaagttcccgttctggcaggaggagagcatgggcaggtagggctgcagaggtgggaggggccgactctgcttggctctggggtcatgctgaggagctgggccacagagtctactgctgaggtcagggacttggtctgtgtggctcacagctatatggctggtgcctggaaggacgcccagcacatagtaggtgcttagggagtatcaaaatgaatgagcgagggagtgaagggaaaagatgggcatttttaccagatggggatggttctacatgaacatttccataacctgcttttttttctgcataaacagcaaatttttaatgtctttctgtgtcaatacatatgctgttgtgatgaaattcttgatgttttctcatgctttcctttctgtccaggaaggagtggaggccctggtgcccggcccttggtgctgagtatccagcaagagtgaccggggtgaagaagcaaagactcggtgagtgtgccccacagagtggccaggagcaggggtgcacaggggtcctatggaccaggctgagcagcttggatttgatgcagggtcagtggagagctatagagggggtgtcagcagggg

SEQ ID NO: 1324 - DNA, 2300 bp, Homo sapien
cccagggtcacataaaaataaatgacagagcagggacttaaacccagtgtggtctgaatccatatctcaccctcaccactacatagtaccagaccttcaggtttaatagcctcccagcaagaagggtgtggtaaaatagtaggggaaagtgtgttctctctgccctgatacctggggacaggcacacatgtattacacatatgtcacatatatgtaaccgattctggccaggcacggtggctcattcctgtaagcctagcgctttgggaggccaagttggaaggattgcttgagctcaggagtttgagaccagcccagttaacgtagtgagacccccatctctacgaaaaaaaaaaaaaaaaaaaaactgggcatggtggcacacacctgtggcccagctacttgggagggctgagacaggaggatcacttgagcccaggagggtgaggctacagtgacgcagtgagccatgatcacaccactgcactccagcctgagtgacagagcgagaccctatgaaaaaaaaaaaaaccagattccttcctggtctccccgctgcaattctcaacagcctctgatccattatctgttttgcagcttgagtgatctttaaaaaatgtaattcaggatcaagtgactcccttttaggaaagggagaaacaccttccagtggcttcccgttgttttaggatacagatcaggatcctcactgtggtctcccagggccactggcttcccaccctgtcacgcgccagctgtccagacacatgctgctttccgtttgccgtgctccttgcctggccccttctgtcactggctccatgtacccttccaggcctcagcttggtgatgctttccttccctcatcaccgcatccaaggagattccctggatcttactccacctcagcaccctgattcctgctgtccttgcacatggcagaatcatgagtacgatcgacttgtttattgattctctcttgtactgaggtgtaaactccatgagagcagggatgtgactgtgtggcattgtagccccagcacaatgtctggcattgagtgggtgcttgttaattatttgttgaatgactgtggactcaggacctttccacttcaatttgagccaagctgcagggtctgtggggccagcagccccatcactctttctatccgggccagtccctaaggaaatatctccccttcccctgcctattacacatactttccaccaggtgggctcaggtgacctgcagaggcacatagctgctacccagtctgggtgtctttcatctacatgggactgcaagggtcacatcacctccaggtctgtttgttagatgagtctggtgtgctgatgggagggtccagtgaatcccacagttgatatgtgtacatactaaatgacccaaggccctgggtggggcactgacaggcctggccactgtccctcacttgtgccttcagaggtcaccataagcttttccagccatttttcaaggtaggctgtgggtatcagccacactcaggtgaccccaccagatatcctggataatccccaagtctagggttggttcctaaggatcttgacctcgggcagctttgagccttccactttgtctccagctcttccaaagcctccgattgatcttgtggtgacagagacaactgccaccagtgtcaccctcacctgggactctgggaactcggagcctgtaacctactatggcatccagtaccgcgcagcgggcacggagggcccctttcaggaggtggatggtgtggccaccacccgctacagcattggcggcctcagccctttctcggaatatgccttccgcgtgctggcggtgaacagcatcgggcgagggccgcccagcgaggcagtgcgggcacgcacgggagaacaggcgccctccagcccaccgcgccgcgtgcaggcacgcatgctgagcgccagcaccatgctggtgcagtgggagcctcccgaggagcccaacggcctggtgcggggataccgcgtctactatactccggactcccgccgccccccgaacgcctggcacaagcacaacaccgacgcggggctcctcacgaccgtgggcagcctgctgcctggcatcacctacagcctgcgcgtgcttgccttcaccgccgtgggcgatggccctcccagccccaccatccaggtcaagacgcagcagggaggtaggtgggggcatgccggctgggcagccaacagcagagaaggggaggctgaggttgtggcggtgcctttccccctccctcggctgtgaggctggg

SEQ ID NO: 1325 - DNA, 2300 bp, Homo sapien
gcagttctccatatgtggctgtgtgtgcgggtggcagtgggatggccacgtgcttgtgtgtatgtgatatcgtgtatgttttgtgtgagacagcatatgtgtgggagagacctcgtgtgagagatgctgtgtcagaactctaagacattgtgtgtgagagtgtgtgtcagatgccatgtgtgagacaccaagacacgggtatgtgatactctgtgtatatgtgagtctgtgtgagagacactgatactccaagacattgtgtgtgtgtgacactgtgagacaccaagacagtatatgtgcgagacagcctatgtatgtgacagtgtgtgtgtgagacaccatgagagactgtgtatttactgtgagagactgtgtgagagacacgtgtgagacactgtgtatatgacactatgtatacgtgagactgtgagacactatgtgtatgtgacactgtatatgtgtgagaccgtatgagacagtgtatatgacactgtatatgtgtgagactgtgtgtgtgaaacactatatgacactgtatatgtgtgacactgtatatgacactatatgtggagactatgtgtgagacactatgtatatgtgacactatgtatgtgtgtgacactgtgagagacactgtgagacaccaagacagtatatgtatgagacaccctgtgtgtgtgacacagcgtgtgactgtgtgagacgtgtgtgaggcactgagactgacactgtgtgtgaggctgtgtgagagtcagtgtgtgtgataactgtgtgtgtatcaccgtgtgtgtgtgtgagagagggaaggagagagagggaggcaggtcagagggagtcaggtgtccttggcgagagtggcagcagcctgcctggagggaccctgggatggccatttcagcacctaaggggtagcctgcccgggtgagtctccagtccactgtgactcagtcattgtgcctgtgatccccaccctccatctgcttgcttcccccccatttgtcttccccagccccctccgcccctccccagaaggtgatgtgtgtgagcatgggctccaccacggtccgggtaagttgggtcccgccgcctgccgacagccgcaacggcgttatcacccagtactccgtggcctacgaggcggtggacggcgaggaccgcgggcggcatgtggtggatggcatcagccgtgagcactccagctgggacctggtgggcctggagaagtggacggagtaccgggtgtgggtgcgggcacacacagacgtgggccccggccccgagagcagcccggtgctggtgcgcaccgatgaggacggtaggcagtgccaccggggcgggaggggaggcgttctgcctcagacaccacccaccaagctccccagggccttcctttcctgaacacaggcccaggtcaactcatctttctggttcaggtgtaatggcctaaagtggggggatgtcacttacgggataactgaggcccaaatcccagcctttggggctgtctccaaagcagctgaaaccttcacaggctaagatgggagaagcagccctgtctaagatttgaaaggtcaagattgggcagattggtgtaaaagatactcaaagtagaatcagcaagactccacgttggctggacattggcatgattggggcctaggaggagtcaggacaggttgtgctgactaggggtggtcaaagacctggtgccccacctccacctgttcccccatgtcgaccctccccaccaagtgagaggcctgggccagaggggtgggcagggccagtcctgggctcttacccgtggcgggcagagggagccttccgtgtgcctcaccagggacagatgatctaaggaaactgtatcagggcctttcctgggggagtggggtgctgaggcaggaccctcaagtttgctgtgcccacctgagctagggttgatacctccaggcctgacttccttctctacctgaccccccagtgcccagcgggcctccgcggaaggtggaggtggagccactgaactccactgctgtgcatgtctactggaagctgcctgtccccagcaagcagcatggccagatccgcggctaccaggtcacctacgtgcggctggagaatggcgagccccgtggactccccatcatccaagacgtcatgctagccgaggcccaggtgcagcattgggtggtggtggggtggcagggtgagcacagaccagcatgcacaagctcccttttggggcccagatatgtccctcttcccctgcctgccctcagcagtgctgtgactgcctttcc

SEQ ID NO: 1326 - DNA, 2300 bp, Homo sapien
ccaacccctggactctaaagcctctttcatccatgtgactggtggttgatgagccagctctgagccttgctgtggctgtcagctgggacacccaacatgaggcttcttcaggtggcctgggcttcctcacaacatggtgactgagtttcatgagcatgtgtctggagagtgtgccaggcagacctagcaggctgttgcaacccagcatgattagatctctgaagaatcaagcaccaggatgctgggacctggagtgcagagaagcctcttcggggatgggatgctgagccatgtggttattggtctggaaaagaaggatgggagagagctcctcagtggaagcatgtgcagaagcttgggcagattgcatgtgcgtcaaattatgagcacctgagggtttctgcagcatgagagttaggggcttggggaatactgagccaagagaagactggagggctaggcagaggtccagtcaaaaggaccttgaatgtcaggctaaggggcttagacttcctcttcaggatgccagggaggtaggtattaaaggttttcagcgggggagccaggtggtcagaaccatgctttagaaatgtcactctggctccttgaggagactggattagagaggagaaattgaggcagggagaccatttaaaaggccagcaaccaagtgaaaggtggcagtgggaacagaggggacagacttgggaaacgtgaaggaggtgaggacagcagagtccgggcttaagcccacttggggagaggtaagggtggctctgcagttgctggctgaatgagcagggggtaggggtgtcctggggctggtgggtctgtgggtctgaggacttctgagctgacatcagggctgaagccctgtgggaggggccaaggagcatgtggtagtcaaagcctgagaatagatgggctctcccagggtgagggccagaaggagaccgggaccaaaaagcccagggcagggaaggtggtgcagcattaaggaaagatggatggagagcagctagggagattgagaaggagcagccacagccagacgagagcaggagcgcagtgtccctgatgccagggttgggggagttgtgcaagggacgagaggacttaatgaggtagggcagtggggacacccagtgggaggaccgttggctttggcagatggggccttgaagagagggtggtggccacgtcctgtgggcagaagtgttgcagtgagcagcgtggcaagtgggggctgagaaagtggagaaacccctttcaaagatcctgggaagatacctgggaaggaggcaatgagcagggcacagtgggagagtagagggtgtgggatctgagaaggagggctcttttttccaacgtggaaatcatctgaaaatcgccaagggcaaattttggtatcaaaaggggcagggctggtttggacttaagtatttagtcatagagccccccaaggctgccgagccaccagggtttagaagtgctcgcctctgggggtgggacacccagtctgtattaactgggagacagaaggagccttgacggaacttgtccgcagccccagcccctcaccgccccctcctcttctccgccagcccctcgcaagcccgctcggcacctccactgtgtgtgatggtgctgtaagcagaaaaagttaacgggctttcttttcttgccccgttgtttttttcgtttgtttgtttgtttttttctctgcaggttccagtgtccccagttgcccgaatacctcaagttagttttcaaagttcccgtgtttgggggatactttggcttctgtgtctgtttccactccttacttttgtttaccccatcgcctccatccttccttgaattcttctctccccttccctttcttctcccccaatcccactgtctcctaacctttttccttccctaccctcccctctgcccaccttgcttcctccaggcctgttttctctcccaccggccccgtctctgttctgcctctctggcctccagtcccggcctgacacccttccttctgcgtgcctctacctctcatctcctctcctctgtctcacacccccctcctggtctctgcttctctctctattgtgtctgtacttcatgaccactccatctacacacttggtgcccgggatgacgatggctgtgagtctcccatggtgactgccaccggtgaggggcaggagggctgtctgcaggcagatgcgatggagcccagctcctgtcacgtctgctgccaccgacctgggcgtcccacccctcctgggaggaaggaagcctct

SEQ ID NO: 1327 - DNA, 2300 bp, Homo sapien
gtgacatagcttgaggacctgatgtggcttgtggaggacagggggcaatggatctgagagctcagggctggggggctttgtagccagaaaggctacagccagggagttgaccagcctccaccctgcttctgcccgtctgagcctgtgggcttccttcagcctgccctgctcatcctcctgcaggtaaaatgtgatcagtactggccagcccgtggcaccgagacctgtggccttattcaggtgaccctgttggacacagtggagctggccacatacactgtgcgcaccttcgcactccacaaggtatagcctttccccagtgcatatctcttacccagacactgtaaggacagtggcctgggtgtggtgtgctgggtcggggggaagctggagcctgggtgttggagggtcggaggctcaggtgtgtgagtgatgtgatgatccatgttatgggaacagtgctaggagcttcaggctactctgtgtggcttctgagtcccatggggaagtggcgggtatggcctcagcatcaggtcattcagtcctgagtctatggcaggtaggctcctagtcgccagtatgtccccactttgtcccccagagtggctccagtgagaagcgcgagctgcgtcagtttcagttcatggcctggccagaccatggagttcctgagtacccaactcccatcctggccttcctacgacgggtcaaggcctgcaaccccctagacgcagggcccatggtggtgcactgcaggtgagagggtacagtgccacccagaggggtgggtggggtgggaggtgggggcgcctgtgcctcaagctgagcccgtgtcctgcagcgcgggcgtgggccgcaccggctgcttcatcgtgattgatgccatgttggagcggatgaagcacgagaagacggtggacatctatggccacgtgacctgcatgcgatcacagaggaactacatggtgcagacggaggaccagtacgtgttcatccatgaggcgctgctggaggctgccacgtgcggccacacagaggtgcctgcccgcaacctgtatgcccacatccagaagctgggccaagtgcctccaggggagagtgtgaccgccatggagctcgagttcaaggtggggctcgggtgggcctgcttggctccagggcctagactgggtcatgcagatgacccccacccccacaggaagcctggcctgaccaatccctgcctctcaatagttgctggccagctccaaggcccacacgtcccgcttcatcagcgccaacctgccctgcaacaagttcaagaaccggctggtgaacatcatgccctacgaattgacccgtgtgtgtctgcagcccatccgtggtgtggagggctctgactacatcaatgccagcttcctggatggttataggtcagcatgcatgtcactgccccaccatgccctacaggggcctaggcctgtgcctggctggtgggggtgggcagcagagtagggccagcctagaagaccagagagggctgggtagagcagtgaggacttcctggaggaggggtgatctgagcagggccccaaggggctaggcagcctaaggggagactctaggggcagcagcacctccagcatgtccagtcttatgtccaccccagacagcagaaggcctacatagctacacaggggcctctggcagagagcaccgaggacttctggcgcatgctatgggagcacaattccaccatcatcgtcatgctgaccaagcttcgggagatgggcagggtgagcccaccctttcccccagggcccctgtcatacctgggagaacaccagccacccttgggggagctgccgcctatgttactgtctcctttgacaccccagctgcttgtcagcatggcctcaggcgcccgttattactacctgaggcatctgtcccagaatcctgtgaagcctggcacccctcccctattccttctcacctgattatgggggcccgaccctctgtccacaggagaaatgccaccagtactggccagcagagcgctctgctcgctaccagtactttgttgttgacccgatggctgagtacaacatgccccagtatatcctgcgtgagttcaaggtcacggatgcccgggtgagtgagtgcattgagtgtgtccataacgctgcctgtccacacgctgggtggatggctgcctgcatggtaccttagctcaagcttcagaaatctgaggcggtgggtgggtattagggtgtgagcacatctccccctgtggcctcgggtgcagtgacacagatgca

SEQ ID NO: 1328 - DNA, 2300 bp, Homo sapien
gggcgcctgtaatcccagctactcaggaggctgaggcaggagaatcatttgaacctgggaggcggaggtggcagtgagccgagatcgtgcctgggcaacaagaacgaaactccgtctcaaaaacaaaaaaacaaaaaagcaagcaaacaaacaaaaagtgtgcaaagggaaaggtgagcttaaaaaggaaacaggaaaactggtcagaaaaatgggagcatatcacgagaacttgatttaggctccacctatcacatgcacataccaattggaagctagtgatacacagtagagggcccttggaaatcatctggcagcaccaggaaatacagcaaaatccagtttatggaacacagtaacagtaactagcgactgtatccatgtccaggacagtggagtctgtgaagcaacctgcagtatcttgtgcttagtggcagcaggaaagacagtggtggatgaattctaccgcaggatttgggttttctttatgtgtcctgcaagttggattcttcagactcggcacttttgtgagccactcagtataatctattatctaatactgtcgattaccttactgggtaagggcaaaaacccctattgtgaaagacttgtggctgcgtagccaacggccattctttttgaaacagtcatttctgtttttgaaactattttttttaaagatttttttttcagtaggcatgtacccagcctgaggcataaatcatgattggtccatagcattctatgaaatatgttctttttgccaacattcattaactctcatctttacaaaatttgcaaggcattattttttccattttattgatgtgaactcccaggctcagagaagttactagttttgaacacaggcctgactccatatagctctttccagggcactaccccattattcatccatggtaattctgtatatttttttatgactctggttgtgggtattttactttcctacttgaccttccccactacccttgacaatctgggaattccttaaggcgactcactacccctcaggaaccgctcctaatgacttctaggaagccccctcgccctccagaagtgcctcttctgattcccaggatgcccccctctccgccccaagagctgctcctaatgatcccccaaatccccgctcactgaggaactgcttttttttttttttttttttttttagacggagtttcactcttgttgcccaggttggagtgcaatggcgcgatctcggcccaccgcaacctccgcctcccgggttcaagcgattctcctgcctcaacctccggagtagctgggactacaggcatgcaacaccacgcccggctaattttgtattttttttttgagtagagacggggtttctccatgttggtcaggcggtctcaaactgccgacttcaggtgacccgcccgcctcggcctcccaaagtgctgggattacaggcgtgagggaccacgcccggccaggaattgctttttaatgaccctaaggagagcctccctcatggtctgtcctaatgaccctcagggcagcttcccttccctgttcaggcttgacagcgaatgaggggtttccaaggccacgggattttgttttgaaaaccgagacacccaggacaaaccgggacaagacggtcatcttttcagcactccctgagctcggaagctgcccctaagggccccgacacatttccacgttaggcaaagaggatactcatcccaagaaaactttggcctatcctttcgttagcgacatcctatagtaacctcaccgcccttacccatctaccggaccggcccacttccaggtactagcttctttcaaccctgattagttatgggtgaccaggagcccgcctatgattggccagcttcgcgatccagctagaggctcactggccgcggtccctagtggtacagcgtttcctcccggcaacagcccgagccggcgctcataggctgagcacactgaggtcgggactgggaggtggctgcggcgcgtgctcattggctggtgtatggcttgcagccacccttgaattggttgactctgtacggctgcgcagatgccgactttagaggaggcggagtttcggccttcgcctgctggaaaagcagtaggatcggccagtggcgacagcaggagctgagcctaagccctggcggggctttgggctgtaggtgagaactatagggttttggaattctcgaggatcattgccgctgtagcagtgaccgtgagttttggtgggggaggggcggtgggggtgggtcttccagcggtga

SEQ ID NO: 1329 - DNA, 2300 bp, Homo sapien
actataaaccaaattattttgaaaactggtgcatcaccttgtccttagcaataaaatgtgttgagcagaggattggctgtctgccccaaggagcccacgtggcccacgtcaggctggggggtgtatctagagtcataggctctggagcggggctgtgtattttaagacaaatcagtaaggcattccctaggaagttccagagagtgggtcctttgcttgtcaagctctgtattaggccaagtatggtgggtcatgggagcagggacacttctggctctgagcacctctttgttgtgcttgctctgccttagagacgggcaagatgaggtaacagaggaagcaccagaccaatgagtcctctcaacagagtatctctcactgctgccccatttgatacatctttgttgaactggcctaagttcatgccagcatctgtgctctatacaaattgtggaaccagtgggaaggatgggtgcattttaggtgcttgaaaagcaagggactcaacctccagtgggatcctcagattgctctccgagctgtctagttggtgagaagcttccctggaggaagacccaatctcctttggctggtagatccctgaggtcaaagtggacaaggatggggaaccacagagcagggaggggggcaatgaataggtgcaggacttgggtgccccggagctgcaccggctggcccttaaacagccaggcacttcctgtggcatggccctgtccaggtgcaggagaggcttaggtcagttcagctgctctggatgcttccttgtgtccctgggggttgagaggtggttgctacttggtatctcattgtggagaaagggaggtgcaggaggtgatcttttctatgtcagctccctcctggggcccagggagggaagttggcctttttttttctttgcccacactccacttggggattcccaggggatgtagcaagggaggctgggcagaaccaggccttagtggattggtgagagaacactaatccatacatctttggaagagaggaacacttcaccagcctttttacacaggatccctacctttctcgatgaccccactgcctccaggggtgggcgctgggtttaatcccagcagtttttactcaacagctgaccagttttccagaaactgcactttttttttttggtcaacctaataactcttaggaaactgcaactcaggtgatccaaatcacacagaccggcccgttctctcccctactggctgcctatgcagtcgggtcgacctcaagagaactggccccagccaaaagcggcacctcccggcctgccagtcccttcctgccttaggcagctcctcccagaagcctttttgtagggcaaactgccttccctttgtaaggtagggcctttggatccaaggttgcagtttaaagaccaccccgactttgttgaggaattaagttttaaattccgccccaggcggataacaccagggctcagccgcaggaatgaaaaaggagtgggagggctgcaaagtgtacgtggggcttggaggccttgtgccacgcgcggactaaaaatgttctacgagtctcttaacgctcacccccgtgcccccttacccaccagggcccacggaggtccgaagctttcggcctcagtgagcggaatgggtgcgctcacgacctggagggcgagatgagatgtccctcggcgtgaagtggccgtgactaccctagcactttgcgttccccgcgcgggcgacgaaacacgctctcgaggggagagagccgtgcgtcctctgggccgtgaagccaggggaagagggttcctctagacagctcgatgtgcccgggagagacacccacgctgaacctgcaagctggggtgctccaccagcgcgaacctctcgccccgcactcgccgcagcactgctctcgtggtaggcggggtgggcgggacggcaaatccgcggctcctgcgtctattgggctgctcggggcagcgcagctccgcattggccaggccctcgctccgcccggcttccgcgagcccattggtcgcaggcgcccgaccgggtcgcggccgcgcgctccgcccgccgctgcgtccccactatggcggcgcccatgcagcccagcgcgttgtgggctcccgccggggtcccccgcggctgtcgccgccgcctacgccgctgcctccgccttcctgccccgcgtcgggccgggcgccacctcccccctgcctccctctccgctgtggtaagggcctgcccagtgcgcttcggggcgcgatggctgaccgcgaataacgg

SEQ ID NO: 1330 - DNA, 2300 bp, Homo sapien
actccagcatgggtgacagagggagaccctgtctcaaaaaaaaaagaaaaaagaaaaagtgacaatgacaagtaaagtgttactgtattcctgatagttagctacagcttcctttgaagtaaattctattacttgtttactctttgcaccacacaggacaaaggtacctcttggattaatgccatcaacctaccttttgtgcaacctcatatcctgctttttctgctaagaaaccccctggaaccacccatgagcatctcaggttcccctgcacctttgtcatcctcactttctcatctgctcacttcttccccttcatacagccggctacccactcttcatgacccaattcaagcctcagcttccctgtgaaaccttcctcaaacacatggatttctccttttctcggtttctcagagtacctaccatcttggaattctagagaccatatcacagttatcattgtcatgtgtgtgctttattccctcaagtatattataggcccattagagcaagtttcttatcttaaatggttttgagtttcccctcagtcaatgccttgcataaaatatgtactcaagaggcgttccattgattgatacaaagtctgttagtctctgagaacatgaatgtcttgtttcatcgttaacattttatttttattaaaccatggttagacagttagacacgcgaaatggagagattcaccacttaatatctcaaaatatccttaagaatctctaatcataggaggagctgtattgccttaagagattatttgaaagtatcatttggctataaatttctgtgccagcttccttttaatcctctgttgacttgaaagtacaccaaacatttcagtgatcatctctacaagataattctgccttagaaacaacctaatttgtcatggggactatcttacttttagtaacctaataagagttttttcctaccttaatgtccagctatctataattcacagtacatccactgaaaagtttgagtattttactttctgaggtaatagccgccttcactggtccttccctcaattaattacattcagttatcaggtttcactccttcctcatacgtgaaggaaacataaatgaggcttactgaggaatcataaaaatggacattgttgtaaaaaggaatccaaaatgttcatgggacactctcctaaccaaacctgccctcctcactaagatattttctcttgcaagcaaaagcaccgaggacacaacgggggaaagtgccagaaggaaaggaagcaagagaggcgtactttgccgatcaaactgaccccagttctggcccccgctagagcagtaagcaatgacaaccgctacccaaacgctgccgattcccgctcaggcgctccctggacttttctttccttttcccacagcagggcccgaatgacggtgtccgtgctctgcgccaaggtgcgcagcgctgcggggtttcacacggagatgatctcagacctcctggcctgcgtccggccggcctttcccccaggctcggcggcccccacccaggagaggtcatccaggtactgggcccccagcccgaaggacgactgggccgtgccccgaccccgccttcccgggcactagcgcgcgggctccgcgccccgcccagcccgggacccgcggccggcgggggaggggcggggcggagcggcgaccgttattcgcggtcagccatcgcgccccgaagcgcactgggcaggcccttaccacagcggagagggaggcaggggggaggtggcgcccggcccgacgcggggcaggaaggcggaggcagcggcgtaggcggcggcgacagccgcgggggaccccggcgggagcccacaacgcgctgggctgcatgggcgccgccatagtggggacgcagcggcgggcggagcgcgcggccgcgacccggtcgggcgcctgcgaccaatgggctcgcggaagccgggcggagcgagggcctggccaatgcggagctgcgctgccccgagcagcccaatagacgcaggagccgcggatttgccgtcccgcccaccccgcctaccacgagagcagtgctgcggcgagtgcggggcgagaggttcgcgctggtggagcaccccagcttgcaggttcagcgtgggtgtctctcccgggcacatcgagctgtctagaggaaccctcttcccctggcttcacggcccagaggacgcacggctctctcccctcgagagcgtgtttcgtcgcccgcgcggggaacgcaaagtgctagggtagtcacggccacttcacgccgag

SEQ ID NO: 1331 - DNA, 2300 bp, Homo sapien
caactatgccaaaccctcgggccctctctccagtccacagagtcctgggtccctttcacttcttgtgtcaatgcaggacctaggtagccatccagaggcctctggagcatctcctgtatcctctttgctttgagaccagaggtttcagggcacactcttagaggagacagaggcacaggactggagccctaggacattgccttggggtgccacagccccacctctggaaggacagatattcctgcaagcacaggaaagatatactgctgagcccctgcagcaagcagaggctcacagacctaccctactactgacactcccgtccctctgggaaggacatgccccagccccaatcattagcacagaggcacaccctctcccttcagccctgctctaggtatcctctgtcatactttagaaaagatatcacgtcgccttcttaagagtcctagagtctgatccctctcttccccagcatccccaggcaggcctgagaatggacagaccagactgtcgcctgcacttgaggccatgaagtgagctttctgtcacacactgccactgtggcaggcagtaagtggggtggccggctcctgctcctctctcctgcccaccccaatccaagactccaggcagccctgggctgccctcccactggtgagccctaaggctggagtcccggccatcccagggaccagcagcctcccacatgctccttcccactgtggccggccttaggcagaagcctcctgggctaggggggtaagggaggccctgactgagggacaggtcaacccagaaaccccctccatttctaccggaaataaggccactaccatgcacatgttcctgcctggatggtgccccgtggagttgtacagggcataggctgaatggccataagtggtgtccctggctgaaaaagccccaaggcaggtgccccaactgagcagccggttgtgggaggtgacagagcagactgctccctgcttggcctcctatcccagggggctcctggcacgcctgcagcagccccaccacctccagcagcagttctctgtggtctgacttctagtcctcaccaccgcggaaaactactttcacaccagctatggttctgagccctggccatgcaccagaatcacctgtgcaatttgaaaactgcacatgtccaccctgaaagtctgatttgggtctgggttgaggcccggatgtgggtagtttttaaaggtccctagtggttcagaagcatagccagggtacagctggtccacacacatccccagcactctcatccctgaccacagcttccaattgccagttggttgacaattcccaaattgcctttgccagcgcagctctctctgcttccttccaggctacaaattcaccggcttcctgaacatttccacttggataatccacaggcccttccaactcaacatgtccaacaccgaactcatgagcccctgcctttcctcccaggagccgggatgtacccctcccccaggtcaccccgccaaaggcacacttttgcagggtctacctacctcctcaccctatccagtcaggcactaatgaattttcaaaattgcgtgttccagattggggcctggcagccccacgctcccctcatgccctgcatcagacctcatcctctttccacagcagcctccacctttctctccaaccccatcctctttactacagccagagtcatccacaaaaaatgcctgtctgattacaccattctgctcaaaaccctcccatggtccccagtgttaggatctttccatccatgttactcacccagccctcaacccacctgccaaattgccataattaggcatctgaaatgctgccctccagctacctacttcaagactcagctcagatgttcctcctctgtgacccctgccttcagccctcagtacccacttctgccaacactgcccctgctgtgccccagtgactcccgtgtttgcaagtgtgtccgtactccaagccctaagcagcacaggaggtgagctgtggggagactagagcagagtcagatcctgaaagctgcgcagaggctaagcaacccaacaaggcaggtgaactggccgctgagagaagaatcgggtggagcagagagcagctgctgcagggcagacagccggacccccaaatctgcacgtaccagcagtcagccgccccacgcagggaccggcttacccctcgctccccgccctcactcactttctcccgccctcggcccggcctcccagctctctacttcgcgagtctacaaactcaac

SEQ ID NO: 1332 - DNA, 2300 bp, Homo sapien
ctagagcagagtcagatcctgaaagctgcgcagaggctaagcaacccaacaaggcaggtgaactggccgctgagagaagaatcgggtggagcagagagcagctgctgcagggcagacagccggacccccaaatctgcacgtaccagcagtcagccgccccacgcagggaccggcttacccctcgctccccgccctcactcactttctcccgccctcggcccggcctcccagctctctacttcgcgagtctacaaactcaactcccggtttccgtgcctctccaccgctcgagttctctactctccatatccgaggggcccctcccagcatctacccccctcccaacctcgggggacctagccaagctaggggggactggatccgacgggtggagcagccaggtgagccccgaaaggtggggcggggcaggggcgctcccagccccaccccgggatctggtgacgctggggctggaatttgacaccggacggctgcggcggcgggcaggaggctgctgagggatggagttgggcccggcccccagacaaggcccgggggctccgccagcagcaggtccctcgggccccagccctcgctgccacccgggcctggagccccacacccgaggtaagccagcccacttgcctgtttctggtcccagccctggatggacgctcttgggctgggggagaggacaggaccacccccctcctctcctttcttgcatcctccctctcttgggccctcggcacagttctccgcccctcccagcccctcagtccctcttgtcgcttgttggactgtgctggccttgccggcccactgtaatgtgaggctcccgctgccgctacagggtgcagactggctgccaaggccacacttttggctaaaagaggcactgccaggtgtacagtcctgggcatgcgctgtttgagcttcgggggagagcccagcactggtccccggaaaggtgcctagaagaacaaggtgcaggaccccgtggtgagtagcgggctggtggatggggaggcaagggccagagaaccaaatggccctagaccacaaggaggtaggaggcagggcctgagctgccctcaagagacctgctcccgggctccccctagcgcagagggctcctaaggctgccctgcctgcctttccctccatcacggacaacagtcactggcctggctcggaggccttgattccacttagccaagaggcacacaccaggacctggaggacaaccccgggaaggcctgggggtctgttccacaggtgtgcaggcattctgtgtgctaaaggatggggatgagggtggtagctgggacccaagaggaggctggctaatgaggacttacgaaggctctagggccccaaaagggtgtttgggagtgctagcagtgggagctcaggaaggctggctgggatcaggaacgatggctcaagggggaaacttctaggagcatgactaggctgccagatccataggaggctgggagggggacagacctagaccagctcccagggtggctcagctctcagagaccaggctggtatggaagcctagctggccctcctgggagtggctcaggcctgagtgtagctgaggggatggaaaagcccaccctgcttggaatctgcaggcttggcagactctgcccccttgtggccacaggaagccatgacccaggccccatgttttcagagggcccattagctcccaccatcccccggctctgtggtcatcgagggacacctatagtcagaggagagaactcaggtggctctgggtccagaacacagttcacagaggggcgaggtgaagcagctctgggtgggcagcacaggctgaggcttggggctcactatcattagataactcttagagtgaccagctagcaccctaattcttctccagccctcagcttcctctccggcagcctggggtgaaggcctctgtaggaccaagtgtgtccagctataactccttccagccacttctggcatctccagacctacaacgcagagcaggaaggttctgggaaaagaggacccctctctcccctccagctgtgtgaccttgtaaccttagacaacctctgagcttctctgagccttgtttgctcatctggaaaaaggggattaaaccatttacctcatggagttgtgaaagaatagctgcaaagcacctaacacatagtaaggttcccagtgcagctacttctgctgggttgagtctagctgtgtaggccccttgttcctcacctggagaaactggggtggcaggccggtccccc

SEQ ID NO: 1333 - DNA, 2300 bp, Homo sapien
cgaggtaagccagcccacttgcctgtttctggtcccagccctggatggacgctcttgggctgggggagaggacaggaccacccccctcctctcctttcttgcatcctccctctcttgggccctcggcacagttctccgcccctcccagcccctcagtccctcttgtcgcttgttggactgtgctggccttgccggcccactgtaatgtgaggctcccgctgccgctacagggtgcagactggctgccaaggccacacttttggctaaaagaggcactgccaggtgtacagtcctgggcatgcgctgtttgagcttcgggggagagcccagcactggtccccggaaaggtgcctagaagaacaaggtgcaggaccccgtggtgagtagcgggctggtggatggggaggcaagggccagagaaccaaatggccctagaccacaaggaggtaggaggcagggcctgagctgccctcaagagacctgctcccgggctccccctagcgcagagggctcctaaggctgccctgcctgcctttccctccatcacggacaacagtcactggcctggctcggaggccttgattccacttagccaagaggcacacaccaggacctggaggacaaccccgggaaggcctgggggtctgttccacaggtgtgcaggcattctgtgtgctaaaggatggggatgagggtggtagctgggacccaagaggaggctggctaatgaggacttacgaaggctctagggccccaaaagggtgtttgggagtgctagcagtgggagctcaggaaggctggctgggatcaggaacgatggctcaagggggaaacttctaggagcatgactaggctgccagatccataggaggctgggagggggacagacctagaccagctcccagggtggctcagctctcagagaccaggctggtatggaagcctagctggccctcctgggagtggctcaggcctgagtgtagctgaggggatggaaaagcccaccctgcttggaatctgcaggcttggcagactctgcccccttgtggccacaggaagccatgacccaggccccatgttttcagagggcccattagctcccaccatcccccggctctgtggtcatcgagggacacctatagtcagaggagagaactcaggtggctctgggtccagaacacagttcacagaggggcgaggtgaagcagctctgggtgggcagcacaggctgaggcttggggctcactatcattagataactcttagagtgaccagctagcaccctaattcttctccagccctcagcttcctctccggcagcctggggtgaaggcctctgtaggaccaagtgtgtccagctataactccttccagccacttctggcatctccagacctacaacgcagagcaggaaggttctgggaaaagaggacccctctctcccctccagctgtgtgaccttgtaaccttagacaacctctgagcttctctgagccttgtttgctcatctggaaaaaggggattaaaccatttacctcatggagttgtgaaagaatagctgcaaagcacctaacacatagtaaggttcccagtgcagctacttctgctgggttgagtctagctgtgtaggccccttgttcctcacctggagaaactggggtggcaggccggtcccccacaaaagataactcatctcttaatttgcaagctgcctcaacaggagggtgggggaacagctcaacaatggctgatgggcgctcctggtgttgatagagatggaacttggacttggaggcctctccacgctgtcccactgcccctggcctaggcagcaggtgagtggttctcccagtgactcctacctggtactgaggaaaggcggcttgactggtgagggagagcagggcttggcttgggcagcggttaggtgtgggagggaaaatggtcagggagggaccaggtgaatgggaggaggagcgggacttctctgaatggtcggtgcactcaggtgattcctcccctgggctcccagaggcagcaaacccattatactggaacctaggcccttcctgagtttcccctccacacagctaggagcccatgcccggcctgatctcagcccgaggacagcccctccttgaggtccttcctccccaagcccacctgggtgccctctttctccctgaggctccacttggtctctccgcgcagcctgccctgtggcccaccctggccgctctggctctgctgagcagcgtcgcagaggcctccctgggctccgcgccccgcagccctgcccc

SEQ ID NO: 1334 - DNA, 2300 bp, Homo sapien
ggtctctgggctgagccccccacccctaaaaccccttaactaaaatgagtttcagaagaagctaaggtctcattgctagaaagaggcataaacaggttttgaactcaggactaagtccagaatttgtgcatttaaaccccactcccaacaccatctcccctgcccaccaccacctccaccagtgaaaccgccagccagcaccaggcccaaggtatttcacaccctaggcacaggcctggaatcagttactttattttggctttctatttcctccttccaaatgtctcctgcctctctttcttccttcaatttgtctttcatgttgcagatttttctaaaatgcaaatgtaatcatcattgctcacttgaaaccccatcatggtttcatattgcacttaggataatgtccaaactcctacaagaatctattgccaccaacttgtctttccaacctcatctctgttactcatacccttccccttccccaccccacatatattctcttaaaatgaatataaattacttactattctttcttttcttttcttttttttttttagacggagtctcactctgtcgcccaggctggagtgcagtggcgtgatctcagctcactgcaagctccacctcccgtgttcaagccattctcctgcctcagcctcccgaatagctgggactacaggtgcctgccaccatgcccggctaattttttgtatttttagtagagacggggtttcaccgtgttagccaggatggtctcgatctcctgacctcgtgatccgcccgcctcagcctcccatagtgctgggattacaggcgtgagccaccgcgcccggcctacttgctattctttattgatgaagacttgctgaatgacttagagtcctactggattttgcttaccagctaaatgggcccctctccttcccaggctctctattcttcaagctcagatcaagtttctcttctcagggaagccttcatggaccttctcaggcctcagcagctgctgccaatgccagcttccaatgccagcttcctccatttgaacaaaactacggagctctttgcacttttaattttttcctcttccctgctagggtagctggcaggagttaataaacaataaaatacaactggaggggtgacaggcaggaactaccggggcctgtggcagaccagatctatggcatggtctgccaccctgtctgtgtgccaggggcaagataagcctaactttccccaagctcgatttcctcatctcatctgaaaatgatgaataaaaatatccacctcagagctattaagaaaactgaacctaaggtaagcaaagtcctgctcctagcacttaaatgtaagctactcttactctagttacacataaagttacttccaaaaaccttacgaaattccccgagcactgtccatggtatgtggtttcccggttgcttattgggtggtcccgagagccttccttttttccttcctgaggcgtgccaagtcccctctcctcttctctgggtggtgctgacgccttcttcccaggctgcacctttgctgggccggaggatgcccccggcagcggagcgccagagtgaccaggcaacctccccagcctccaccctctagcccgggctcccacctccgtcctccggcccctcgagtcacgtcgtcctactaaggagttgggccgcagcgccccgcgccggtctgacccggaatgcctgctcgccgcggtaggccgaggacaggcggggctctgcaggtccccaacccacgtgctcccggcctcctccgcagggcgccgccttccggctaggcgcaacacggactacatttcccagggtgaacagcggcggggcctagactcggccgcggcctggggcggcgagccgctccaccgcctgctcaggggagtgcgagctggcgcgaggacagggctaaggacccggaatgagtttccgcgcagttccgctgggccgtgccggcctgtaccgggccgtgccgagccagaactggcaggagtgggggcctgagttggaggtgccggggacaggcgctcggggcagcccgcgccttgccgaggtccctgccccgtcccggccggcctggcttgtcttgtcagtcactggggcggaggcagcggctgtagcggggctgtagccgggcgttgagcacagcgcgggccaggccgaacggaagggacctgccacagcccctcaactccacggactcttcgccctagactagcggagctgcatctccgcgcttcgttggacgcctccgtaaccacgaagggc

SEQ ID NO: 1335 - DNA, 2300 bp, Homo sapien
tggctttaaagccaaacagaaattaactgtctcacaattgtgaaggatagaagtctgaaatcaaggtgttggcaaggctgtgctccctctgaaacctgtaggagactccgtccttgcctcttcctagctctgtggtttgctggcggtcttcagtgttccctggcttccagctggatcactccactctctactttcatcctcacgtggcattctccctgtatgtctctgtcttcacatagatatcttcttataaggacaccagtcatattggagttcaggtccatcctactccagtataacctcatctgcaattatcttatttccaaataagatcacattttgaggtactggggattaagatttatcaaaaaatgtatctttttgtggggacttaatttgacccatgacagtctgccctctggtgccccaaacttcatgttatccccacatgcaaaatatattcacttcatctcaatctccccaaaagttgtaacctagctggatgtggtggctccacctgtaatcccagctactctggaggctgagcaggaggctgagtctcttgagctcaggagttcgagaccagcctgggtaacacagcaaaaccccatctcaaaaaaaaaaaaaaaaaaaaaatcttaacccattccggaatcagctctcagtccaactggagaacacaattcaacccataatgctgaccttctcatacgtccttctcagagttcttctgggggtccctgatctaaggttcttcccaacattgggaacatcaaatctgccatgtagaccctgaccctttttttgcttaggatttgataagggaaggggagctttgatggaagacaaggagattatgcctttctcttaaagccagtgtggggttgagcagagagctctgatggattttctcacctcatgcctctaggtacgtgaacacactcctgaaactcatcccgctggtgctgggtctgcaggaacaactgcggcaggcagtgcagaatggggacatggagacctcccatggcatctgtcgcatcgctgtggccctgggcgagaaccactcccggtaaagggtggagcagcttggggtgggatagtagggccctctaagaaatggggttctggaagtccctggaaaggtagaatgacctgactctctccccagggccttgctggaccaagtagagcactggcagagtttcctggcactcgtcaacatgattatgttctgcacaggcatccctggccactatcctgtcaatgagaccaccagctccctaaccctcaccttctggtacacactgcaggtgtgtctgtgtgacctccagtaggactgggctgtggtggaagaaggtggatcatgggcttctatgactgctggtgaggtggctaattctcttccctggctctctcaggatgatattctatcctttgaggcagagaagcaggctgtataccagcaggtgtaccggccagtctacttccagctggtggatgtgcttctgcacaaggcccagttcccttctgatgaggaatatggattctggtcctcagacgagaaggagcagttccgaatttacaggtgatggtagcaggccaactcctctaaaatggagtccagaaataatgaaggcaatgagggaaggggcccaagtccaggctttctgaattttggtgctcctttctgttttctaggtattgttgcagagttgtgggggtactggggtaggctcctgggcttgggggcaggatccagggtcaggatccaggcagtataaaaggccttcatctgcttctcagggtggacatctcagacacgctcatgtatgtctatgagatgttgggggccgagctgctcagcaacctctatgacaagctgggtcgtttgctcaccagctcagaggagccctactcctggcaggtacctcccaagcctgattccctcagccttcccagacctgtcacaccctcctcctcatccaagccagtggcaccctctttccccagcacacagaggccctcctctacggcttccaatccatcgcagagaccattgacgtcaactattctgatgtggtgcctgggctcattggcctcatcccacggatcagcatcagcaacgtgcagctggcagacactgtcatgttcaccattggtgagacctggcacacacccatgaccatattcccagagccacagcacccaaccctggccacagccagcatgctggatcctatccagaatgggagagccacatgcctacacacaatcagtgttgtaacaaactgactgtcctg

SEQ ID NO: 1336 - DNA, 2300 bp, Homo sapien
acccccccaccgccatcccagctttcctcttcaatgactggctgatgggaggtatgtgctaggagcagtgtagggctaccccaacctgccagaggccacagtaagtgtggtggccgtttcttcagctatatggagtccagaattgctcaagtaccaagggaacatgaggggatggcctgaggaggagtggggagtaggcggaaggccccttggagggagctggggcaggcccgtccttcactttgccgtctctttctgttgggcttctcccagttcatggtttttgtatgttttgtttctttatcttgcttcctgctgctcatgtgcccccacgctgtctccctgcaggctctcagtcccacataactatatgaggttgagttgctgtttgtataattttttcttaagttccatctttattatattttagggcccagggatcatcctgatattgttgattcatttatgcaactcctggcacaggtgtgttttagttttattcattcacgttctgttctctctctttctctttctcttatgttgaaattcaatttaagcctatttttagctttctgttgacaaattttttttctgttcagttgaatagagtttcttcatctgtttccgtggaagttgacaacccaacatcctcctttagtgcccctatgcctcactagctcagtcttctacaaagaccagggagaggctgatcccaaacggagggagctgggctggcatcgggtggggaatgggaaagggagggggtggtgactgcgcccagcagcttcttgttgcccaagaagttcacgtgtagggctggagttgaagggtctggggtacactgtccccgtgctcctgccgggaactgcctgcctcagtgcccccagcctgctcctgagaggtaggctgggagcagctccaaagcgaggggctgaagaggaatgtgcgcggtggagcccagagttgggctgttggagaggttgagctgctgctaggaggtggagtgcaggctccatgctaggatgtgtttgcattttgtatgtgtttcagtgtgtgagaccttattttgtatgttttgagtttggtttgggaagggaacagaaatcacctgtaagtagtatgtgaattgtgttgggtgctgagatgaatgtgtgccttgatgtgtgctgtatgttgatgtgttgtgtgttttgtgttgtttgttgatgtgttaggccttgatggatttagagcgtggacgtgtgttggaggtgtgtgtgttgggttgtcggagtgtatattatggaggataggagtgtatgttgtggcattggtatgtctgtatcagagtatggtttggagatgcatgttgggctgtgggggtatgaagttagtgtgatgggggcttctgtgtgttaggggatcctagcacgcagaccccctaacctgtgaattggggtaaatggagtgtttctttgcttaatcattccacagatatttattgagtgtgtgatacatgctgtactttgctaggtactgaggatatgatagcgagcaaaaccaggcacagttcttgctctcctggaacttacaagtctagtttctgggggatgggtagggtgggaggagggaagaatagggagtgttctgggcctggatggatatgtgtgtgggtgttttcaaaggtgtatctttgatgcggagggtgtctgaatgtgtatttgtggatgggtatgttggaagagtgcacagggggactgtgggaaggctgagggtgtaggtgtgtggacatggtttggggatgtgcaggtgtttggtgtatgactgtgtaatgagggtgtgttccagatggggagagtgtgtgtatgttagcggtgttagagaagtgtgtaaggagggcatttcaagtgatggtgcatgtgggggtgtttgcacatgagtaaacatggggggtagaggggatgtgaggggctggagggtagaggtctatgtggtatgcactgggggcattgctggggagcagcagtgtttgaggatgactggagctgtgcagagcatctcctgtgacctgaggatgtgccagtcatgtcctggtaccactcggggcaggccatctgcccccttcacttcatctcttccccctcacccacagcagcactggctccttggtgtgtgtatggccgaagagggcctggacacagggtaccctgggtgaaagatggggctgaggctccaaggctcctgctgtacttttcttctttttgagcaggagctggagggtgcctcaggaatacaggagggacatgggaggagggctgttg

SEQ ID NO: 1337 - DNA, 2300 bp, Homo sapien
agctcccaggttggaagagatactactgtagccaagccacctaggctggagcccttcagaatactgtcattgtccttggggcggggtggttgcagtagtgtcatcaacccccccatccccattaaattaatcccaacatgcatgtatgcatacatttatttaatcaacaccgccgaatattaggcccctagctctgtcctgcgtcgttctgccctgaacaaaggttgatctagtccatagctaccatggagaatggtaggaagtgagggaaggctgcatggagaaagtttttgacaggaatagtaggctttctaggtagaggacttgagactttgggctgcaagtggggtagggctgggtccgtttaggaaggaagaaatggagtggagttttgacttccgggaggggtttctggtgtggagttatacaacatcgaacttgcatatggttgaggagggctatagaaaggggctgagtgtgtgtgtattggggggtgggtgggtggcagggaggtgaaggagagaagatatctcagccgcagaggagaaaagaggaaagtaggacctaaggttgtccatatgtccgctgctccccgcttacacaggacctccagcacaggatggtcagggatcaatcagcaccagggacagctcctgacctattcttgcttttctcccttagcagtgttgcctccctttctgtctcctcagctatagtttcacctaggctgcctctcaggtaccccaggcttctcctcagtaagatctgaagagcagaatgagttctccccacttttacccttgagctttcaatctccttgtgggtgatggggaactcgttactcccacattcatcccactccttccctgttcaatagatccgggtttgatgctggttgtgccacagaattagtgtcttattacacaagtagtctctttgaacctcagtttccgtatctgacagaggtatgtaaggagggcatttcaagtgatgttgcatgtgggggtgtttgcatataagtaaacatggggagtagaggggatgtgaggggctggagggtagaggtctatgtggtatgcactgggggtattgctgggaagcagcagtgtttgaggatggctggagctgtgcagagcatctcctgtgacttgaggatgtgccagtcatgtccttggtaccactcgggataattcttactccaaagactgtaaacactaaaaatgaagtgcctaatgtacagtaagtgctcagtatttggctgattaaatagcaaatgctttcactgcatgcgatatccaaagaactactttgtaaagttttgtatataaattaattagaccctcacaacaatcttattaagaggtactattgtcacaactccccattcttcagataaggaaatgggcatagggacattcctaagatactcagtagcaagtgaccaagcacaatattcaaacccgagccggtcggcaccaagtttaaaattatgcagtgtagccgggcacggtggctcacgtctgtactctcagcattttgggaggccgagatgagtggattgcttgagttcaggagtttgtgaccagtctgagcaacatggcaaaaacctgtctctacaaaaaatacaaaaattagctggatgtggtggtgcgcctgtagccccaactactcaagaggcagaggtgggaggatggcttcagtccaggaggtgaaggttgtggagatcgcgccactgcactccagtccaagcaacatagcgagaccttgtcaaaaaaaaaaaaaaatgaatgaatgaaagaattatgcagtgatactgcccagaggatagagtgcacgtgaaatgcttaacagtgaagtcggtgttcctgatggccgcgggtcggctgaaccggactcccagcgcccgagaggaggccaggggaactacaatgcccacaaggctccgcgccttcctcgatgtacttccggctggcctgggactcaggctgaacattggttctctgtgcggggcggtggcggggattggagggcgggagctgtgctgacttaggattggcaaaatcgctatcagccacgcctctaaaacccggaagtaacctccccggtagtcccacgtgtagcggagaaacagtagttaggatggctgaaggggatactcaccggctgaaggccgactgtgattccccctacccccacaaggcgattttgaccccctgagggctgctctagaggactcaggccccgaagctgtcccagggaggtccccgctgcatcccaccacccaagctgtgcctcatgga

SEQ ID NO: 1338 - DNA, 2300 bp, Homo sapien
agttcccaggctgcagttgagggtctgtccttgtcaaaaggcaggtgctagacagtctagaccagggtttctcaaactcgtacttgacatttggggccagataattctttgttgtggggctgtctggtgtatggtagggtgctcagcagcatccctggcctctgcccactagacatcagaagcactcccccagttgtgacaaccaaaaatatctccagaccttggcaaatgttatctgtgggggaaaattgccctcaattgagaaccactggtctagctagacctgcactgtccagtacagtagccactaaatacatgtggctaaacttaaatttaagttaattaagattaaaagctcagtttctcagtcacattagtcattcaagtgttcagacagccacatgaggggacagtgcagctacaggatatgccatcatggcagaaagttctattggttggacagcgttggtctatactgactcttatttctcagggagatcacagcaacctaaataaaccagataccttttctctttgtgtttctttttaattcatgaaatactgcaggtcctgcactggtcctgggatgtagatgttaactgtatttaaccagattcctttccagtgtacctggaaagagagttaaatacgcagtcagtacacagtgaaacagctctatctgggaggagggaagccccagggacagctggatcccacaggagatacctgacaaggactaagaggaggcttcccagagggcataacacctatgctggatcttttggaggaaaaaataattgtcaggagaaaaggagtgaaaaagacctttgggcttaaacatgaaccaacatggcggatgcttcaagcaagtggggttgctgggccctaaaggtggagaggggtgaaatgaaaagactcgcctcttcttccccacatttgttgagaatctggtcacagtggcattgtcgagggtattgaaggtgaacaaaggagatgtggtccctgccctcagggaatgcctagtctaatggtggaggcagagctgtaagctaacaaggtaacccagacaaagtgggcatcagtcatgtgttctacaaatatgtactgaggacacactctgtgccaggtactggaaatacagcagtgagcgacacaaaagccatggtgcttccactcttccaggggagttggacaaataaaatacttagtatgccaaatggtgatcagtaagtaccgtgagaaatgtaaagctgggaagcagaggagcgtttaagtggggtggaatattaaacagaatggtcagagaaggccttttcaagaaggtgagcaaaaactgaaaggaagttacaggatgagccgcatgtatagttaggagaagcagagagagcaagtgcaagggcagtgaggtcgcggtatggttggcacgttcaaagaaatagcaaggagggcagtgcagccagaggagggagttagtgggggaatattagaaggtgaagtcagctgaggggcgtggggagcctagcaggctattgtgagaactttggcttttctcctgaatgaaatgggagccatcagggcatttcgacagggtagtgacatcttactgaagcttaataagcatcaccaggacatcgcgggagcccagcaaacgcgcttccctgccactgggttagggaaggcttgccggaaggacgatttcggaggacagcaggtgttagccaggcagcggagcgagcgccaacaggcgcactggggcggagagacgccgtgagcaaggtgaggcagagggcacgcgcggcgccacccgccacaggctaggacgcacggctgccagagaggacgccttaggggcccgcgagcaggctcgggaataaaacagggctggcagggcgaggtggagagactcgagaaggaccggccagatgtcgaagttcctagagaggagggcgcccaagcctccgccgagacgcgtgactacaactaccacaatccccagcgcctgcggttccagcgtcgccttgctctagacgggcggcggcgctgcgcggggaaccggcgtggggtcacgtggtaccggcgcatcacgtgggcgagttaggtgacgctgcggggcgggcggacagactgcgggacggacggtggacgctgggacgcgtttgtagctccggccccgccgttccgacccccgccgccgtcgccgccatgacggggctagcactgctctactccggggtcttcgtggccttctgggcctgcgcgctggccgtgggtgaggccgggtcctggcgggcgggagcagc

SEQ ID NO: 1339 - DNA, 2300 bp, Homo sapien
atcgtgggcagtggggctgccctggccgatgctcagaaccccagcctctttgtaaagattctcatcgtggagatctttggcagcgccattggcctctttggggtcatcgtcgcaattcttcaggtgatgaatccccttgggaagcctctgtgtccttgtccccaacctagccttaccctccttctggagaagctgaagtgctctccttctctacctataactatagattcccccaaacagcttccacctcctcatttccatcttctggttttctcctacaggggctctctatttttgtctctgatttggtgtcactgacaacagccctgttctttttcccccctttctaatgcgttgtatctgtatagcacttagtcctccctctttctgttctctcattttatctgccatgcttttcatgtctccagtctgtatttgtgatctagactagaatggaattttgtctgtctatatcagtctgtcatggtgtgtttgactgtctctcggagctatgtgtatctccctctcacatgcctgtcagtaggacaccattgtctaaattgtgtgtgtctagtctgtctgacagtgtgtgagtttgtgactaaggatcagcctgagggtctgagtgtgactgtgggtgcttgactgagttgattcttagtgactagctttatccatatgccacttctctccgtctgtcccacagcgtaactctgtggttgtctgtccctgtctgccttgtctgtcacagtgtgtccatcctggttagtcatatatctcttgtggtctgtccatccaaccatgtgctagatgtcatcttctatcatttgtcactgccttacctattcctctgtccctgcctgatttctcctgttctttttttgcagacctccagagtgaagatgggtgactagatgatatgtgtgggtggggccgtgcctcacttttatttattgctggttttcctgggacagctggagctgtgtcccttagcctttcagaggcttggtgttcagggccctccctgcactcccctcttgctgcgtgttgatttggaggcactgcagtccaggccgagtcctcagtgcggggagcaggctgctgctgctgactctgtgcagctgcgcacctgtgtcccccacctccaccctcaacccatcttcctagtgtttgtgaaataaacttggtatttgtctgggtcagtgcagcttctgttgccctcttgcgtcaccgttcacagaggaagggtaaagaggcctgtacgcctcagcctcatgccaatcccttgtcagctttctgactgcacacttctgatctgcacagagcttgctcctaggtggggaggcacgggtgctgggtggactctaacccccaaacagacttgtttggggatgagggagtgtgcagataggggcccctgggtgtgtttgtgcctgtagtccttctaggcccgtttgctcagggctctgactgaccaccatgcccgaattgtctgacagcatctacttacctggttgtacagtcgggcaccatcatctccgtccttgtgaggcctggagcctaggcagtggtctctgcctccagtgatggtcctgtccttctagcagcagcccctcccagaaacctctactctgatccttgttcccagggcccagggcagctcctcccaccccatccaatctcgttttctccttccctgaccctgtttcctgttaccccagaagccccagccacctccagcccacgcctttaagggtcctgccccctctctgctggccgaccttgaatcttggtccaattaaagagttgacaaatccctagccccgcagcctgagtccgcccaacctccaggtccccttcctggggagttcgcgctccaatgcaatccccactccccgctaagggactccacggtctgcacccgctcgccggtccgacctctaagcccaccctttggacgagcctgacccatttcctcccgcgctcccaggtccgtgcctcctgggtgcccgggttcggccgccggcagggcgggctcgcagcggcgcgcggcgggtgcgggcgtgctggaggcgggggccgcgggggcgcgcgcgcgggcgcgcgggccgggcctgcccctccgaggcgccgtagcgcgggagggaggcggcggcgctgtggtccgtgggtccgccggtccgtgggtctgcccggccgcccggccccgccctgccccccggggcggctcggctccatggcccgcggcggcggcggcggcggcggcggcgggaggcgacccgggggccgcggtggccgct

SEQ ID NO: 1340 - DNA, 2300 bp, Homo sapien
acttctctccgtctgtcccacagcgtaactctgtggttgtctgtccctgtctgccttgtctgtcacagtgtgtccatcctggttagtcatatatctcttgtggtctgtccatccaaccatgtgctagatgtcatcttctatcatttgtcactgccttacctattcctctgtccctgcctgatttctcctgttctttttttgcagacctccagagtgaagatgggtgactagatgatatgtgtgggtggggccgtgcctcacttttatttattgctggttttcctgggacagctggagctgtgtcccttagcctttcagaggcttggtgttcagggccctccctgcactcccctcttgctgcgtgttgatttggaggcactgcagtccaggccgagtcctcagtgcggggagcaggctgctgctgctgactctgtgcagctgcgcacctgtgtcccccacctccaccctcaacccatcttcctagtgtttgtgaaataaacttggtatttgtctgggtcagtgcagcttctgttgccctcttgcgtcaccgttcacagaggaagggtaaagaggcctgtacgcctcagcctcatgccaatcccttgtcagctttctgactgcacacttctgatctgcacagagcttgctcctaggtggggaggcacgggtgctgggtggactctaacccccaaacagacttgtttggggatgagggagtgtgcagataggggcccctgggtgtgtttgtgcctgtagtccttctaggcccgtttgctcagggctctgactgaccaccatgcccgaattgtctgacagcatctacttacctggttgtacagtcgggcaccatcatctccgtccttgtgaggcctggagcctaggcagtggtctctgcctccagtgatggtcctgtccttctagcagcagcccctcccagaaacctctactctgatccttgttcccagggcccagggcagctcctcccaccccatccaatctcgttttctccttccctgaccctgtttcctgttaccccagaagccccagccacctccagcccacgcctttaagggtcctgccccctctctgctggccgaccttgaatcttggtccaattaaagagttgacaaatccctagccccgcagcctgagtccgcccaacctccaggtccccttcctggggagttcgcgctccaatgcaatccccactccccgctaagggactccacggtctgcacccgctcgccggtccgacctctaagcccaccctttggacgagcctgacccatttcctcccgcgctcccaggtccgtgcctcctgggtgcccgggttcggccgccggcagggcgggctcgcagcggcgcgcggcgggtgcgggcgtgctggaggcgggggccgcgggggcgcgcgcgcgggcgcgcgggccgggcctgcccctccgaggcgccgtagcgcgggagggaggcggcggcgctgtggtccgtgggtccgccggtccgtgggtctgcccggccgcccggccccgccctgccccccggggcggctcggctccatggcccgcggcggcggcggcggcggcggcggcgggaggcgacccgggggccgcggtggccgctgaccgggcggcgggaggcggcggggccgggccatgggggacggaaccgtccgcagccgccggagccgggagccctgcccaagtcggagcggcgtcccctgctgagccccgagcgccgggtgagaggagggcgcgcgcggcccccacccagggccccgagattccagacccagccccgcgaggggcaccccgagcgcggccccgagatcccaacccaggagccggtgagagaggcgccggcggccagaccccggcctggctgcccccaccccgcccccactccggcgcccctcctgggcttctccgcccgcgtccagccggcctccctcattgtcctcgctcgccccggcctcgtggcgcggggaggcgttccatacacgtttccccttggcctttgcctcatccgctgccctccacccactccccctgcccccaggctccacacccacccggtctgtgcggcctgcccgtccgcgggtgccacgtgttcagcctgccagccccgcccaaacgcacccctcagcctggccgccagcctgacccagaacccctgcgccggagggagggtgggaatgtctgcacgtgggtctgggtgtgagctgtctgagagtctggatgtatggctgtggaagtccaggagcagtggccttgtttgtgagtgtgggacttagtgtgttactgtca

SEQ ID NO: 1341 - DNA, 2300 bp, Homo sapien
gcacagagcttgctcctaggtggggaggcacgggtgctgggtggactctaacccccaaacagacttgtttggggatgagggagtgtgcagataggggcccctgggtgtgtttgtgcctgtagtccttctaggcccgtttgctcagggctctgactgaccaccatgcccgaattgtctgacagcatctacttacctggttgtacagtcgggcaccatcatctccgtccttgtgaggcctggagcctaggcagtggtctctgcctccagtgatggtcctgtccttctagcagcagcccctcccagaaacctctactctgatccttgttcccagggcccagggcagctcctcccaccccatccaatctcgttttctccttccctgaccctgtttcctgttaccccagaagccccagccacctccagcccacgcctttaagggtcctgccccctctctgctggccgaccttgaatcttggtccaattaaagagttgacaaatccctagccccgcagcctgagtccgcccaacctccaggtccccttcctggggagttcgcgctccaatgcaatccccactccccgctaagggactccacggtctgcacccgctcgccggtccgacctctaagcccaccctttggacgagcctgacccatttcctcccgcgctcccaggtccgtgcctcctgggtgcccgggttcggccgccggcagggcgggctcgcagcggcgcgcggcgggtgcgggcgtgctggaggcgggggccgcgggggcgcgcgcgcgggcgcgcgggccgggcctgcccctccgaggcgccgtagcgcgggagggaggcggcggcgctgtggtccgtgggtccgccggtccgtgggtctgcccggccgcccggccccgccctgccccccggggcggctcggctccatggcccgcggcggcggcggcggcggcggcggcgggaggcgacccgggggccgcggtggccgctgaccgggcggcgggaggcggcggggccgggccatgggggacggaaccgtccgcagccgccggagccgggagccctgcccaagtcggagcggcgtcccctgctgagccccgagcgccgggtgagaggagggcgcgcgcggcccccacccagggccccgagattccagacccagccccgcgaggggcaccccgagcgcggccccgagatcccaacccaggagccggtgagagaggcgccggcggccagaccccggcctggctgcccccaccccgcccccactccggcgcccctcctgggcttctccgcccgcgtccagccggcctccctcattgtcctcgctcgccccggcctcgtggcgcggggaggcgttccatacacgtttccccttggcctttgcctcatccgctgccctccacccactccccctgcccccaggctccacacccacccggtctgtgcggcctgcccgtccgcgggtgccacgtgttcagcctgccagccccgcccaaacgcacccctcagcctggccgccagcctgacccagaacccctgcgccggagggagggtgggaatgtctgcacgtgggtctgggtgtgagctgtctgagagtctggatgtatggctgtggaagtccaggagcagtggccttgtttgtgagtgtgggacttagtgtgttactgtcacccgggtgtgtctgtgactgtagttctctgtgtgtctgagtgtgggtgaccagctgggaccagggtgtccctgtgattctgtgtgcctgtgagactcaccctgctccctgaagcactgccagaagtggctgccgctctcttggaaccacagctggagccatcgcccaggcaagacccccttcctgccatgcccagtgctgtgcccatctccaggcccaagcatcccgttccgggaatcagaaccagctgtgctgggcaggacccagagtcttggtcccagtcccaaggggctggctttgaggtcttaagtgaggggtgtcccctgccttgccccgtattttgacgttttgctccagtgggaagggattctgtaaacatccagtctgtatttgggccccccggatgctgagggcaacttcccagcctggtcccagttggcctggcctgcttgtcgctgggatctgaatgaccaaaccacttcccaccatggctcctggaaggactaaatgaagtcatgagtataaagtgctcctgcatggtaggtgcacagtattccgtctcttccctcttccccaagccatgagttctgggttaaggatgctgccatgtgaggtgtctgttctcaggggcacag

SEQ ID NO: 1342 - DNA, 2300 bp, Homo sapien
gtgagagaggcgccggcggccagaccccggcctggctgcccccaccccgcccccactccggcgcccctcctgggcttctccgcccgcgtccagccggcctccctcattgtcctcgctcgccccggcctcgtggcgcggggaggcgttccatacacgtttccccttggcctttgcctcatccgctgccctccacccactccccctgcccccaggctccacacccacccggtctgtgcggcctgcccgtccgcgggtgccacgtgttcagcctgccagccccgcccaaacgcacccctcagcctggccgccagcctgacccagaacccctgcgccggagggagggtgggaatgtctgcacgtgggtctgggtgtgagctgtctgagagtctggatgtatggctgtggaagtccaggagcagtggccttgtttgtgagtgtgggacttagtgtgttactgtcacccgggtgtgtctgtgactgtagttctctgtgtgtctgagtgtgggtgaccagctgggaccagggtgtccctgtgattctgtgtgcctgtgagactcaccctgctccctgaagcactgccagaagtggctgccgctctcttggaaccacagctggagccatcgcccaggcaagacccccttcctgccatgcccagtgctgtgcccatctccaggcccaagcatcccgttccgggaatcagaaccagctgtgctgggcaggacccagagtcttggtcccagtcccaaggggctggctttgaggtcttaagtgaggggtgtcccctgccttgccccgtattttgacgttttgctccagtgggaagggattctgtaaacatccagtctgtatttgggccccccggatgctgagggcaacttcccagcctggtcccagttggcctggcctgcttgtcgctgggatctgaatgaccaaaccacttcccaccatggctcctggaaggactaaatgaagtcatgagtataaagtgctcctgcatggtaggtgcacagtattccgtctcttccctcttccccaagccatgagttctgggttaaggatgctgccatgtgaggtgtctgttctcaggggcacaggggcacatgggggtctataggtaaacatgtctccatgcttaggtacaaaccagtgtggttagagttcacgtgtctgtgttcctgggaatgcgtgagtgtgtgtgtagagttgtgcaataagggtgagtgcctgagtgtgtgtgtcagtgaggtggaggaaggtaaatgtatgtggcttagtagtggggtgtgcttgaggatgtgagtactgagttgccgggaactgtgcctgggtgtctgtttggaggtaaattcttgagtctgtgagtgtgaaagggtatgagcaggtcagtgtgaggtgtggcccacgagtgtgagcagctgagtgggaggtaggtgggcagccttgcctgtcctgccctgacctgctggatctgtttccctcccaccctgctcaggccagcagccggatgcccgggcccactgggcgggccagtggccgcctgcgggatgagcagactgctgggggggacgctggagcgcgtctgcaaggctgtgctccttctctgcctgctgcacttcctcgtggccgtcatcctctactttgacgtctacgcccagcacctggccttcttcagccgcttcagtgcccgaggccctgcccatgccctccacccagctgctagcagcagcagcagcagcagcaactgctcccggcccaacgccaccgcctctagctccgggctccctgaggtccccagtgccctgcccggtcccacggctcccacgctgccaccctgtcctgactcgccacctggtcttggtgagcctggagggtagggcctgcctgtggggaaacagggttttattggtttgactagagaaatggcatctggacccaggggtgtgccaggggtccaggtctgttgtaagagggctattcttggggttccctagcccacccccaggctgagggtgggggctggtatctgtggattctggccaatgccctgattcctgacactgtcctgtctgcagtgggcagactgctgatcgagttcacctcacccatgcccctggagcgggtgcagagggagaacccaggcgtgctcatgggcggccgatacacaccgcccgactgcaccccagcccagacggtggcggtcatcatcccctttagacaccgggaacaccacctgcgctactggctccactatctacaccccatcttgaggcggcagcggctgcgctacggcgtctatgtca

SEQ ID NO: 1343 - DNA, 2300 bp, Homo sapien
tcgcttgaacctgggaagtggagggtgcagtgagccgaggtggtgccattgtactctgtctcaaaaaaaaaaaaaaaaaaatcactagatcaataaatttgaaaaggagactttatttctcttttataaagggttacaacctgcaggctggccatcccactggctaggaagcagagcctccagccaaagccttaacaggcactttgagggagggaggagtgagataggaattttagttgaatggattggtcaacaggttactggaggagctatgaatatttacggagggggtcctgacatatgcatatcgaacaaacatgcatgttatataccatccatgttcaccttggggtggagacttaatatttaaatatatcgcagttaggccccatacgtcaaaaagacaaaagcactcaagtgcgcagcctctgtaagctggctagaaccagtccatggccgatggtcttatcaggagaaagttactgagatcagtctcttgtcccaccaaagctataattatggcttgtggaacaggggcgtaggggtcagcatctggcagtgggtgagctgcaaatttttttctattatttatattaccacattatacaaattgttttaatattggttatctcaagtcctgtacttgtttagctgctacagaaaaagaaaatcctcgcggcagttagagcatagtctcttctttaagtgcagaggtgcaagacttaacccttgcctggcatggccttagatcctatttataattaggtatcttattgacacaaacaatgcattctgtcagtcttgtgatctctgctttgacgttaatgctggtcatttgttgtgtctaagctgcaaaagggcgtgggcataacatggcatgtttgacgtcccttcccatcatagctggaaaccctgtttttaaggttccctggggtccccttggccaaaagggggtccatttagttggttggggggtgtaggattttatttttagtttacagttgttagccctgatgtggaccatttccatcctatctaggtttaccaagattcaaaacacgaagctgaccatgaagcgggacggcattgggtcagtgcggtaccaggtcttggaggtgtctcggcaaccactcttcaccaatatcacagtggacattgggcggcctccgtcgtggccccctcggggctgacactaatggacagaggctctcggtgccgaagattgcctgccagaggactgaccacagcctggctggcagctgctctgtggaggacctccaggactgagactgggctctgttttccaagggtcttcactaggccccctagctacacctggaagtttcagaacccactttggggggcctcctgcctgggcaggctcttcaagtgtggccctctttggagtcaaccctccttcccgaccccctccccctagcccagccccagtcactgtcagggtcgggccagcccctgcactgcctcgcagagtggcctgggctaggtcactccacctctctgtgcctcagtttcccccccttgagtcccctagggcctggaagggtgggaggtatgtctagggggcagtgtctcttccagggggaattctcagctcttgggaacccccttgctcccaggggaggggaaacctttttcattcaacattgtagggggcaagctttggtgcgccccctgctgaggagcagccccaggaggggaccagaggggatgctgtgtcgctgcctgggatcttggggttggcctttgcatgggaggcaggtggggcttggatcagtaagtctggttcccgcctccctgtctgagagaggaggcaggagccccagggccggcttgtgtttgtacattgcacagaaacttgtgtgggtgctttagtaaaaaacgtgaatggagcagctcccttgtctgtttgggggtgggggtcgggtccctgaacgtggttaccctgagtgtgttgtggtggaagggcacttggggaacctggcccaacaagtaaacctgacccgggccatcctggttctccaagcgctgccactccctaggctttcactggccttaaggggaagtttgtccttgcactgcttccgggacagtggaggcgacgaagtaataaacccgtggacccagatttctcaggtcttaacacgttccctgaggcctaaaggtgcccagggccgagcccaaagtgcttgggtcagggctcggtggagcgccgaggtgagtctgaactcccagccggcacgcgccgcccgccggaccaaacacgggagggggcggggccc

SEQ ID NO: 1344 - DNA, 2300 bp, Homo sapien
tcaacaggttactggaggagctatgaatatttacggagggggtcctgacatatgcatatcgaacaaacatgcatgttatataccatccatgttcaccttggggtggagacttaatatttaaatatatcgcagttaggccccatacgtcaaaaagacaaaagcactcaagtgcgcagcctctgtaagctggctagaaccagtccatggccgatggtcttatcaggagaaagttactgagatcagtctcttgtcccaccaaagctataattatggcttgtggaacaggggcgtaggggtcagcatctggcagtgggtgagctgcaaatttttttctattatttatattaccacattatacaaattgttttaatattggttatctcaagtcctgtacttgtttagctgctacagaaaaagaaaatcctcgcggcagttagagcatagtctcttctttaagtgcagaggtgcaagacttaacccttgcctggcatggccttagatcctatttataattaggtatcttattgacacaaacaatgcattctgtcagtcttgtgatctctgctttgacgttaatgctggtcatttgttgtgtctaagctgcaaaagggcgtgggcataacatggcatgtttgacgtcccttcccatcatagctggaaaccctgtttttaaggttccctggggtccccttggccaaaagggggtccatttagttggttggggggtgtaggattttatttttagtttacagttgttagccctgatgtggaccatttccatcctatctaggtttaccaagattcaaaacacgaagctgaccatgaagcgggacggcattgggtcagtgcggtaccaggtcttggaggtgtctcggcaaccactcttcaccaatatcacagtggacattgggcggcctccgtcgtggccccctcggggctgacactaatggacagaggctctcggtgccgaagattgcctgccagaggactgaccacagcctggctggcagctgctctgtggaggacctccaggactgagactgggctctgttttccaagggtcttcactaggccccctagctacacctggaagtttcagaacccactttggggggcctcctgcctgggcaggctcttcaagtgtggccctctttggagtcaaccctccttcccgaccccctccccctagcccagccccagtcactgtcagggtcgggccagcccctgcactgcctcgcagagtggcctgggctaggtcactccacctctctgtgcctcagtttcccccccttgagtcccctagggcctggaagggtgggaggtatgtctagggggcagtgtctcttccagggggaattctcagctcttgggaacccccttgctcccaggggaggggaaacctttttcattcaacattgtagggggcaagctttggtgcgccccctgctgaggagcagccccaggaggggaccagaggggatgctgtgtcgctgcctgggatcttggggttggcctttgcatgggaggcaggtggggcttggatcagtaagtctggttcccgcctccctgtctgagagaggaggcaggagccccagggccggcttgtgtttgtacattgcacagaaacttgtgtgggtgctttagtaaaaaacgtgaatggagcagctcccttgtctgtttgggggtgggggtcgggtccctgaacgtggttaccctgagtgtgttgtggtggaagggcacttggggaacctggcccaacaagtaaacctgacccgggccatcctggttctccaagcgctgccactccctaggctttcactggccttaaggggaagtttgtccttgcactgcttccgggacagtggaggcgacgaagtaataaacccgtggacccagatttctcaggtcttaacacgttccctgaggcctaaaggtgcccagggccgagcccaaagtgcttgggtcagggctcggtggagcgccgaggtgagtctgaactcccagccggcacgcgccgcccgccggaccaaacacgggagggggcggggccctagagtcgcggcgtggtttcccgggtgatggccacgcggaagaggtggggctagggccctggttcccactgcctggtttctgggcccccggcatccgagtcggccaaaagccgggcagaagagagcgccaaggactggcagttccggaacgggcaatcccagccgaggggaccagcggcagagcacgggtggggcttgggagagggcggggcccatagaggggcggggtttggtgagcgttgccggcgg

SEQ ID NO: 1345 - DNA, 2300 bp, Homo sapien
tggctcagtgagcagctgagtcggtaggatctgaggccatccttaggacacttgcttgagccaaggcctgtccccatcttccccaaaccaacatggagataataatggacctacctcatgggacagctgggaggacccaatgagttaagatatgggaagttaacttgtaccatactaggtgagtgcccacagggtgatgggctgtctgtgaagcaagcgtcccatgtatgctgagccaggacagtgcctggcccacagcaagcacttactatgtattttctattaccattattactaatgctcactagattcaatgattggtgggtggtttccccgttttagagatggagaaactgagatccgacatgttaatggacttgcctaaggttatatatggtgagaaactgacaaagctagggtttgaacccaggactgtcaaactctaaaggctgtgactttttatcttattttaaaatttattttttattaattttttgaaacaaggtctcactttgtcacccagtttggagtgcagtggtgtgatcatagctcactacaacttccaacgtctgggctcaagcaaaactccctcctcagtctcctgagtagctgggactataggtacacaccaccacaccttgccagttttttgtagagacacggtctcactatgttgcccaggctggtcatgaactcctgacctcaagcgaccctcctgccttggcttcccaaagcactggcattacaggcctaagccactgtgccccacctgtctttttatttttatttattattattattattattattattattattattattattttagagagagagttttgctcttgctgcccaggctggaatgcaatggcgcgatctcggctcactgcaacctccacctcccgggttcaagcgattctcccgcctcagcctcccgagtagctgggattacaggcatgtgccaccacgcccagctaattttgtatttttagtagagatggggttggtctcaccatgttggtcaggttggtctcaaactcctgaccttgtgatctgccctcctcagcctcccaaagtgctgggattacaggcgtgagccaccgtacctggccctgtttttaaatttttaatgtcatcctgtgcttgacaaaactccttatgttccctacggggttgccacactcaccaaactcacaggaaagctgttcttacaccagaattcatgcacgtgtccatctgactgatatttcctgaggtcctgtggtaagccaggccttctgctgactgaccagtttccaaagggcctgacacattcctggcaccggaatgcatatgcccaccttccgagccactggtctgaggtatcttggggtcagcaggagactggccagtgtgtgtggcctcagagaaagggactggatgggtctgagtggcatcccactacagtagtggtgactatagtcatggtgacgacaccactggacctaccagcccacgccacgcacactcccagactagcacctcagcttctgggcatcacggtgcaaatcctcacgggttcttattccacagtccccctttgtctggactctgggatgacttgcccccttggctaatgccatctttgtccagacagctgacagcgtggttcactaggccagggctttcttgcatggtcagttgcattctcctaggaagacgccccatcaccctggcagtttgggagtccccatctctggttggtggggggtgtcaggtacagccctagggcttggtttctcccagcccgcacccctccgtggagcctgagctgctctggtggtgccctgtggactgtgccttccatcctcctgccggtcaccatccagggcccaatggggcagaccccgtcactcatcagacacccaactaccctagcaggagcccacccagtgctaggcctgtgggctcagacagcgtctggtcagctccgtggggggagtgagccaccctctcgcctgctctgccccagtctgtgtgtgtgtgtgtgtgtgtgtgtgtgtgtgtgtgtgtgttgttccagttacttgctgggaacaagggaaaaacacaacaaaccccacacaccccactccagctccggagcacccgtgctgggctgcatggggactggccggaggggcagggccaggggagcgggtaggcagagcttcgggaggagatgaggtgaaagtaattgacgctgcccagcccggcagtgggagaggcaggggatgcgtcagtgtcgcgctggagctggcagaggtgtgaatgagcgg

SEQ ID NO: 1346 - DNA, 2300 bp, Homo sapien
ccctctggccaacatccccaatctccctaaacactccaaggaaaattttctcttcaccccacgtccctgtccctaggttagtccccaagccttcctctttctgacggagcctcagagggctggcccctgagcacccatcctcctctcttctaacagcccaggccccaagcccctaggcctgagggcatcctggaagtctggcttgcagcaccctacacctgcctcccttcatatggattccctgagccatgaaaactctcggaatcttcactgagtgttcttagcgctcagtgccctcttctaggcctgtccccaccccagcctactgctggaagggagaaggagggaggccttttccccttcatactcttccttgtccgccttcctctacttgggggcctcttcgacatcctccatctgccttccctggggtggtatcccttttgatgagccccagcgaggaggcaaggaggaagatcctaaaaaaaacttatggaggaagttacgtcctggcaggagagatatagagggcttggaccccatctgcccagtcccaggaattgagcacacacataactacacagacctgctgcagtgcacacaatcagtcttccacagatgtacctacacaaatacacaatcggggctcaggtgtctgggggcacagacacaacaggttgcctagatccaggtgtgtgtgcacacaactcacgcaagaaacacctgcacttggcttgtaggagactaaaaatcccaaacatgctatacctactaggtttggggacaaagtaaaagtgaaaataatctcgctgataagactaaggtgtcttcccagatctgatcaggagtccaatgtgaataggagacaacagagagctgtctttgtactttggctctgaggaaggtttgtggaatggaccgcgtgtggcctgagagagctcgcatttcagggaatgcctgggcttgatgcctgttatcttgttcagtgcctctgataaattaataaactggaatctcactcaacaattggtttcacgtgagtttggcatgtgtgcactcgcttcttggaggctgactgtcccaaggaaaaaaattaaactgtttcctggccagaaaatggtgaggactcagggtccaaagtagaaattgcctctgtgggctgggccccttccctgagcagatgccctactcaggttggggcaaaaaccagttcctctgacagaactaactggccactctccatgaaaggtggtggctctcacaaggtatgcaaatgtgggaggctcattccaaatgccagccaccactccccagaggcagcctggagcaatgggctttatatacacacacatgcatttccttagccccttctctctgtttcacagaggaggaaaccgaggctcaccatgctccttttggcaaagactcttttttagctgagattgtaacccaggtctgtctcaccatggaaggaggagggatcccaggttggtgtctgcagcccctgtaacaccacctcaaaagtagagctgaccaagccggtggtccaggagggaaatttgagaaagggctaccccgagccctccagttccaaggagtaggacctaggccttacccagcaatgcccacagtctctagcggctctgctccaaagggaatggaatttgctctgacttctctctaggggaaacgcaggcgcagaaggccaggggcctggagggctaactccagcctcagccccccatagtgccccaggccttctggcttcattccagcctagcccgaaggggcccacatctgcttgctcaagggccccagctggagggcagcgaggcaggggcggagaaggggactcctttgtggcgctcactcccaggggttcgtggggatcaatcatctgaaagctggagagacttgtaattttattccctgggaggaggagcctgagaagtcggcacgggaggaggggatgggatggagaggggaggacggccaggggagccgttcgggtaggggagggacttggctagatctcccaagccttctccactcttcaaactttcaccaaactcttagcccccgcctccccgaaaccaaaacacaacaggctgtggaagagctgcgagcggcgcggcggggcgggcgaactcggcgcggcacagagcctcgggaggctgatgcaactttccctttaagaaagccacctgggcgcaccgcggtgcggacccagcacgcctgggccgggggctgcagcatggtaagggggctgggggaagggacgctggggcccgcgcctccgt

SEQ ID NO: 1347 - DNA, 2300 bp, Homo sapien
taaattaagaacctcaatttttttgagactctgtctcaaaaaaaaaaaaaaaacctgaaattttttgccctaaacctttgttcatatgaatgtactattaaagaataagtttattttaccgctacattctagtgcatatgagctactgatttttagcatgttcccaacgtggttggcagcatctctctccctcgtggaaggtgcgtgttgtcaccttctgcccacacggcccctggttttctccctcgatgggggagaaaaatggatcccttcgtagttactgcctccaggacgtgtgacaccagctggcccgccatgggtttgaagcaatttctggtgatcttgcttaattctctctcttccatttccaagcacactatttatttatttatttatttagagatggtctcgctctgtcacccaggctggagtgcagtggtgtgatcacagctcactgctgcctcgaccacccagactcaagtgatcctcccacctcagcctcctgagtagcacgtgccaccatgactggcaggtgctaaaaacgaactgttttttgttttattttggagagacaggggtctcactgtgttgcccaggctggtctcgaactcctagactcaagtgatccacccaccttggcctcccaaagtactgggattataggtgtgagccactgtgcctggtcctctaagaacatttgtaaaaatgctattatttttgcacactttctgtgttaagaactttacattcattttctcatttaatcctcacaatgaccctgtgagctagatactgttattattcccattttatagataagaaaacccaacctcagagagattaggggaaacctgtgggaatgtaaccgattttaaatcctctttaatgtatagataaaaattaaaggtgagcttaaatccctttaaatttatacatttaaaaaattgttcatctaaagtttagtactttaacaattgttcttagtaacaaattaccactaaagggttagtaacaaattaccacaccagcacagatcccccacccttaaaactgagccccagctgagccctcacattgggcccttacccttgagtcccctgaggccccgtgctgtgttcagggcatgtgtgccccaaacgtgaacccttacactggtgtcttgcctgatttttttccagaaccttaatactgagtcttcatacccattttcctcactggaacctccctgagcccttacttgaggcaacatgtgtgagctcttcacctgtctacatgtctgacctgctggtcagccctgacaccagaaccccacgcttgagtcacttaactagcagcagagtcagactctgagaccatccctttagagggagcagcagaggaaatgggagctggaggggaagggagtggtggagatgggggtgtgaactgggagaagcaggcatgggggaaaactctgggctgtcagcccctagctatggtcgggaatgttcccaggcagcactgacctttcacccccacccgcctcggtgcgatgattggctgtctctgccatccccgcttccgggaccagaagccacctctggagcaactggggcatccccatggcaaccatgccaggccaggttgggagaggtgtggggctccttcacagccttttattgccccaaaacaggttgacactctcgtcctggtaaccctcagggccctgcagatcacagtgtccagagaggaggggctgttgctcctagcaggtctcttgattcaggaaaaagcgtttctctggtctcagccagatccttcctgggctgatctgttgggaaacccaagctctctgtccttgggcccctagcccctaccaacaccctcctagcgcattctagcaggagagcgagagggagtggagacagtctgaactcttccctctgcccacctgggtgtgggcttggtgagatactgaggctggggtgtccacctgagtccgtggagggaggagcgactacggtgcggtgggggcgaggccactcagggctttgtgacctagacagaggatttatgtgggtgattagctgtcacgttgggtctaagctccttaccctcagaacctagctttcctgcctgcccccagggctaatccagaggtgggggaggggctaaagacactgggctctgccaggggccttggtaggtgccagtgacccattctgtgtaaccagctgtggcctgttctctgtgtatttctgcttttgtgggtttctctggctcttcctgcctttgaatatgtgcacctgggtttccttcta

SEQ ID NO: 1348 - DNA, 2300 bp, Homo sapien
ccaggctctgtcctctgtcctgttgtcaaactatctccagtgttgatagcatccactctaatggccttctaactaccatctctatgctgacaacacccaagtttacatttacagccctgaccttctctgagcataattaatagacatctcaaaatcagtgtctaaaatggaattcttgtttcagttgcctccaaatctgctcctcttcctatctttccatataccaagtggcacgatcatcatgcagttgctcaagccaataatctaggagcctttttgattcctctttccctccctccctacccccttctgatccattacaaattctgtttttcattctttttttttagagatgggatctcactatgttgccaaggttggagtgcactggccattcacaggtgtagtaatcccattaccaatcagcataggagttttgacctactctatttctgacctgggccagttcatccctccttaggcaacctggtggtgccccactcctgggagctcaccatactgatgctgaacttagtgtggacacccaatcagcacagcacactgcagcccagacctcctgggctcaagtggtctcccgcctcagcctcctgagtagctgggactacaggtgggcaccacctccatgaccaaacactgacatctctttcttggacagctccttttttatttattttattttattttattttattttatttattttattttattttattttatattttattttattttattttttgagacggaattttgctcttgttgcccaggctggagtgcaatggcgcgatctcgacacactggaacctccaccacccggattcaagcgattctcctgcctcagcctcctgagtagctgggattacaggcacgcgccaccacgcctggctaattttttatttttagtagagacggggtttcaccatgttggccaggctggtctcaaactcctgacctcaagtgatctgcccgcctcagcctcccaaagtgctggcgttgcaggcgtgaaccactgcgcccagcctcatctcctttagatttctaactggtgtctctgcacccctctggccctttataatccataaggagccaaatggtttattttaaaaacatatatcagatcacatcaaattcctgtttaaaagcatcagtggcttcccgccacacttagaataaaatccaaattcctttctatggtcttcaaggccctatccctctgtcctcgtgtcactgtccatgtggtatcaccgtggtcaccttgccttcaatttccttctagcaccgttgggctcttttttgccttagagcccttcaatcttcctatggctggctcctttcaggcatttcattttcagctcacatttctgttttggttttccatagcactcaccaccacctaaaattataatagttaacaactttattactcatttcttgtcttcccgtataagatggaaattgacagcaaggactttgttctgtcctgtttactattttacccctagttcagagatcagtgcccaacacacacggggcactcagtaaacactgcggaataaacaggttgtgccatgaagctcccagtcttcagttcgtacagacaagggacagaggtgcacagactgtagcagaaaagctccagcccttccaaagcttatggcaagatcccgacctgagagagtgctggtggaggctctcctatcggtagaggccctacacccaaccttgcctctctctccagcctcgcctctctctccagcctcctcctggctggagttggagacctgggtgtcctcagtccccacttgggtgaaacagttgctcagactgaggggtggaatgggtcggttgggtgggcggaccaaattcctttaagaagcgttcaaggcctgaagtggctggctgtccgtgaggctgccttggttggggcatggtgagggtgggtggcagcctggggcagggctgcgagggcggcgcagggcgggacgggtggggcctgaccccgccccttggcgcagctgtaaataggtaaatagaaggtgattgtggcgtggcgatgtaccgatacccgcctgcgacgccgtggtggctggttccctgtctcttcagtagagagtctagaccccacccagtcttcatgtacggccgaccgcaggctgagatggaacaggaggctggggagctgagccggtggcaggcggcgcaccaggctgcccaggtgagtcaggtgccagcccctggcaggccgggcgggcccaggctagggggcggcggggagg

SEQ ID NO: 1349 - DNA, 2300 bp, Homo sapien
taagaagaatgttccttaatttgggaaagagtatatacaaacaacctggagcaaatgttatgtttaatagaaaaaatttaaatgcgccccccttaagatctggaaaaagacaaggatgcccacgaccacacctgctgtttaaccaattactggaggtactggaaaatgctaaaagaaaaagaaataaggggtataaattgaaaggaggggataaacttgtcattatttgcagataacatggtcatctttctctaaatatctggaatccattgccactgctacaaccttagttcagtttcccaacacctctaacctagatagtcacaactgccctctagtctcctaaactctggcctggtccaccttccacagcgcacagtctgcctgtctttccttcttcctttccttcttcccttcattccttccttttattatagaagaggtacacattcattatagaaagtatagaaaatataaattgccagataaaaacaagtgatggaatcatttcagtttagtcctttccagaattttttctatgtatatacacatttataaaaaaaagagagaccactaactttccctgaccagattatggaaagcagttctccatcccatcgctctatttcatttccttcctagctcttgttaccatcaaaacttacattatcaattttattgtctatttccttagtgtttctccttctccactaaatataagctccaccagtagctatttgtatctcgttcacccactgcatgcccagagtctagaatagtgcctggcacatacattcctttatgtactgtgatccctgtcttcacagaaatgagtctattagagatatatattaaacaagtaattacacaattaattaactacaactagggtcaagtgtttcaggcagccaattgctctctccctttctggctccaaggaccatttccttaccctgtggacaatttctgctgtaagactgtgacttcctccggcaactgtttggagctcagtggatccatccaggaatcagacccaggaacaggtttgtacctccaggcctagttctccaaagttttggggactagtcaggcttgtggctacagctgttgtatccccttgtcttctccaggccagaacaggctacaccacttatagctaacttgcgcaaactgtctgctcctctagtccctgctggtatctttggcaggtctcgacttggggtctggccttcttaatgccttaacaagccccaccctatcccacaggctatgtgtccttcaaattgacaggctggtttgcagactgctgaagctgggagctgctttccttgtcccttgtgcccttcctcaggacctcctgtctctctctttccaggaagatccccaggtttattcccttgagggatacttctaagctggttcctgcttggggctgtgttttgggcttcttcgtagcccaaagagtgcagctagctcctgtactagtgaagtgccacgaagctggcctccaggaaatccccacgaggccacaacccacagctatctccatcagaggaggtgcaaatgagggcccacaccttactccattttggcagccgccctaggaagctctgcctttatttcttcatcttcaagcttatcacaatttgaagtttatctcttcacctccaagcttagcacagtgcctagtacatattagcacttaatgaagagggggcaattcaaatcattaactcatttaataaaaaaatagtaaatgtcccacgcaccgtgctaatgttttacaaggattcttggtatttcatttacacaggtgccattacaatttccattcggcaaataaagaaaaaggtccagagaaattaagtgacttcccaaagtcacaaagttctggtatctcttcactgcctgagacgcaacggagcatcgtagagggaaaatgccagaaagcaggcagtgcaccaatgaaaacaggctcgcgggagaaccaaagggtggcaagctcagcacggccagtagctttcaccctcggttgccagtcggcttcgtttcctacaacaccgaccggaagtgtttctgtcggccgcgttccgaatgagcaccgccggaagtttctgccgcggctttgcggggacgggggagtggtagtgggggctgcagctgccggacccaggtgcggaagtgcgagggcccaggtggctgaaggggccgttaggaacatccaagcggtggggcacaggcagatccccgacctgacctggaccacccttctcctcttggcccgccccttcaactcgcct

SEQ ID NO: 1350 - DNA, 2300 bp, Homo sapien
gatccccaggtttattcccttgagggatacttctaagctggttcctgcttggggctgtgttttgggcttcttcgtagcccaaagagtgcagctagctcctgtactagtgaagtgccacgaagctggcctccaggaaatccccacgaggccacaacccacagctatctccatcagaggaggtgcaaatgagggcccacaccttactccattttggcagccgccctaggaagctctgcctttatttcttcatcttcaagcttatcacaatttgaagtttatctcttcacctccaagcttagcacagtgcctagtacatattagcacttaatgaagagggggcaattcaaatcattaactcatttaataaaaaaatagtaaatgtcccacgcaccgtgctaatgttttacaaggattcttggtatttcatttacacaggtgccattacaatttccattcggcaaataaagaaaaaggtccagagaaattaagtgacttcccaaagtcacaaagttctggtatctcttcactgcctgagacgcaacggagcatcgtagagggaaaatgccagaaagcaggcagtgcaccaatgaaaacaggctcgcgggagaaccaaagggtggcaagctcagcacggccagtagctttcaccctcggttgccagtcggcttcgtttcctacaacaccgaccggaagtgtttctgtcggccgcgttccgaatgagcaccgccggaagtttctgccgcggctttgcggggacgggggagtggtagtgggggctgcagctgccggacccaggtgcggaagtgcgagggcccaggtggctgaaggggccgttaggaacatccaagcggtggggcacaggcagatccccgacctgacctggaccacccttctcctcttggcccgccccttcaactcgcctccgcttaggtctggattggccccgccccctgacctgagcctggtccttcttcaggcactgacccttgacctccggtggctcccccatctctcaggcgcgatggctacgggcgcggatgtacgggacattctagaactcgggggtccagaaggggatgcagcctctgggaccatcagcaagaaggacattatcaacccggacaaggtagcaggggcacctgaaagcgttgactaggggagggtaggggagtgaagatggggaggagtgacaacgggcaagggatgggtgctacacttacagtgagttgggcgataaaaggggtgacataacaggacagggaatatgtgtcatccttgatgggagggaggagatgggacatcgtgggagatggtgggaccaagagggtatgacacctctaagagctgagaggaccaggcaagtgtgatttttgcaagatattgttggggagagatcaagacattgtaacagtctgagagttggtgggatggggaggggactgctctgatttgggcgtaggatggtgttcctgggagtgggtttctgtgcctttacagtgtgtcagtttgcctgtcattgaccctgtaggtgctgctttgttcagggattgagctggactaaagaattttcaggaaagggtctaggttgtggttcctttctgtggtttccttcctcagaaaaaatccaagaagtcctctgagacactgactttcaagaggcccgagggcatgcaccgggaagtctatgccttgctctactctgacaagaagcaagtattggagtcccaagtcccccaggttttggcccctgattcacctgccatgcccctaactcctagttttctctaacaattttctcctccccagcaagggctcctgcttgcttagcaggatgcaggaggacctgaagtcttttgctccaggacatgactttcttgctatagggtagggtagatcagctccctgggacaaaaagctctttaacacaccttctgattctaacctcgcatctccctaaacctccctgccagggatgcacccccactgctacccagtgacactggccagggataccgtacagtgaaggccaagttgggctccaagaaggtgcggccttggaagtggatgccattcaccaacccggcccgcaaggacggagcaatgttcttccactggcgacgtgcagcggaggagggcaaggactacccctttgccaggttcaataaggtaagctaccttcattcggacacaggccaagattgccctcccactttgagccatttgtgcgagctctccagtctcctagggttggttctgggggcacgcttatgcccaactgtgattacccactcaatcctcgt

SEQ ID NO: 1351 - DNA, 2300 bp, Homo sapien
aagacattgtaacagtctgagagttggtgggatggggaggggactgctctgatttgggcgtaggatggtgttcctgggagtgggtttctgtgcctttacagtgtgtcagtttgcctgtcattgaccctgtaggtgctgctttgttcagggattgagctggactaaagaattttcaggaaagggtctaggttgtggttcctttctgtggtttccttcctcagaaaaaatccaagaagtcctctgagacactgactttcaagaggcccgagggcatgcaccgggaagtctatgccttgctctactctgacaagaagcaagtattggagtcccaagtcccccaggttttggcccctgattcacctgccatgcccctaactcctagttttctctaacaattttctcctccccagcaagggctcctgcttgcttagcaggatgcaggaggacctgaagtcttttgctccaggacatgactttcttgctatagggtagggtagatcagctccctgggacaaaaagctctttaacacaccttctgattctaacctcgcatctccctaaacctccctgccagggatgcacccccactgctacccagtgacactggccagggataccgtacagtgaaggccaagttgggctccaagaaggtgcggccttggaagtggatgccattcaccaacccggcccgcaaggacggagcaatgttcttccactggcgacgtgcagcggaggagggcaaggactacccctttgccaggttcaataaggtaagctaccttcattcggacacaggccaagattgccctcccactttgagccatttgtgcgagctctccagtctcctagggttggttctgggggcacgcttatgcccaactgtgattacccactcaatcctcgtggcaaatgcatgcagagtaggactctgtgggtcttttctgcccaagggatcctgttctttcccggacctgctctggtttttcatggcttttcttggtctttcaaatgttgctgttcctcagagctgtatcctaggtgctctagtcttcttgttctctactttcttagtatgaaccctgtggcttcagttaccctctctacaagtcaccaatccagagcagtgcttccttcgcatccagtcatttactaatatctctttctcaatgccccacaggtaccttacatcaggtaggtaccctgaacagagctcatcatcttccctctgtcagtcccaaatctgttccccatctcagtgaatggcactatcttccacccagttgcccaaaccagaaacttgggggatcgtccttgacttagtcttctcccttagtcctcacagtatttaaatcaacaacagaacaaagaaggtaggggaaaacaaacaacaaacatgtaaggaaataaattggagtctttcaaataagagccgtcagtaacacgaaaccaggatttgaatggatatgaaatgagataaagagtgaacttgtaggtgtaggggagtcctaccttaggttggtcagggagggtctgagaacgtggcatttgagctggatgccagtgatacatctatttattgagtcctgttgattctttttccataataaatcacatctctgactatattcttcatcactatgccagccccctagtccaagctgagttacctgtgtagctcagcacagcacggccttcccagactcacccattcagtgagaggcagagctagattgggctaggtttcctagtccattacttaagtcattgtacagtgtggcctcacagctgctgcggcctggaatagcctagacttagatcctaaaagcctcatttacctcttctctaaccaatctttgtccctgggctggagtgtcacttgttataccctatgtatcaaacttcccacacggtaccaaaattgttttttcagctgcagtatgagctttgagaggctaggatccctgcctgtcatatgcagcactgtgtctccagcataggtattgcagccccatggtaaatatttgttgaatgaatgaaaaaatgtcttcctcacttgactatgagctacttgagaggactggctgcacagttcctgaggattttttttttttccttctttgagacagggtctctttctgtctgccaggctggagtgcagtggtgtgatctcagctcattgcatcctccacctctagggctcaagcgatcctcccacctcaccctcctgagtagctgggaccaccggcatgcaccaacatgcctggctaatttttgtgtttttttaagagactgggtttcac

SEQ ID NO: 1352 - DNA, 2300 bp, Homo sapien
taagctaccttcattcggacacaggccaagattgccctcccactttgagccatttgtgcgagctctccagtctcctagggttggttctgggggcacgcttatgcccaactgtgattacccactcaatcctcgtggcaaatgcatgcagagtaggactctgtgggtcttttctgcccaagggatcctgttctttcccggacctgctctggtttttcatggcttttcttggtctttcaaatgttgctgttcctcagagctgtatcctaggtgctctagtcttcttgttctctactttcttagtatgaaccctgtggcttcagttaccctctctacaagtcaccaatccagagcagtgcttccttcgcatccagtcatttactaatatctctttctcaatgccccacaggtaccttacatcaggtaggtaccctgaacagagctcatcatcttccctctgtcagtcccaaatctgttccccatctcagtgaatggcactatcttccacccagttgcccaaaccagaaacttgggggatcgtccttgacttagtcttctcccttagtcctcacagtatttaaatcaacaacagaacaaagaaggtaggggaaaacaaacaacaaacatgtaaggaaataaattggagtctttcaaataagagccgtcagtaacacgaaaccaggatttgaatggatatgaaatgagataaagagtgaacttgtaggtgtaggggagtcctaccttaggttggtcagggagggtctgagaacgtggcatttgagctggatgccagtgatacatctatttattgagtcctgttgattctttttccataataaatcacatctctgactatattcttcatcactatgccagccccctagtccaagctgagttacctgtgtagctcagcacagcacggccttcccagactcacccattcagtgagaggcagagctagattgggctaggtttcctagtccattacttaagtcattgtacagtgtggcctcacagctgctgcggcctggaatagcctagacttagatcctaaaagcctcatttacctcttctctaaccaatctttgtccctgggctggagtgtcacttgttataccctatgtatcaaacttcccacacggtaccaaaattgttttttcagctgcagtatgagctttgagaggctaggatccctgcctgtcatatgcagcactgtgtctccagcataggtattgcagccccatggtaaatatttgttgaatgaatgaaaaaatgtcttcctcacttgactatgagctacttgagaggactggctgcacagttcctgaggattttttttttttccttctttgagacagggtctctttctgtctgccaggctggagtgcagtggtgtgatctcagctcattgcatcctccacctctagggctcaagcgatcctcccacctcaccctcctgagtagctgggaccaccggcatgcaccaacatgcctggctaatttttgtgtttttttaagagactgggtttcaccatgtttcccaggctggtctcaaactcttaggctcaagtgatctgcccacctcagcctcccaaagtattgggattacaggcgtgagccaccgcacatggccctgagttgttggtttgtttgttttttagttaaattgaattaaaatgcataggagaaatatgtaaccaaacctgggaaaccagagagacttcccagaggagatgatgcctgagagctcgaaaggttgagaaagttacctaggtagaaggaatgtggaagtggaaggcatttcaggcaagagcagaggtcaagggggaagtctgctatgttctagaaactgctagtcatttggctgcagtttagggttcatgagggacagtggctgcaggaggaggccaggtcatttatttgtatgttcattaattgatttggtagacactgatacatacagtgtgctgagtcctaaaggtgcgagatgaactggacaacccttgctcttcaggagtttgtgaattatctagaagatgctttatcttagatggagagcttctgaggagtttaataagggatagttgggggtaatgataagatatatattctagaacactaggacagtgtgtctcaaatcatctgtggtgaaggacatttttctattttatttctaaaccatcagagactgataaagataataaaattataaagacaaaatacaagtccatgtttcttcatattagattcaacagcatacaattgctgtaaaattgttacgtaagtttttcagtgtgtactct

SEQ ID NO: 1353 - DNA, 2300 bp, Homo sapien
gtcacaggttaaatttcattgtgggcccagctaacattgttagtgaggagctggctgtatttgtttccttagacaccagggcagccatactcaccaggctatagagctctttctgttgaggaagtgtttcttctacttaggggaagaggaaggacacatcggaaaaatcaggagtcagatgagcctgattcatgggcaacacctcagagttggctcttggaatcctggatacctgattttgcagggggaccaatgtgtatttttttggtgtgtgttcgattttgttattcagttccaaacccccatttactctgtatgtaatgcttcttggggaacagaaggtccagggaattgggaaatgagtgtccccctctcttcaccttggaaggagaggtattacctggtctaagcagcagtctgggcctcccttctctcccctctgcctcagccttgcagccattttgccctttctatctctgggaataagctcctgtcagcttcctcatctttggagatcagcccacggagacaaggcaaccacaatctttgaatctctctggcatgaagtctgactgacttgatttggttttcggtcctgatgtgttggattgaaatagatgctttaaaaacaagcccaatattagtgggtatgttttgccgggaggatacctggctttcctgggacatcaaggagattgaccatttctccttgtgttttcccacccatcaatttcctaagtgcagtcaggtgtcatccgtttcgtgttgcttctccaggctgtctctggagagaaccactttaccttgattttaatgatactggaaaggtcttctccagaatgaaggacctggggaaggggtgctgctggagctgactattagggtcactgaataggcagagcccccttcctttctctctgcagtggaggccctttccacatgctaattttactcagagaattttgcttttatttattttttttattatttcctatttgtctcttccagatgttttcagggcagtttttttttgtgttgtaaactaattccattcatgttttaaaaatttatgaaagcgctaataaaaatgtcaaagtggtaaaaatgttagcttttcctctgctttgattaaattttgcaaactgtttttgaatattaaaaagcaataattttttttattctctctcctcgctttccctcttctctctggtacgcacgtgctctcttctgccctctccccactctggtgcgttcctcccttcccaggagcgatgtatgaggcgtgctgcacagccagcgttctgcaagcctgtttgcacaccaggaccttggtgctgtgcatctctattaaatagcggagacaaattaatcttagagacaccaaacaaattgtcactccttgtccttctcttccattatgtttcagtggactgggaaaggctagctaagcgattgggctggcgttgtagaggtagtgtgtgctgcctgaaaggtgggaggcgctagctcctattactgttactcttttctccttctctttgggatcccctttggctttattttttatctttttttgaaaaataagaactaatgaagaaacttaccagcttggttcaaacttcatacaaggaaatctatgcattggtctgatggctggttgtctatatggcaggagatcagacccatttcaggacagggacctgggcaagagaaagaagggcgtattcttaggggctcaagttagcaagcctctgctagagaaccagttggagaaactggggcagatgataccactgtcttccttcccatttccagaaacaatggggatgagggctgtgttcagtccctggaacctatgaggatattagcagtgggaaggttaggattgtaactgctggtgccgtctcactcaatcttgggtttggcctggcaggagctaatgaacccaaaacactaatgaatccaaaacactcattctttgttgacttggagctactgttggaaatggttgattacaataacttatttttccttttctgtatctttggcactccaggaaatcatcgagttccccatcctaaagctaaatggccggaccatggagattgagtctacctttcacatgtatgtccagcctgtagtccatccacagcttaccccattctgtacagaggtaagggccctggaagtgggcagcaggggctgctgggaggggaattttggaatccttggtgctctatataggccacttagagaaagcatagggcttatcaatccttaaggcaagtgcacactagacc

SEQ ID NO: 1354 - DNA, 2300 bp, Homo sapien
gcccggcccaggctctgttttctagggaaccagatagcacacaacagagccatggcttgagaaagccaagtgctgtgttaggcggcagtgtaagataccaagtgtatactgagctgttaaactgttctattatttgaatcaatttgcctggtctttgtacaaaaagaacttacagtgtggtgaagtcctggaagctgtacagttgagccctagtgcaccaaggaggaaagaacacattctggggaagtcaaggggaccatggaaggctccacagaggatgttggggctgggcattacataaagccttgaatccagatactatagatttacttcattcttacagccaagaagattggctgtgccctactctcaggccataactcagtatataacaaagctatctcactgcctcttgtcttatttttatatttacttgttttattatctattcttcctcctacagcccctccccaatttatttattatggctcactgcagctttgtcctcccaggctccagtgatcctcccacctcagcctcctgagtacctgggactacaagcacgtgccaccatgcctgcctaatttttaacttgtttgtagagatgagaatctcattatgttgcccaagctggtcttgaactcctggtctcaaaggatcctcctgcctcagactcccaaagtgttagaattacagacgtgagccacgacacccagcttccctctccaatttaaaagctccttgagaatagaggtgtgtcgttattcatcaatgaatcctcagcaacagaaacagtgcctgacacttaagagaggcactataaatacagatggactgactgaccaactggggttaatgtgtaggtaataataggagaatctgttccagctccaagagttgggggatagtgcctccactttactgacctcgggataagtctgtccctgctgctggatattccctcatttgttcgcagacatttattgcgggccttctttatacctgccctatgcggtgtattactgatacaacatgaacaatatggaaaaaatgcttttcctaaaggacttaaaaccctgtgggagcgacaacaaggaaacagacaattataagacaatatgataaatgctataggtccacagcagaatcacctaacctatgacgtgggtgggattaaggaaggcattccctgatatggggattaccaggcactctcagctcaggtggaaaccgttatggtaaggtccgctctcagaggtggtagggcccagaaatgacatcatcctaagtgtaagtatgcagacagcacacagaggggcttggtaactgaagctgggcccagaggatggggtcctgaccgattgggaagctgtcaaagccatcattcccagctcataacctgggacccatgactacccagaaaggcataaccaggatgaagaaacacaggtctctccagcttactggagagactgactggggaagctcctcacagctgaggccagaaaccttttaaacagaagtttcctctgagtggacctgaacaagccagttccctcttccttaggacggcccttcacaaatctaagcattttcctcttagcttaatccctccttgtctcaggtctcccccaggcccacatccgaaagtagatgacaataattacttgttgaatgaacgaatcatgaggagtcatgtaaatagaattctgtcacgttgtgagcccacattcaccttacgggtatattggagggcgggaaaacggagatggggggctccactaatgtgtgtctgtgatcctggttagatcgctgtaggccatagaaagtttcattttaaaaaaattcctttcacagatcagaagtgatgtccccgtccccgtcttctcttctgagtttgtgcaacgtcaaaactacaagtcccataaggccggcggccgggagtcaccatcttgacataccttagcgcgcatgtcggcgggagagcgagcgtttggggagaagaagccccgcctgactgcagcccattggtcaaaggggtcggcagcgggctcagcggttggccacagcgcccgcccgtccgccgcgtcggtcggggtcagagtgcgcggaggtgagtcggtgtgttgtggactcgtggtgctggctgccgctgttcaggcggccgggaacgggcggtggggagcgggcggagctggccctgcctctgcctggccggcgccgcagtcggcgcgggccgcgcccgccgccgccaactgccctgagcgcttgctgaggccgagggagacgtcggggcctgc

SEQ ID NO: 1355 - DNA, 2300 bp, Homo sapien
attcattcaactaagagactgatgctgtaaggtgcttagggtatgatgtagaatgcaacaaacatggttcttgacttcatgaagtttacaatccagcaggaaataataatttagtggaaagaatagagcctaacataataaatgctggtgtatgaatgaatgattaaacatggattagaagttcctcaacaggccaggcgtggtggctcacccctgtaatcccagcactttgggagaccgagacaagcggatcacttggggtcaggagtttgagaccagcctggccaacatggtgaaaccgtatttctactaaaaattatttgggcatggaggggcatgcctgtaatcccagctacttgggaggctgaggtaggagaatcgcttgaactcggggcggaggttgcagtaagccaagatcacaccactgcactccagcctgggcgagagagtgagattccatgtcaaaaaaaataaataaataaaaataaagttcctcaacaaataatcctgatatcacgaattatagaaatagttgtaaatgtagaactctaagtgatcaaattaacaatttatttagagttgccaattaaaattttaaaataccaacagcacacatatacataaacatacttaatatttagatgctaccttaatgttaaacataagtaaaaaggacaatgaaataatagcaagaatgagattttgagtctcattctttttagacaatttataatcctatgtggttctctgtaaagtggattatcagtgtgtactccatttctccccaccctcccttttttttttccagatgagaaatctgaggttttagacacttaactacaaaacaaaagaatgacttttttttttttttttttttttgtcacccaggctggagtgcaatggtgtgatctcggctcactgcaacttccgcctcccgggttcaagcgattctcctgccttggcctcctgagtagctgggattacaggcgcatgccaccacgcccggctactttttgtatttttagtagagacagggtttcaccatgtttgtcaggctggtcttgaactcctgacctcttgttccgcccgcctcggcctcccaaagtgttggcattgcaggcgtgagccaccgcgcccggccaggaatgacttcttaaaccaggatttgattttggttgaactttgctttcagaactagaactacctgctatccaagacttgttaaccacgttttcatgggcaaattacaaaaccctttcaaccccagtttcctcttctataaactagtggtaatattattatctccagaattaatcttaggagtaaatgaaattatgtaaaggcatttagtctcataaccgggctcctagaaagcactcaggaatgttagttctctatccatttcccctgtttatctttgtgtttgatgaattataggatgatatgaaatgatctgaaatgaactgtaatataaacatcaataaaacaccaataaaaaattttattctcacatctggatgctatactaggccttcacctcctccaaaagttacagttttattaatattcatttattatttattattatagtcaaagacccagagaagcattccaggaacaaagcagcaggtaagatttttctgggaaaagacagagattttgagggacccaggatttgggggtcatttaagcagcagtggatgtcagtcttcaagctttgcccatttactcttggtcccttttggttcaggaaaggaagaacaacaagcacgaaaccattcactgagacctttgcgggtgggggaggagggatgtaaacaaaagccaacgctctctttagttcacaatggctcgcgaccccaagacttccaagctctttggtgagggccagcaggtctgttctccaggagtgccctgggtctggacttcatttcccagagtcccttagtgccctaatgtattcagtgctcagagtgcctgtatgtgtgtgagtgtgagagaatgtgtgcgtgcgtgtgtgtgtgcgcgcgtgtgtgtgtctccgagtccctgggagagtggaggctcattcactgattagatccagcgctgagaggcagcactgctccttctctcacgccaactgagtctcttgatctgtacatgcaatcccaggcagctcgcgaacacaaacccggggccagccgcctactgctgctgctgctgctgccgctgccgccgccgccgccgccgctgcctccgccggctctgcgaacccgggacttttcatgcaccacactctccgcctgcttccctccgtg

SEQ ID NO: 1356 - DNA, 2300 bp, Homo sapien
agttatttaaaatttggaagagagaaaaatccgttaatgtgagatacataatctggtaatttagcaatgatgtctataaggaaagatgccaaatgaggaagcagtctgatggtgtccactcatcttcccaattaataacagtcattgacatgtctgctacaggatgggagaaggaaatactctctttgcactgcattaagccaggaggattcatctaccgtttaactgatgtttctctgtttgagggaataccaaagatactccaggtgggctttttaaaagggacgaggtagattttatttctgatatgactctcaatttaaaggtataatttgtagcagacggtgatttttggttatgctttgagtttcactaagtttctatttcgtgtatatttttgacactaataagtcttggtattcatcttatattgtcccggcttttgatatatagcccttctcccagcccccactcaaaatacactttggaatggaaccactgactatgaaaatgtacaacctaaatttacaagggaaactgaaagaagtctctccgaactccaatttgttccgggggcctttattggacatcagctctgactgggccaataagcagagcaaaataagtcagaaattttgttaacattttgttctaaatgttaatggcaaatccaaggcagtttacaaatctacttaagagtgagtgcattagtaactaaaatcaccgatctgttctttgctgcccttagaagacagatgcttctagagagcgtatgccaaaggcacccattatggttttaagtgttgtcagagacgccaggcattttattgatgaaggttttgttccttctcagaaaagagaaatagaaagcccatgtgattagagagaggtgtgcctcaaaataaatgttaatgctgtttgttcatatagcacttttttctggaaacagtcttagatgatacatgaagatgtgtgtgtgtgtgtatatgccaatgtgtatcttttatccatgtgtatactttgtactaactaatatgtacaagtgttcctggtctagatgaacttgaattagggatatttcagtatcagggtgttgttaggggagatgaagagaggatgcatatgtggggaatcgtataggtagaatgtggtctctgaacatcaggcctgccatgagtggtggatgcaggtggaagcactttaaaacatagacccccacttaatctactggatggcttggccttccaaagctcatttgttcagagaatatcgtatttggaggttttatgatatttttttctttgctgggctcaggcgcatttcacccagaacgtgtagggaccaaagtcagctacgcgtacatcacagtaagttgtctattgattttcctgaatgaaaatggtctgatgctgctgcccactggctcctaaagcctgtggtgtctcttgcccgagcatctgtgagccagaaggatggtgtttcgatcacttggggtttccctttttttcctccccctgactttcctcccccttctttttttctctttgctgtttctacaggtcttaggagggaatgattccccagtaatattccctgccctgacccaaagtgctggttggcctccctcccagggaagactgcttcttgcgtaacgccggccacagaaagagactccgatggacttacaccgggcagccttcaagatggagaactcatcctaccttcccaaccctctggcatccccagcactgatggtcctggcatccacggctgaggccagccgtgatgcttccatcccttgtcagcagccacgaccctttggtgtacctgtctcagttgacaaggacgtgcatattcctttcaccaacggttcctatacctttgcctctatgtaccatcggcaaggtggggtgccaggcacttttgccaatcgtgatttccccccttctctactacacctccaccctcaatttgctcccccaaatctagattgcaccccaatcagtatgctgaatcatagtggtgtgggggctttccggccctttgcctccaccgaggaccgggagagctatcagtcagcctttacgccggccaagcgacttaagaactgccatgacacagagtctccccacttgcgcttctcagatgcagatggcaaggaatatgactttgggacacagctgccatctagctcccccggttcactaaaggttgatgacactgggaagaagatttttgctgtctctggcctcatttctgatcgggaagcctcatctagcccagaggatcggaatgacaga

SEQ ID NO: 1357 - DNA, 2300 bp, Homo sapien
aacagaatgatgtatctggggacctgctagcagtttgcttttgttagaaagtagaatgcaaggaaagttagtaggtgaagctggaaagcaacccagagactagctgggtatcccatcccttgctctttacacaaggcctggcatgtagtagttgttcagctatgtcggatttttaaagtcactgagctaggccttgaaaccagggggtattggtttctggggttttgtttttgtttttcatagagacagggtctcactatattgcccaggctggtcttgaactcctgggctcaagcaatcctcctgcattggctttccaaagtgctaagattaaaggcatgagccttggtttctggtttgaattctcatttacttagcccctgctgactaactaaccctctttatcattacctcacttaaacctcatagcaactgtattcatcatgcccagtctattaccaaggaaacaggcctagaaagaggtgactcttctaagaacacataaattgtaagtaacagaattaggacttgaacttgagtctgtctggccctaaatccgagattgtttcccaacccatcactgggctcagggcttatctcataaagtctttctcccgttcccactggtgtctccttcatgcaagacgctgtgctgggtaaatggctagagatgaccttccaagtacaagggacagatatgtaaacaaacaatcaaaatatacatgatcaaagagaagcagtggaactgaaaactcagaggaggcatcaaacccaggcttgggggacaaaactaagtcttgccagagtcctgaaggatgaacaacagttaaccaagcaagggatactggagggcatggaggctctctggcctggagtgcagagcatggagtgctcaaagagctagttagctctgcaaagctgagtgtcaggaatgtaaagggagagaataggagtgagagaagagtctggcaaggcagacagggaaggcctatatgccttgatggagaaccactgaaggatttaaagaaggagagggttaattttgtccaatagaaagatcacattgtgtgtagtgtggaggatgggttgcagagagagaagctagagaccaaaagatgagacgggaacagctgcaaatttcgagagctcgtaagattatgtatgactggagcacaacgacaaccaaggtaggtacaaccatggaagaacaactcagggctgacttgcctttgcccagtgccatgctgggctctgggttcacccaaataattcacacacggccccaaccctgaagtggtcagtccactgataaaaacttcacaagcgatgataacggcgcagagatgaatgtactcttacacaaggcaaagctatttttcagttagacctggaaggatgagtaggagatacagaggtggagatgagaaaattagcgacctttcaatgtacactttcaggatctagaaaaggattgagtgtgagggatggagaaagtggggtccaggacgactctcaactttcttctgtgggcacacctgagtagatagtggcttcctcttatgaacagggaacccaagaggaaggcctctgtttggaggatactgagttccatgttggccatgttggccgtgtgggtatgcagtgcctatgggagctccaggggccgtgcagcagacagctgacatgttgggagtcctctgataacagaactggatggcctaggggttgggcggggatcgcccacaggcgatagggaattcggacgccttgtcccctgtaaagcacccaacgcgatgcctctgccctaagggcagccgcgagaaaggcaggcacaggaggcgggagccggggccgggcgatggggcggaaggagccccgcagcgggaggggtcgtggagtggggtggaaggacttcgcagccgctaaagattgggtgggtaggcttcacgggcggtgggagggaccccggggaggcttctgccggttgctacccgagtacaaacggcagcttcctggtctctgtccggccgcccccgccgcattgtgaactttcacccccagcgcgcgacggcggcagatcacgtgattagggccaacatggccgccgccgccgcttggagctgaagtgccgccgccgccgggcagccacggggaatccgcccgcatcgccgccctcgccggccgggcggccgtggggcccagagcgccggaggccagggctggggcggcaccgcgcagcggccacggggtcccgttagagcagcgcccggcggctatgccgagagcccggagcggccgga

SEQ ID NO: 1358 - DNA, 2300 bp, Homo sapien
taaattaacactgattttttttttctcccttctcaataacccaggaagaaatgagtttatgggagaagggtcgtttttataaaacgtagacctgtgtttcatttctgcacttaactctctccctctttgttgctcagttttcactgtgaggagaaggatatttttttttgcactacccaccccgccaggaatggacaactctggcaccaccctgctgggtatcattgaccatcaggcttaggttgcctatgggtgggggctcaggcctttatgccactttaagctggggcagaactgtagcaagaggccctccctggtgactgaagggtactctgggccatcttggaggtcctgggggctgagttccttccctagatagcagtagtaggagtggcagcttgcctgttatcgctggagctacatggaagaggagccagagacttggaaaggagctgtctgtgccatcttgcctctgagtactggcttgggatattccagcagctgagaacatcaaacgactgtggagccttcctctccaagcgggagggggggcaagctggcgggggcgctgtctgcataaaacggctttatggccgtttctttttattatgattctgccagaagtcagcaagtgacatttcattaagaaaataaagtttaatgtgctgggaaagaggttggagcaggctggggcagcacaagagtgaaattggcagcagcagcctgttctgaacacctgtgggggtagggagaggttcccaacatctgtctcagctggaggatggggtcagggtcagagtgaatggctcagaccagaggcagaggccttttctttggcaaacaaagtgtgtcgtgctgtccatcctgcctcactggccagcggaacagaaagctgctgcccggctgggagctgggatctgataaggaaagttgtatcctgagagatttctctaggccaccagctaactaggacctaatagagcagtgtcgccagtgtttagccagtactgctggggtgtgctgtgtggcaccagccatcagcctggccagctctgctgggtgatgctgagatcacaacagtgagtcaaacttgggacccttgcagcttccactctggtgagggacagtgacaataggtggtaataaatatgattttggagttacacaggattctgggtggacaccagggaagggacacctgtgtataagaacgtgggaagccccatctgccacgcagagcaccatgaggatagggatcagatcttgaagctctctattctcaacatggagccaaacagaggatgagcccaataaaggttgaaagaatggcattgaggtgagagttctttcctttagcagggatttagagagcagctgctctgtgtgggcactgtgagttaatggtaggaggcatggttgggctgagtcagacttgccaaaggagcaggcatgtatattgtagaccaggagggagaaggttctaggcagagagcaggaggtgcggaggcatgggggcatgagaaagcacaggatttgggagaccacagtagctctgtttaatggagtatgagtcctgggccaggcatggtgggcagtaagactacagagaaaaggacttcaggctacagggctgctttctgcgttgagaagctggggcttttcctggcagctttggggtaccctgttttctctgctttgccatggagccatattgggctcacatgtggtgccagggttctctgctttccacttataaggcagggctaggcagggccaggccgagcagaagatgtgaggccagctgctgagctgcgtgtacttggggaaggggggttggcaggacttgggtgccgcaagctgtaagtgaacctgatagctacattctgattgatggtggagtttgtctcccaaactgtcagagggtttatggaggtgccactcacccacaaggcgggaattgcttgtcaggacacctggccgtgtacaggagacagagctgtaacttggtgttttctcagcttaatggccctgctgctgacctgacctgcctgctgcctcaagtgtgtcagtgcctcagggtagagggcaaatgaggactgtcagggagaggtggattgcaggctgtgcctggcatctttccttcccgatgctgcttgcctttgggattggtggtgtctttgtgagaccagagactggtggggtagaagggagaaggatcaagactcagtgtttttcagggcttgaaaaatggagaacattccagatggagtgaatagcatgagcaggggtcttaagagcag

SEQ ID NO: 1359 - DNA, 2300 bp, Homo sapien
gtgagcagcctgtgtgtgcacatgcttggggtttacagagtgaattagtagagagcaagagtaaagacataaatggacccagatcttcatggatctggctgaggagcctgggcttggttgtgcatgcagtggggagccatcaatggttttggagcaggaggaaaggtggtcagaactcagtggtaagcagaatgaaggaacagataagaggcctgaggactccctacaagacataccctaatgagagtataaggacctgagaggaaagagtggacaagcagaaatgtctgaaatcatcaggcagatactaagctgcttcctcacttctttaaggatttccttgctgatcccagtagccacagagtctcacattcttttgtccctggcagggctgtgctggctagtgaggtgtggtctgagacccactaggaggaagtggggagctggggggaacagctctatagcacttgaccctaggctatcaggaagggtggtcctggatgtcagagagatcgcctggcaggtgagcaggcctggtgtagccccagcagctcgcccctccctctgagctgagagtccgtctgtggctgtgccagatgcacctcaggggtcagccacttgcgtggcccatggcctggcctccgctcagcctggttgccttcatggactgctttgagaagtaggtgtgcatgcctgtcctccctcgtctgtcccttcttaatccctttataactgcacttgtccaggaatctgggctgagtgaggtggagatgaataattaatgtcaggcgcttcagacaccaaatatttgaacagctgcctggtgtttttgctggcaaggacctagcggccaaaatcaggatgttggccgggggtcccactctgtggctctgattggccttagccagcctgttctctcctctgatggacttgtcaggctggataatggggcataggggaggccccactcttttcctgtgaaattcctagacctgaatttttctgtcctcttactgttcttcctagacctggaagataggtggacagcaggcctgggctgagtgtccccgaggacgtgacataatatatgaatgggctagtttatgagcagagaccacttggagcagcatgcagtagcagagaaagatgaggtttgcagagtgaagggcctgaaatgtcagggtcaggggcactgaagtatctggctctatacatcccaggcccaggtttccctctgggccttatcaggtccaaagcctaacccctacctggaggcaacaggaggggcacccttggcctcgtcttgtccccaggccctcctcacaccctgcttcccacaggctctggcttcatcatgtgcagcggcaaagagaacccggacagtgatgctgacttggatgtggatggggatgacactctggagtatgggaagccacagtatccttggagcactatgggggctggtggggctgatagggcaggcacagggaataagaaaagtagctcttctagtattcacctgcaccaccccccgggccagagtctcagctttggccaggagggccatgctctcctgaggattcaaccctcatagcctgctgcaaactaggatccattgtccttgaccaccatgccagatacacagaggctgatgtcatcccctgcacaggcgaggagcctggtgaagccaaggagagagaggcacttcggggcgcagtcctaaagcaagtgtgggcacaggcttgggcgggtggagcagagaaacaggaagccctgaggcaggggttaacgcagtactgaccctcagggctgtcctgcccgccttcaggcctcactttgtttttcctccctcctttcctccagtggcggccctcccagcacgcgcatcacacctgagttctctaaatgggccagtgatggtaagtcctgccccaggttaggagtaatgggggagagggggtatccctagatggtggtgactgactcaagcccaacccctcacctgtgctgcccagtctggccggagtgtgagttgcccctctgtcccagcagagatgccatccaccagcaatggtgaaagcagcaagcaggaggccatgcagaagacctgcaagaacagcgacatcgagaagtaagtgtttggccaggagagagccctgggaccacagttcagtgggaggaggggccctttgctagcaggaaggcctgctgccagggcttctggccctcccaagtgcagctcagtgctgctgccctgggcacacggccggcagtggagcccagctggtgctaagcgtgac

SEQ ID NO: 1360 - DNA, 2300 bp, Homo sapien
gaatgcactcatgccaacagagggaggcaggacaaaacagtctctgagatttcttccaattctaagacccagcctcctggagcagcaaagggagccatgggatccgccactgcactccggcctgggcgacaggggagactccatctcttaaaaaaaaaaaaagaaaggggggctgagggggaaccacaggggagcaatgcaatggcagcacctgcactgtgccagggacacacatccaaacgctacctcgtaaccctcgcaatcccacgaggaggtaggcactagtactcttcccatttcacagtggaggaatctcaggctcagggaggttcaatagcttgccaaagacatataacttgtaagacatggagctgaaatgtgaaccaggaccacgaggctgccctcctggccgtgcagaaggcagctccaaccctttgcagccgaagactctccaaaggaaataatattaactgacttcatggcttgctgacgccaaaacgtgtccaaagtatttttacatctataaacccaaaagcgctaagccagcagatccagttctagggaaaaacagctggtctggggccatctgttctgcgggagtctaagggctgccctctcctagactccaaccaaagaacatgagatgctacgggagggatctgggaaggctctccttaaggaggtaagttttatggagagcagagtataagatcaaacctttgcattagaaagatcactgtggtagcagtttaagaggctgggctgcaggcagtgagacaggaggcgtgaaggcgatgctggactaatgcaagtgagggacacgctggcctcaggctgatcatacttcaaggcccttctgccagaattcccagagagaccaaactttccactctctggaccccgatctactcacactgtcatggatgcgggcctgctgtcaatcctaattttgtggagaatcctacatgtctttctttaatgtaaggagagaaacaatgctgatcgtaaatgccaattactgaactcactccatgccaggccctttacacaatctccagatggccccaacagccctatgaggaaggttactatccttatcccggttttgcagaggaggaaactgaagttcagagaaggtagcttaccaaaggtaatccagctcctaaaggaaggagtcaggatttcagtcgagttctacccgacggcagagactgcactgttaaccactgccgagaagagtggagagggacggctaagggttctgagtcccgggcttctgcgaggatcggtgaccccgcgagcctccccctccacgccttcgggaaaataataagtgataggctagatgtgggaagcccaatcccaaacaaaggaatcaggagggatccagctttcggcagccttcagctatgagaagtgattaaagggcatggacctgagcaccccggacaggaaagacagaaaaagaggtcccaagcgagcagctgactcgggcagaggcggggctcgccagggaggaacactctggggcgggacttacgaggggcggggctctctgagcctctctaagtctaggacctgccagaccctatgagggggcggcccgagggagggcggggccgcatgaggggcggggctacagctgcgctcgcaacccacaggttcatgaggtcacctccccgcgcctggacccaaccctcattccatactctggctccagcagggctgatccgggatctcgatggtgtagtccagctctgccgaggccatggtgaaggcgccggcccagagcacgggtctccagccggaactcccgcttgcgcacccgtgcctcacccgggcgcctcctgggcgccgcccaatcaccacacacctcccccaacacggcccaatccctgcgccgcgctctgtgacctcccgccttagcaaccaccgagtctcttccagagcctctcgcctcaccccactagctcggccctagcaaccatgccccgcccctattactgacccgcagccattggctaattcgcttgatctggatcaggtattggtcagccggggcgccggtcaggaagagtccccaccctctcatgtaggtgagaggcggctgaagagttgctgtattctgggaatgggcagggtcactcgtccgaacagagtcctatcctacgcggcggaagagtgtgccctttgacttgcatcgtctacctacctctgccatcctctaccagccgcaactgcgagggctggaggtataaaaccgtacaaaacggcctagggggcgcgtgccgacccaacct

SEQ ID NO: 1361 - DNA, 2300 bp, Homo sapien
ccattttggacacttcatcttgattacctttgcaggttcgtcctcctttgccagaccctcaaacttgggtgtttctcagggctctgtcctaggtctcttctgactctacacttactccctgggcaagctcaacaaatctattggtgtggctggcatctataaggccccatagactcccacactgcaacttccagttagacttatctggcgaactccagttaggcatatccaatggccttctggatacctccacttggatgttccattggcaccccaagctcaccgtgcccagaactgaccctctcctaaaaacccctgcttcctctccttcctgtttgcccaaaccaggaatctagaagtcatccttcatttcccttacttcccccacacccaattagtaaccaagtccatttttttctagctataagtgtctaaggaattcatcctgccctttccatttcagctgccactccatgctttgtgccaccataatccttccccactactgaaacaacctcctaactggtctccctccttctcccaatcctcaatccagttcctgcactaatgtttctttttttttgagacagagtcgcgctctgtcacccaggctggagtgcagtggagcaatctcggctcactgccacctctacctcccaggttcaagccattctcctgcctcagcctcccaagtagctgggattacaggtgtgcaccaccatgcccggctaatttttgtatttttagtagagatggggtttcgccatgttggccaggctggtctcgaactcctgacctgaagtgatacgcccgcctcagcctcccaaagtgctgggattacaggggtgagacaccacactgggctctttgttttgttttttgagacagggtctcactctgtcacccaggctggagtgcagtggcacaatcatggcttactgcagctttgacctcctgactcaagtgatcctcccacctcagctttccaagtagctgggacttcaggcatgcgctaccatgcctggctaatttttaaaattttaattttgtagagatgaaggtctcactatgttgcccaggctggtcttgaactccttcaagccattctcccgtcttggccttccaaagtgctgggattacgagtttgagccaccgcgcctggcatgcaaagagtctttccccctccctatctctaaaagtctttcaaggcccagctcaagagccaaccccactgccataaatgccccttctctgattctgagctcctcaaatccttactcttctgtagtatttatctcacacgcagaatcagagttgcttcatgcatggtttctctccctctcccgttaagacatgggagagggagggccaaaagcttgattctcactagggcctaaggaaccttatttagcccacccagtctctggcacatagtatgtaaatatgctggcacatagtatgtaaatatagataaatgcaagaaagttgcactcccagctcctcggtgggccctatcaacagggcattctctaaagtcatcaactgaagactgcttcccatccacccatccatccatccatccatccatccatccagaatatgcctcaaccccactgggtggaggttgggtcggcacgcgccccctaggccgttttgtacggttttatacctccagccctcgcagttgcggctggtagaggatggcagaggtaggtagacgatgcaagtcaaagggcacactcttccgccgcgtaggataggactctgttcggacgagtgaccctgcccattcccagaatacagcaactcttcagccgcctctcacctacatgagagggtggggactcttcctgaccggcgccccggctgaccaatacctgatccagatcaagcgaattagccaatggctgcgggtcagtaataggggcggggcatggttgctagggccgagctagtggggtgaggcgagaggctctggaagagactcggtggttgctaaggcgggaggtcacagagcgcggcgcagggattgggccgtgttgggggaggtgtgtggtgattgggcggcgcccaggaggcgcccgggtgaggcacgggtgcgcaagcgggagttccggctggagacccgtgctctgggccggcgccttcaccatggcctcggcagagctggactacaccatcgagatcccggatcagccctgctggagccagagtatggaatgagggttgggtccaggcgcggggaggtgacctcatgaacctgtgggttgcgagcgcagctgtagccccgcccctcatgc

SEQ ID NO: 1362 - DNA, 2300 bp, Homo sapien
cctcttcaacttcttctgatgctcctctcccccactgccttccagtcatcagttcttcaaacaagacctttcctggccaggcacagtggttcatgcctgtaataccagcattttgggaggctgaggcaggcagatcgtcaagaacaggaggccgggcttggtggttcacacatgtaatcctagcactttgggaggttaaggagggaggatctttgagcccaggagttcaagaccagcctgggcaacatagcaagacactgtctctaattaaaaaaaaaaaaaacctctccctttccccctccccctctccccggtctccctctgatgccaagccgaggctgaactgtactgccgccatctcgactcactgcagcctccctgcctgattctcctgcctcagcctgccgagtgcctgggattgcaggcgcgcgccgccgcacctgactggttttcgtattttttggtggagatggggtttcaccgtgctggccgggctggtctccagctcctgaccgcgagtgatctgccagccctggcctcccgaggtgccgggattgcagacggagtctcgctcactcagtgctcaatgttgcccaggctggagtgcggtggcgtgatctcggctcgctacaacctccacctcccagccgcctgccttggcctcccaaagtgccgagattgcagcctctgctcggccgccacccggtctaggaagtgaggagcgtctcttcccggccgcccatcgtctgggatgtggggagcgcctctgccccgccgcgaccccgtctgggaactgaggagtgtctctgccccgccgccaccctgtctgggaggtgaggatcgtctctgactggccgccccgtctgagaagtgaggagccactctgcccggcagccgccccgtccgggagatgaggagcgtctcctcccggcagccgccccgtccaggaggtggggggaaagcccccgaccggccagccgccccgtctgggaggtggggggcagccccctcccagccgccgccctgtctgggaggtggggggggggggcgcctctgcccggctgccccatttgggaagtgaggagcccctctgccccgccgccaccccatctgggaggtgtacccaatagctcattgagaacgggccatgatgacgatggcggttttgtcgaatagaaaagggggaaatgtggggaaaagaaagagagatcagattgttactgtgtctgtgtagaaagaagtagacataggagactccattttgttctgtactaagaaaaattcttttgccttgggatgctgttaatctataaccttacccccaaccccgtgctctctgaaacatgtgctgtgtccactaagggttaaatggaaaaaaaaaaaaaggaggacaggaactatgtgtctagttcattatctccatttcctggtaccatgcctagcaggtggtagacttcactcaataaatatctggtgaatcagtgtctttctggaaatttatacataactccttgaatgaggcaacatgcttctgcactatttaataagaaaaactaagtcaagtttctaatctgtggttttgttttgctttgagaacagggtcttggctatgttgccctgtctggtctcgaacttctgatctcgagcgatcactcccacctctcccttcctaagtgttgggattaacaggagtgagccaccgcgcccggccaagtctccaacttgctcgaggtcactgaacttgcaattgaagaagctacgattcgaacccatgtctgtaggatcccagagccctcattgtcaaatacatactgaagtttcccagttttcgggaaccccgcagtacaaggtgaccgaggacaataccagaaatgggagccccagaccccacgtagcggcgaagttcccagaaggcacagcgctcgggggtgtggccagacgcatgggcggtgccaagcgtaggaagatggttgggaactgcgtctcccccaaggctccgcagggcgccgctgactggcggaagcgagggcggggacagcggaatgacgttttaaggacgcttgcgcgcgggatttaaactgcggcggtttacgcggcgttaagacttcgtagggttagcgaaattgaggtttcttggtattgcgcgtttctcttccttgctgactctccgaatggccatggactcgtcgcttcaggcccgcctgtttcccggtctcgctatcaagatccaacgcagtaatggtgaggagcggggtccctaggtcaaggggactcgtgagcggtgagacgactgaaattac

SEQ ID NO: 1363 - DNA, 2300 bp, Homo sapien
gaccaggctggtctcaaactcctgacctcaagtgatctggccatcttggcctcctaaagtgctgggattacaggcatgagccaccacatgtggctcaagctctgattctaatcaccctttttctttgtaccacatactcttcttccacatatcctatgccctggcaaatgaggcagtttactgctctgtgactgcctaattccctgctgcctttacactcttattcctttctcctgggatgttcaccctgaattatcaacatgagaatcagttgattgtcagagcaaggcttaaaactctggttttcgcgggtcgtggtggctcacacttgtaatcccagcactctgggaagctgaagcgggcggatcatgaggtcaggagttcaagaccagcctggccaatatagtgaacctgcatctctactaaaaatccaaaaacttagccggatgtggtggtgcgcacctgtagtcccagctactcaggaggctgaggcggaagaatcgcttgaacccgggaggtggaggttgcagcgagctgagatcgcgccattgcactccagcagcctgggcgacagagtgagattccgtctaaaaaaggccgggcgtggtggctcatgcctgtaatcccagcactttgggaggctgaggtggacggatcacctgaggtcaggagctcaagaccagcctggccaacgtggtaaaaccctgtctctactaaaaatacaaaattagctggacatggtggcgcatgcctgtaatctcagctactcaggaggctgaggcaggagaatcacttgaacctgggaggcggaggttccagtgagccgagatcatgccactgcactccagcctgggcaccaagagtgaaactccatctcaaaaaaaaaaaaaaacctctggttttctttgttgtttatgctctctgtagtttaggggttagaaatgggggaggtatgtaccaagagtctgtggctgtcccagaagtgtggatagaagtgtgattactgaagtgcttgccagcttttgcatttagtgattctatcctcctttttttttttttatttaaatctcattctgctttgatttcctttgtacatatgacttataatccccattagaaattgagctcatggtggcaggggttgtatatgtcttttttttttttttttttttttttttgagacagtgtttcgctcttgttgcccaggctggagtgtgatggcgctatcttggcttactgcaacctccgcctcccgggttcaagcgattcttctgcctcagcctcccgagtagctgagattacaggcatgcatcacacctggctaattttttatttttagtagagacggggtttttccatgttggtcaggctggtcttgaactcccgacctcaggtgatctgcctgtctcagcctcccaaagtgctgggattacagacgtgagccaccacgcccggcctatatatgtcttaattcatctttgactaccttccccctgtaggctgctgtcttcgtggtgcctaacaaatgtttgaataggcagcaaataactgcagatttcttttttctttttcttttttttttgagacggagtctcgctgtgtcgcccaggctggagtgcagtggcgggatctcggctcactgcaagctccgcctcctgggttcacgccattctcctgcctcaggctcctgagtagctgggattacaggtgcacgctgccacacccagccaactttttgtattttagtagagacaggggtttcaccgtgttgcccaggctggccttgaactcctgaggtcaggtaatccgcccacctcggcctcccaaagtgctggggttacaggcgtgagccaccgcacccagtcctgcaggtttcatctctaggcagtaaagccctcaccctagagtacatgcttcagctctgtcacattttgaaatacaaagttgggacaaatttaatatgtctgaacctgttgtaaagctatcctggtgaagtttgagttgttcctggagaattgcaggactctgatgatgtaaacttagaattgtgacctcattgcaggcatcaacaggaaataggtaaggcatgggcaggaagccgtaactggggaagtttctgggcccagaagaaaatgtaggtagtcttagggttaggtagcagctgtcaggaacttgcccctgcccataagatcctaaagggcccccatttgactctcaccagacagttagaacttgtttcctcctccgtgtcagccatcaagaggtgcttggggggctgtgcccagcaggacctcactgcc

SEQ ID NO: 1364 - DNA, 2300 bp, Homo sapien
ttcttgggagactagggtaagggtttttggacaggtgtccttaaccgaaactctacgggcaacagagatacagttgggccccagcatttctgaggctccagttcttgaggccccaattctttttttttttttttttttttttttttgctctgttgccctggctggagtgcagtggtgtgatctcggctcactgcaacctccacctctgggttcaagtgattcttgggcctcagcctcccaagtagctgggattacaggcatgtgccgctaattttttgtatttttagtagagacagagtttcgctattttgcccaggctggtctggaatgcttggccttccaaagtgctgggattgtaggcatgagctgttgcgcctggcctctgacgctccaattctgatatccaggaaatttaactggtttatcaggattcagagaacaaataattcagaaatgtttctgaaggccctcagatgaggaacatttcatgctgactgtctagtaagcaagcccatcacatgctcacatggcgtgatggccagaggggctgcagggcacaattggtctgctctctcctatcctcccccaagttgtacgtatttggagggcagggactgcagtacagtccccttatttgggttcattgcttctgggaagcccgatctgctgtgcctcctaaaatgtggaactggccctagttccagttcctagcgtgctttggcgtatgcttaggcccctctgccaatctcttccccagtgctttgtacctggcttctcaacccagagccagggcagggactttgacaactatgaagggtggtgagcaaagagctgttgctgctgccgcataggggtctgagagcacttatatcttaacagtctgccctttttcactctcgtctcaaaccaggagtatgacagtagttttccaaactgggaatttgcccgaatgattaaagaatttcgggctactttggaatgtcatccacttactatgactgatcctgtaagtacatccaaagaacttctctttcttaagtgtacaattgagagacagaaaacttctctttacaggaatgagggcatgcaggaatctttactcacctttgagggttttattattatttttttttgagatggggtctcactctgtcacccaggctggagtgcagtggtacgatcttggatcactgcaacctccacttccctgggcttgagtgatcctccccacctcatcctcccaggtagctgggaccatagatgcattccaccgcaccctactgattttttgtatttttggtagagacagggtttcaccatgttgcccaggccaatctggaacttctgggttcaaggaatccgcctaccttgacttcccaaagtgctgggattacaggtgtaagctactgtgcctggctgaggttattttattttacttttttttgagacagagtctcgctctgtcgcccaggctggagtgcaatggcatggtcttggctcactgcagcctccacctcccaggtttaagtgattctcctgcctcagcctccccagtagctgggattacaggcatgtgccaccacgcctaggtaatttttgtatttttagtagagatggggttttaccatgttggtcaggctggtgtcgaactcctgacctcgtgatctgcccacctcagcctcccaaagtgctgggattacaggcgtgagccaccatgcccagccgaggttattttttaatatcctttggtgggctgaagctagtgaggcccacatggggaggggtctgatctttataaactgggttccacccccataccataggttggctagattcctgcattagtaaaaatcatgaaagtagtgctgaaactcttgtaggcagcagagtgagaaaaatgggaacaaaatccagtgctcccttcttgtgctctggagtatctaatggaggatgcaggggtcctagtgttagatcttggcctctgactgggccagacatgggattggaaggggtgggagttctggacaagctcgcttttgaaattgctctgaccctttgctgttggttgcctcctctcatccgcttgcagatcgaagagcacagaatatgtgtctgtgttaggaaacgcccactgaataagcaaggtaagtcctgttcagtcaggaagaggcttcagactgactaatgggccttctgtttccagggagcaccccctgaaatactctccttctgcagaattggccaagaaagaaattgatgtgatttccattcctagcaagtgtctcctcttggtacatgaa

SEQ ID NO: 1365 - DNA, 2300 bp, Homo sapien
catctgtactacaaatacaaaaatttgctggcatggtggcccatgcctgtaaccctagctacttggcaagctgaggcaggagaattgcttgaacccaggagatgaaggttgcagcgagccaacatcgcaccactgcactccagcctgggcaacagagcgagactgtctcaaaaaaaattaaaattaaagttaaaaaagacgaatggcgccaggtgtggttgctcacgcctgtaatcctagcactttgggaggctgaggtgggcagatcacctgaggtcaagagttcgagaccagcctggccaacatggtgaaaccccatctctactaaaaatacaaaaattagccaagcatggtggcgcatgcctgtaatcccaactactcaggaggctgaggcaggagaattgcttgaacctgggaggcagaggttgcagtgagctgagatcatgccactgcactgcagcctgggtgacagagcaagactccgtctcaaaagaaaaaaaaagatgaatggataaaatgtggtacatatgtacaatggattactattcagccataaaaaagaatgagatcccgtcatttgcaacatcatgggtagaactgaaggtcattatgttaagtgaaataagctgggcacagaaaaacacacttatgcaaagagaatcgcatgttctcacttatttgtgggatctaaaaatcaaaacaattgaactcatggtcctagagagtagaaggatggttaccagaggctagaaagggtagtgggagggtagggggaagtggggatggtggggatggctaatgggtacaaaaataaaatatcatcataaataagacctactatttgatagcaaaacagggtgactataatcaataataacttgtgtattttatttttttgagacagagttttactccatcacccaggctggagtgagtgcattggtgccatctcggctcactggaacctccacctcccggttcaagtgattctccttcttcagcctccagacggagttgctggaattacaggcgcccgccaccacgcccggctaattttgttttgtttgtttgttttgttttgagacggagtttcgctctgtcgccagactggagtgcagtggtgcgatctcggctcactgcaacctccagctccctggttcaagcgattctcctgcctcagcctccctgagtagctgggattacaggtgtgcgtcaccatgctcaactaaattttgtatttttttagtagacacgcggtttcaccatgttggccaggctggtctcgaactcctgacctcgtgatccgcccgcctccgcctcccaaaagtgctgagattacaggcgtgagccaccgcgccaggcctaaaaattttttttaattaaaaaatagatatccttctagctcagaaaagttagctgatccctcctttatactctcttcctaagttccgttcattctggtggctttaattaccatttataagccaacgattcccaaaataacatcttcggtgcagatcccttataaggatgaccagtcattaatattcagcttcctatctgttagtcccactcaacatgacttagcaagatctcaaaatgaacgtgtccagaacagctcctaccttagcctaccccatctcagtaaatggccccaatatttatccgattgatcaagtgacaatcttaggaatccttgacaccgccctctccctcaatccccatgtccaatctaccaccaaacccttcaaaacaaaacccaagtccacactcgtttccaattccattgccttccactctttttcaacgcagccgcacccacatctcatcctaaacgaccgcagcagcctctgaaactagtctaaacacgcccagatctgccgacgccgcagacccccttcccccagcccagggtcggaggcgagtcgccgggggtcggcagaggtcagcagcctgcgagaccctcctaggctcgtggccctaggcgcggcagctgacacgtaagtctcgtcgcccgacgttgtttcggcgctcagaaacaacgtaaagtaaaggggcggggcagcgttttacaaaccgaaccgtgaatctttgcggtttctctttccagccagcgccgagcgatgggtgagtgtcgctctgcattgaggcgggtgaagggaggttgagctcaatcaggccccatcctgcttcacagcctactgaggagtccagacgccccgacccccggccagggacagccacgaggagtggtggccctcgggtttcggccgcccagcccgtctctgggggctgcgaag

SEQ ID NO: 1366 - DNA, 2300 bp, Homo sapien
ccgagtgcgcggtggggaagccaaccttggagagctgagcgtgcgaccggcccggcgcgggggtctccgggagctggcgagtcgctagcaccgagtcacagtggctcaagcttccttccccgcttccacatgcaggcatctctcgggacaactggcacaagcgccgcaaaaccgggggcaagagaaagccctaccacaagaagcggaagtatgagttggggcgcccagctgccaacaccaaggtgggtgcgagcgtgggcctgtccgcctgggaggtcgccttcccccgctctccagcgtgctcgggtctttccgtgtgacagttgtgcgttctttcttgggctctgatttctctgtagtagggcctgggtgtcctgtccccctttagctgttggataagtaagtaccaaagagggaatgctccctcaggcccccaaacctggagcttaggatttcagagagaaggatactgtgtggggacttgagcttctggagagggtggcgcctcgcgtcatagtcagaagcctagtcttgttttttttacagaggcttaattttcagcatttggggtcaggctttcctcttggaggcaagtagggtgatgaaaaagaatccttaggcgtggttgtggccgtcttggtcacctgtgtgccacttgccaatgcaaggacttgtcatagttacactgactgttgcctcctcccggcccaggttcctctccctcacttgccttgctctccttggtaacctagttcctgtaaccttgtgttttccagattggcccccgccgcatccacacagtccgtgtgcggggaggtaacaagaaataccgtgccctgaggttggacgtggggaatttctcctggggctcagagtgtgagtgaggccctttgggagtgggtgggaaaacgcacctaaacggtcttaagattcaccaagtgggcctggcgcggtggctcacgcctataagcccagcacgttgggaggccgaggcgggcggatcacctgaggtcaggagttcgagtccagcctgggcaacagagcgagactctcagtaaaaaaaaagattcaagtgcttttagcaagtagtctgtggcttagaccaaggcatttgaagtttctccttgctgaaagatcttaaggtagctggggagttctctccacccaggctgtcctgctccaatctctttttttgagattgggtctctgttgctcaggctggagtgccagtggcgtgatcttggttcactgcagcctccgcctcctgggttgaagtgattctcctgcctcagcctcccaagaagctgggattacaggcgtgtgccatcacacccggctgcttctgtatttttagtagagacggggtttcaccatgttggccaggctggtctcaaattcttggctttaagtgatccacccgccttgacctcccaaagtgctggggttacgggcgtgagtcaccgtgcccgacctgctctgatctttctgaactctgcagcctgagagattggggctggtaaagactgcgggttgccaaacataactagaaacgtgggttagggggttgtggaagacgaactgatgccccatggcttgtaaaggctgagagttcccttatttctccttaaggcctcatggggctgaagaacctggaggagtgtgccagggccatttgtcctccagtttacttgatgccaaatttctcctgtgagcaggttgtactcgtaaaacaaggatcatcgatgttgtctacaatgcatctaataacgagctggttcgtaccaagaccctggtgaagaattgcatcgtgctcatcgacagcacaccgtaccgacagtggtacgagtcccactatgcgctgcccctgggccgcaagaagggagccaagctggtgcgtgttacttccctgtaggggttgtggggagggcagcctgactccagccttctcgtgatgaaaactctgtccagttctgctactgaagggagagagatgagagccttttaggctgaggaaggccagcactggggtgtgcagggttcgagaaagctcccagggcctgccttccttccctgagctcatatatttgtatccccttttcagactcctgaggaagaagagattttaaacaaaaaacgatctaaaaaaattcagaagaaatatgatgaaaggaaaaagaatgccaaaatcagcagtctcctggaggagcagttccagcagggcaagcttcttggtgagaaggctgttgtgttggaggtggggagtcgcagagattgagtgtgccgaggcacttttcccttgt

SEQ ID NO: 1367 - DNA, 2300 bp, Homo sapien
cagtgttcacttacctcagcactgggagggtaagtaagctgccaattctcttccactttgaggttctatttcttttcttttcttttttctttttctttttcttttttgagacaaagttttgctcttgttgtccaggctggagtgcaatggcatgatctcggctcaccgcaatctccacctcccaggttcaagcgattcttctgtctcagcctccggagtagctgggattacaggcatgtgccaccatgctcagctaattttgtatttttagtagagatggggtttctccatgttggtcaggctgatctcgaactcccgacctcaggtgatccgcctgcctcggcctcccaaagtgctgggattacaggcgtgagtcacagtgcctggcctttttttttttttttttttttgagacagagtctctgtcacccaagctgaagtgcagtggcacaatctcagctcactgcaacctctccctcccgggttcaagcgattctcccattgagattctatttctttttctttttctttttctttctttcttttcttttttttttttttttgattacccaggctagagtgcagtggcacgatctcaactcgttgcaacctgcgcctccccaggttcaagcaattctcctgcctcagcctcccatgtacctgctgggattacaagttcgtgccaccacacccggctaatttttgtatttttagtagagacagggtttcaccatgttgggccaggctagtctcgaactcctgacctcaagtgatccacctgcgttgaggctgcccaaagtgctaggattacaggtgtgagccaccttgcctggcagcggaagttctatttctatcagcgccttaggtattacttcctccagaggtgaaagtggccactcaaatcttgggcacccctaggagtcaggatgttggacacagggcttaacggagcctgcactcctaggcctgagcttccagatctgtggctgtcagccccgtggcatggatggagaagagcctggccaagcccccaagcccctgtacaagaagactgggagtgtggccagtgcacaggatgggtcctggagctcatgcctttgctaggccacttccagccttggaagtccatcagccctggctttgaatcctgcctccaacatgttctagctgtatggccgacggcgggcaagtcatttacctcttggagcctcatctgtgaaatgtggatgattgattccctacctcatggtgctgtgatgaggatttcttgagaggatgacctagtagtgcccttggcatggttcctgtcacttagtcagtgctctgtgatcagcagctggtattattataacagtttatcatgcatctgtcttcccacctgaaacgtgggacaataacccctgtcatactggcttgaaggacatggtgtcgtctgtgtgagctgtggggtcagtatagctggcatttctgccactcgaaggccagcccaaccctacaggggtaaggagacacacccagttcccagcaccaggggaagctggatgacagcttcaatccatcaatgataggcctcagtccagcctaactttatggactgcagaggtacttaagtctgtgggggttgaagtctagcccagttcatcttccacacgggctgctgcccagagcaggtaggcaggtatgggatgggggtgagagtgccctgggccctggtagttctagttaatcagcttccaaagcaaggccccaaggaatagcagtggatttgggctggagctgcgtctcttgtccgcagcagttcaggatctggttatccctagccctgcaggctgaagaggagcttgaggaaacctcatgcatgaagggacacagatctcagttctaccttgtccaactctagcctggctttgcccatgtactgctcagttctgcagggggtggggtgtacttttctgctctgcaggctcctacccccttgtccactgacgcagggtgaaggctggggtgtgtgagaccagagtggaagggaggttgtctggagaactaaacgacagccctgggggcaactcttgtgacctcctgccccaggctcccagcaccatgacggtttcatacactctcaaagtggcggaggcccgcttcggaggtttctctggcctgcttctccgctggaggggaagcatctacaagctcctctacaaggaattcctcctctttggggccttgtacgctgtgcttagcatcacctaccggtaagggcagggtcttagagctggcgcaagtggggagactgggccacc

SEQ ID NO: 1368 - DNA, 2300 bp, Homo sapien
cctgtctctactaaaaaatacaaaaattagctgggcgtggtggcacgagcctgtaatcctggctactctggaggctaaggcaggagaatcgcttgaaccggggaggcagaggttgcagtgagccaggatcgcatcactgcactccagcctgggtaacagagcaagactctgtctcaaaaaacaaacaaaacaaaacaaaacaaaataaataacggtgcaaaattgaatatgcctttttgactctctaaatgcctcagatccatttaccctggggatttgtcctttctagccccaccaccatctcccctctggaagactgctgacctataaggataaagaccagactcttgagcaggcacttagggtcttcctgcccatccctatccccaactccccctcagtaattttggctactagtatttctccacatctgaggctatcgtgggtctcccttcagtggtcatgaaggacaaggttggagaagtttgccctcgtgagtctgatgagggattgggtgggatccctctaatagcatatggaggggatgaaatgggcatgagaccaaaggccaggagagcagcaaggagctgtggcaatcatcctgacaagagagactgtggcccaggccagggtgtgaggggaagatggagccaaggggatagatatcagagctatttgggaggtaaaattggcacaaattgggtactcagcaaatatttgttgactttcctggctactctttctaaagtaggctcttcatttgctcttctgtttattcttccttcatagcacttttcacagcctgcaattaccttgtttatctgcttgcctattgtctgtttccatcaagcagaatgtaaactaaatgagggctgcaagcttgattagttttattcgagatagtgtccagcacttagcagatgctctcaataaatctttgaggaatggcatggtaattgattggctggcacagagggagggcagagaggtgagagacaaggccaggaggcctgtggtcctgggcctctgtctctggccctgggaagggtgggcattgcgcaggggtctaggggtccacgtggtccagagactagctgcccaagtgcccgtgtctagcatttgagaaaatgcaattcccagccaggcaaggtggctcacgcctgtaatcccagcactttgggacgccgaagcgggtagatcacctgaggttgggagttccagaccagtctgaccaacatggagaaaccccgtctctacttaaaaaaaaaaaaatacaaaattagccgggtgtgatggcgcatgcctgtaatcccagctgctcgggaggctgaggcaggagaatcgcttgaacctgggaggcagagtttgcgatgagccaagatcgcgccattgcactccagcctaggcaacaagagcgaaactctgtctcaaaaaaaaaaaaaagaaagaaagaaagaaaaaagaaaatccaattcccattcactttctggcctctggctgctgacccaggcccgggggtattttcagaggaagggaattgcggaccccggaggaacccgaaatttgcccctcaagagtgtagaagtgggtagcggaagatgtggcctggagcatggtaaaagccttgaaattccagactctgcttgactcctaaacctggcaaggcagccctcgggccaggcaagccaggcgcgagactgtgccttccttccaggccctaaagagggcagcactgggccgggccccgggcgagggcgagggacacacgcggtccggcacactgaaaggggagtgtcgggtaacatgcccgggcaaaagcgagcgccgcccctgcctctccgctgctggctggaacgctgatctatctagttgctggggagacgcccccagatgcccgggccccactcggacttcagcacacatcccgaaggatggggaaagaaagaggcccccacgagcgggactcgcagtggccaaggaggggtgagaggcggacagggatcagctggcccctgcggcctggttgcacctgcatggtgactagctgccgggctgcgccccggggcgcggcgaggaggcggggtctggcagtgcgttgggtgggggaggagcttctgggtgatgtaaggccgggaatgggagtggcctctcctcgactcgctgctaggaagggggcgggactctcggtgaccagacgccggggagggggcaggcgttcattgataaaacgctgggctcccctgggcgccagcgcagcgtagcaaatccaggcagcgccacgcgcggccggggccgggcgg

SEQ ID NO: 1369 - DNA, 2300 bp, Homo sapien
gccaggcccagcatggagccccggcgcgaggccggggctggacctggacctgccggtcgggcctcatcaatgctgggcaggcagcctcggggccgcaccggtgagggtttccgcccggagtctttggcattctcctcctcctggcgtcccgggggcagaggcctgctggccatggacctgctggctggaggaaccacactcagggtggccttcaccaggcatctgtctacccaccccagcctcttgctcagtgatgtcaagggtttttaccttctacccccttcttacctgtgttttagaacaagtggatcagatagtcccaggctgcctgggttcctaggtgctgagaaggttaaaggctgttagacacatgagcaggggacaggaggctgctaggactgggatcctcggctagtccttgccgactgagctccttctctgggcactatggaagttagccaggtacgctcggagtcttagagactgccatttctcccttccacccgacttctctggaaggagaggcaggcctctgcctcagcctggactgtggaggcagagcctccaacccctaaccaggaaggactgacagactcagctccttcaaccccacagatccttccagccctgggggtgttgaatccagtcatcttccacccagatctactctagggtggctggcacaaagatctcccctacacctggcccaggctgagggcagatgactcatgaagcccccttccaccttctgcctttggcctctgatcccacttcctccagaatcagttctgagatggctgccctctgctcccgaaactccctcaggcacctgagtcacccgcaggctttggcttctgagttctgtcctggctgcacagccctggccccgctggcctgaagggcaagtgggaggggaaagacctgtgttgtggagttgccatgggttgctagagcaaacactcctccctcccaggatccctccctccagtctggctctggcttaacctgagagcattgttgctgtgagcatgtgctgagcatggggtgcccctgagtcatcagggagagcggccgacagggtcttgcagcttagaggcaaacttcctaagcgcaggcaacagaggggcagatgtagagcaaggctgtggtcagaaaggctttgtcctaccccaggactcttgagccagggcccattttctccccttgtggaatggccagatgactggccattcgtgaacaagtcacagaggcctaggttagggggagatcttgaggctgcgggggtggtggctcaggaatccagagtctgggcccacaggaaggaacacgtcatggctctgttgtctccccatcggcctcgacaaggacaaacatttccgctcccggcgcagagttagggtggggcttggatgacttcctcagttcagggctatgtgcgggggaggggaggcccactggctcagctggtaggcaccaggccttataaagtggcagtgactcggcagtgaaccccgagtccagcctcgtgacctttgctgacccaagtgtcctggggcttgtccctagctggctacacctctagtacctaggtttccccaaagttacatttcagagatggcagaggctgtgacacctctgccagggctgacaactcatgtgactcctcctctggcagggatgggactgtcccctcccaaacaagccaggtcggggccctgacccatctatgggggcgaggattttccctgttgagtgggggtttccccggcctggctaaccggatcctgaccctgtgtgcctgtggaggagggaagggttaggagggcaaggagtttgaactctgaacctagggcaggctcagcttcgggggctaagaccctcgtatggcgcttaatgcccctctaagggctgaagttttccctgggcctgcccgggagatgggtggagtctcttctcaggccagctccagtttccatggaaacccacaggcttcccaccccgtcggctgcctgggcagactcccagccagggcctctttcgccgccgccgccgccgccagccagccagcttcttcccaggaccataggccactccagcctcagcttctcctggccccctccctgtgtctgttcctgtccccgagcctctggcctctgatgccttcaggagcttgggcctctcctgctccactcctaaacttcagcttctcagcaaacaggcctcccaagtccctgcttctccctctcaggccttgctaacctcaccagctctagggcctggccaggcctcccaggctccct

SEQ ID NO: 1370 - DNA, 2300 bp, Homo sapien
gagcagccagcacccccgaggcttcctgtcagggactatggctcaatctctggagctttgttcttcttgtgaagcctcagttcccagaacaggtcatctgttcctcttcttctagcagtgaggcctcaataccaagctgagtgagtggagggaggaggggaatcatgacccaccatctctaaggatcccaggggctgagaatcattttcttctgccaggggccaaagtccaaagaaggaagggctttgcctgagctcacacagcagctccaccccgccagccttgcctctggccctcagggtctcacagacactgagtgaccagtagccatgttccacatttgacctccccatagcctaagttcaccagggaggatggccaagttctaattcccagcctcttctcaccagggcctccttagagtcctggggcccacagagccagctaagaaaaacccgcaggcagggcccacccctcacctgtatcgcgggttgttgacaaggcttcggagtgctgcggaaaaaggttcagctttcccatgcacgaccagtcccaagggctccatgagtgagaaggggttggggtggaggagggagcctgggaggcctggccaggccctagagctggtgaggttagcaaggcctgagagggagaagcagggacttgggaggcctgtttgctgagaagctgaagtttaggagtggagcaggagaggcccaagctcctgaaggcatcagaggccagaggctcggggacaggaacagacacagggagggggccaggagaagctgaggctggagtggcctatggtcctgggaagaagctggctggctggcggcggcggcggcggcgaaagaggccctggctgggagtctgcccaggcagccgacggggtgggaagcctgtgggtttccatggaaactggagctggcctgagaagagactccacccatctcccgggcaggcccagggaaaacttcagcccttagaggggcattaagcgccatacgagggtcttagcccccgaagctgagcctgccctaggttcagagttcaaactccttgccctcctaacccttccctcctccacaggcacacagggtcaggatccggttagccaggccggggaaacccccactcaacagggaaaatcctcgcccccatagatgggtcagggccccgacctggcttgtttgggaggggacagtcccatccctgccagaggaggagtcacatgagttgtcagccctggcagaggtgtcacagcctctgccatctctgaaatgtaactttggggaaacctaggtactagaggtgtagccagctagggacaagccccaggacacttgggtcagcaaaggtcacgaggctggactcggggttcactgccgagtcactgccactttataaggcctggtgcctaccagctgagccagtgggcctcccctcccccgcacatagccctgaactgaggaagtcatccaagccccaccctaactctgcgccgggagcggaaatgtttgtccttgtcgaggccgatggggagacaacagagccatgacgtgttccttcctgtgggcccagactctggattcctgagccaccacccccgcagcctcaagatctccccctaacctaggcctctgtgacttgttcacgaatggccagtcatctggccattccacaaggggagaaaatgggccctggctcaagagtcctggggtaggacaaagcctttctgaccacagccttgctctacatctgcccctctgttgcctgcgcttaggaagtttgcctctaagctgcaagaccctgtcggccgctctccctgatgactcaggggcaccccatgctcagcacatgctcacagcaacaatgctctcaggttaagccagagccagactggagggagggatcctgggagggaggagtgtttgctctagcaacccatggcaactccacaacacaggtctttcccctcccacttgcccttcaggccagcggggccagggctgtgcagccaggacagaactcagaagccaaagcctgcgggtgactcaggtgcctgagggagtttcgggagcagagggcagccatctcagaactgattctggaggaagtgggatcagaggccaaaggcagaaggtggaagggggcttcatgagtcatctgccctcagcctgggccaggtgtaggggagatctttgtgccagccaccctagagtagatctgggtggaagatgactggattcaacacccccagggctggaaggatctgtggggttgaaggagctgagtct

SEQ ID NO: 1371 - DNA, 2300 bp, Homo sapien
attgattttaccctactctgccacttgaggtttatcaatcaggaacccaatagaaacagcacactcagataggatagttgaaagtttaatagagggactattgcctctattcttcccaatttccaatcctttacaccctgaattctgcaactcttagtgactcactcaacaattattaagcacctatttattgtctggtgaagaaggcagactttcaagtacataagtttttgtgtcataaatgcaattatacatatataaattgagttgttatgcagagcacaaagaagcaattatctgccaggagagagacatgaatcaaggaaggtttcaaagagggggtaggctgggtacagtggctcacgcctataattccagcactttggaaggcccaggtgggcagatgacctgagcccaggagtttgagaccaacctgggcaacatggcaaaaccctgtctatacaaaattacaaaaattagctaggtgtggtggtgcacacctgtagtcccagccatttgggaggtcgaggtgggaggatcccttgagactgggagctcaaggctgcagtgtgctgtgaaggcaccactgcactccaacctgggcaacagagggagatcctgcctcaaaaaaaaaaaaaaaaaggtgggttttgggggtgattcaagttcagtttttgaagattatctgccaagacaaaaggaccaaaacatgtacaaaggcaggaacgagggaacactgatgtgagggaactatgggagagaaggctttagctagatcacacagggccctgtgctccaagtgggccttgtgctttggagctatcagatttgcatgttagagaaatgactctggtctcagtggagagagtggactgaagagggcaagaatggaagccgggaagagtgaacagaagaaatcttgggctttgattgggtcggaaagaaagtgtggccctacccactttgatgccatctctaagacctactgctacctgacccccgacctctggaaggagactgtattcaccaagtctccctatcaggaattcactgaccacctcgtcaagacccacaccagagtctccgcgcagaggatccaggctccagctgtggctacaacatagggtttttatacaagaaaaataaagtgaattaagcctgaaaaaaaaaaaaaagaaaagaaaaagaaattgtggccctaggccgggcgcggtggctcacgcttgtcatcccaacactttgggaggctgaggcgggcggatatcctgagctcgggagtctgagaccaaccggggcaacatggcgaaacccgttctctaccaaaaatacaaaaagccgggcgtggtggtgcatgcctgtgatcccagctactcgggaggctgaggtgggaggatggcttgagcctggaaggcggagcctgcaagccgagatggagccactgcactccagcctgggtgacagagtgagaccccgtcttaaaaaaaaaaaaaaaagtgtatccctaacagagcccgcaaaggccctttctcagcgtaagcctctggacttacacttggccggcgctgcgcctctccgggatccccctccctcctcctccctggggccccgcgggcgggagggaggcgcggggtggcccagcctgggtggtctcccgccccgccccctgcggcgccgttacctagcagcgggccgggccgcgcggctagggtaatttgcgggcccctcagccaatgggagggcgtcgccccggccagctcccttttctggagctccagccgcctcccggggactgcagttgccacctcgagccctgctgtgcgtctcgggccagcaattccgcctgcgcgcgggacccattcctcctccagccgccgcggcccacggcccacggagcgggtgaatcccggcgccgcgccccggacccgcagctccctgcactcctccctcccagccgctttaacacccacaccccacagtctctcccacgcccgcgccttggcggccccactgaatccctacgcggggcccagcggtaccgggagaccgggctagcctatgggagcgcccagataacgcgggttgggggcgcccgcgccccccatccccgccagcatgactcgatcgccgcccctcagagagctgcccccgagttacacacccccagctcgaaccgcagcaccccaggtgagtagagggggagctggaagaaggaagagagcggagccaggtctgtcactcgggcctctgcaaggtttgtgatgtcttgaagtgccgagtgtcattagatgtctgaaggcaag

SEQ ID NO: 1372 - DNA, 2300 bp, Homo sapien
gtgttcgacatcgctgtcgacggcaagcccttgggccgcgtgtccttcgagccgtttgcagacaaggttccaaaggcagcagaaaactttcgtgctctgagcaatgtagagaaaggatttggttataaaggttcctgctttcacagaattattccagggtttatgtgtcagggtggtgacttcacatgccataatggcactggtggcaagtacacctgcggggagaaatttgatgacgagagcttcgtcctaaagcatacacatcctggcatcttgtccatggcaaatgctggacccaacacaaatggttcccagtgtttcatctgcactgccaagactgagtggctggatggcaatcctgtggtctttggcaaggtgaaagaaggcatgaatattgtggaggccatggggcactttgggtccgagaatggcaagaccagcaagaagatcaccattgctgactgtggacaactctaacaagtttggcttttgttttatcttaaccaccagaccattccttttgtagctcagaagagcaccccttcaccccatttgcttgcagtatttttttttttttttttttttgagacgctgtctcaccctgtcgccctctcccaggctgaagtgcagtggcacgatctcggctcactgcaacctccacttcccgggttcaagcaattctctttcctcagcctcccgagtagctgggactacaggcgcacgccgccatgcctggctaattttttctttctttctttctttctttttttttttttttttgtattttagtagagacggggtttcaccatgttgcccaggctgatcttgaactcctgagctcaggcaatctgcctgcctcggcctcccaaagtgctaggattacagacgtgagccaccacgcccggcctgctcgcagtatcttatctttgtgctcttgctgcagttccctttgggttccatgttttccttgttcctttccatgcctaactggattgctgagttaagtttatgattatgaaataaaaactaaattaaaaaaaaaaaacagggtctcactctgtcgtctaggcaggaggagtgcagtggcccgatcatagctcactgcagcctcgaactcctgggctcaagcgatcctcccgtttcagcctcctgagcagctgggactacaggcacacactaccatgcccagctaatttttacttttgtagagactggaggctctctcgcacaggctggtcttgaacgcccggtttcaagcaatcctcccacctcggcttcccaaattgcggagattacaggcatgagccaccatgcccagccgcccccagttttgatggctaaagttaacgtgagtggccctgttacaaataggaagtcccgggccgggcgcggtggctcacgcctgtaatcccagcactttgggaggccgaggcgggcggatcacgaggtcaggagatcgagaccatcctggctaacacagtgaaacccccgtctctactaaaaatacaaaaaaattagccgggcatggtggcaggcgcctgtagtcccagctcctcgggaggctgagggaggaaaatggcgtgaacccgggaggccgagcttgcagtgagccgagatcgcgccactgcactccagcctgggcgacgcagagcgagactccgtctcaaaaaaaacaaaaaacaaacaacaacaacaacaacaacaaaaacaaataggaagtcctggcaacccctgcaggggcattcggtgatttttttcactagctagccaaaattgcggctcccaatgagctttctttcaccgaatgtactcgaagccaggtcttagacttactccctgaggaaagaggctgagttgttccgtctgggttcccggcaccctgcactgggaggaatactcaaaaggcgttggtaatgtgttaatggacagagggacacacgtgtcgaatgctcctcggtggccccgccccctccggcccgccttccctcctctccgctgagtgtgcttcccctccgtcatccatcgctcggcggtcttctcttctccatgggtctgctctgcgcgttccatcgagtttctcggccatcgcgcgcctgcgccattgggctgtcagtcagaggcggcgtggagatcgctgggagcggttgcggcgtgccgggagctgagttatagctgtgacttctgccctgccaggccgcacacaagctggctgacccgggtgagcagtgcggtggggccactcatctgagggaggcgggcatgtcgaactgggccgaggtggacccgaaggggtaggagag

SEQ ID NO: 1373 - DNA, 2300 bp, Homo sapien
tatcaaagtggtagaggcttttcaccagctaatgatgatgggggacctattcattaccccattatgggagctgggctcttgagtgcccagctgagggcatctgtcatttcagggggtggtttccgggacagcctggcagatatgtcagaagagctgtgccctagctcagcggatacccccgtgcccctgcccttctttgtacgcacagccaaccaggtaatctccgtttccatctctgcaaacctcccaggtgccagattgagctagaaagggggcagaggagggggccagattgagctagaaagggggcaggcacagtggctcacgcctgtaatcccagcactttgggaagccgaggcgggcagatcacgaggtcaggagttcaagaccagcctggccaatgaagtgaagccccatctctataaaaataaaaaattagccgggcgtggtggcacgcgcctgtagtcccagctacatgggaggctgaagcaggcgactcgcttgaacccaggagacggaggttgcagtgagccgagatcacgccactgcactccagcctgggtgacacagtgagactctgtctcaaaaaaaaaaaaaaatagaaatagggcagaggagggactgagttgctcagggcaacctctgggcagacagggagaggaggagccactgtgcatttgaagggatcatttagtggaaaatgttcccagtggaaaatgttcagggaagtctttgggccaggaaaatagggtgtatctcatgccacactcacagctctgtctctggggcagggcaatggcactggtgaggctcgggacatgtatgtacccaacccctcctgccgagactttgccaagtatgaatggatcggacagctgatgggggctgcccttcggggtaaggagttcctggtgagtagccttatccacacccccgtccgatcagccctggcccttggaaggaaaggccagccaaacctgggcagctcagggtgagaagacagtggggagtgtttgtcacacaggtcctggccctgcctggttttgtgtggaagcagctttctggtgaggaggtgagctggagcaaggacttcccagctgtggactctgtgctggtgagtaggacctggaaccagtgtttcctctgcccagcccctaaaggttggtcctccctaaggctgttctgtaccttgttctttcaccacacacaagatccctctccaatccatccactcccatggcttcaactactgtctgtagactcgtgacccctaaaatcctgacctctagccccagcctctcctaagcctggggccatatatgtatctgtaccctcgacgtttgccccaagatggcatctcaggctcagtgtgttctttatcttctccgaagactactcccctctagggctcctgcctcagaagggcaccatgtcccactcctccccatcccaaagcccacagggccatccttcaccccttcttctccctcgccaccatattcttaagtcttcctctgtaatctgtttgcttttcctgtctcactactgtctccctgcctggttgaggacacctttcctccttagctaatcacttactaaaaagctggtgtccctgtctccgttcttacccgtttggtctccatgcagccacagtaattcatttcactctccttatttaaactcattgatggctcggccctgggcttaggatagaatgcagaatctgtaaaggccttacgtgaaccctgtgtctccagccacttggttcacattcaggctccagccacacagtttccttaggccttttgctctttccagctttctccaagatgttctctctcctaacttcccttatgtcccagccatcatttgggtctcagctgagacaccattttccacaggatgcctcctctggcctccaaggctggttaggtgttgtcttgatgcttttacagctcttgtactgacaccctcattccctgctgcctccatggggactgccttgcctggctgtctctgcttccctgtgagcatcttgtggaaagacagggactatctccacagtgaaaaggttacctccctgcctctctccaacccctaggtgaagctcctggaagtgatggaaggaatggacaaggagacgtttgagttcaagtttgggaaggaactaacattcaccactgtactgagtgaccaacaggtggtggagctgatccctgggggtgcaggcatcgtcgtgggatatggggaccgttctcgtttcatccaactggtccagaaggcacggctagaggagagca

SEQ ID NO: 1374 - DNA, 2300 bp, Homo sapien
gagcacgctggcctggggagggaagtagggcatgttccaagcctagcccagcttgaaagcctaagtttgagtgagactccagcagtctctgaaggcctgaggcaggaggtatctgaagtgcttcacactcatctcctcaggaccctcatcggggatgtctgtgtcctggaggacatgaccgtccacctcccgatcatcgagatccgcatcgtggagtgccgaggtgaggtttaaggctataaggagggaaagagagcccggcgtggagatgggggcaaacagagagtgtgtgtggagagaagaggatgggcttggagttggggtgaaggcgatgctgaactaactccaggatttggagctttggggcctgagccagctgggacatgccaggtataggcctgccttaaagccatacaggtggttgggctcacctggaagaggaactgagttgggaccctcaggcatcccagcattctagtggaagacagaggaatcagcaggaatagatcaatcagaatcaggtgatagaaggtgatcccgaaggtcccgagtttctaggggctaacggtgacacaaggctgagcgttcaaggagccggtcccaggtctgagggccaaggaggcagcaggtgctgtaaatgaccttactctgaccccttcccccagatgatgggattgatgttcgtctccgaggggtcaagatcaagtcatctagacagcgggaactagggttgaatgcagacctgttccagccaactagtctggtgcgatatccacgcctagaaggcaccgaccctgaagtactgtaccgcagagctgtcctcctgcagaggtggctgtggtcctggacctatgggcccttcccttcccccaacattgagccttgtgtgtctgcatggaggaggttcccaaggtctcatagtataagctgttcaagggtcagagaagcccccaggtcctgccttttcctgtccctttatgttggggagttgggggtgttacaggtatgctaaactctttagctgcagtctatctacccatgccagattcatcaagatcctcgatagtgtcctgcaccacctggtacctgcctgggaccacacactgggcaccttcagtgagattaaggtgagccgacccagccagtgctggtcttggcatttccccttcctgctcacgtagttgttcattccttagcagagttcctaaaatctactctagggcaagacctttgctgggtctgggaacataggaagaaagccagaacaaatggtccaaatttagtgtttgggaggctgttccccagcctccttggtattccagagtgtgtggaatacccaagggctattgacagcacaggcagggcagtttgcgtgaaaggtacatacagggagttaccagcagctcaagatgtcttgagaaaagtgtgccagtaggtgtgagtatgacagagggatgagggtggaaggatgtgggcaggagacaggtcctggttgcagagggccctgtgggccaggctgtgaagcaaggactttgtcccagggtagtggagctgttggaaaggtaaggaaggtaatgacagtattagatttttttgttttagaaagctctccctggtggctgaactaaggaggggactggagacaaagacagggatggactagacttgaactgaaacggtggaattggatacaggcagaggggaaagttccagggcctggacggaggctgactgcccactcattcctgctctggccacctctcctcactagcaagtgaagcagttcctactgctgtcccgccagcggccaggcctggtggctcagtgcctgcgtgactctgagagcagcaagcccagcttcatgccacgcctatacatcaaccgccgtcttgccatggaacaccgtgcctgcccctctcgagaccctgcctgcaagaatgcagtcttcacccaggtctgcaccacctagggtccgactgagataggatcagtcaagggccaagggggctaggccaagagggacctgaacaagttcttggggcaagtatagggccaggtcttgctttcctatgactcctttcctccttgcctccaggtatatgaaggcctcaagccctctgacaaatatgaaaagcccctggactacaggtatggcatgagagtgagggacttactcgggacacctgtttgtgcacacaaacacacacaaacacacacacacacacacacacacacacacaactgctcgaggcacccctcgccatgactgcttttcccaggtggtctctgagctgatgaat

SEQ ID NO: 1375 - DNA, 2300 bp, Homo sapien
tgtgccgcccggcggagggcggagcccgcctggtacccatcgacactcccaaccacctccagcggcagcagcagctctttggcgtggattatcggccggtgctcaggtactgcacttgaaggagcggggctggctgtcagaaggccgggccaggagggcttgggaacacttcagccacagcctggggtgggtgggatactggagcggaggcagggttaagagcagaaaggggcgggacgtgaagggggctcggagggagactgggagatagagccctgaagaaggctacacggcatggaggtagtgtcttgctgaccgctgatgtctccccatcccactccctactctgtgcccacaggtgggaacaggtggtggacctgacatactcacatcgcctgggatcgagacctcagccggcagaggcatacgcagaagctgtacaaaggctactgtgagtgagctggaatggggtggggaggaaggagctctgcgtctgggcccagtctaattaggggcttggggttgcttagctatgtacccccgacatggacctacgagtgcgacgaggacctgatccacttcttgtatgaccacctgggcaaggaggatgagaacctgggtagcgtgaagcagtatgtggagagcatagacgtttcctcctacacggtgggtgctggggctcctcccaccccaggcaagatatagtcacacccctcaaggctagatccagaaagaacccccacctgcaggccaggactaaaacagggtccccacaggccacactcagttcagctccccatcttggacgtctataggaccccttacatacccagcggccccctatcccataccagttgcctgttagcccaacttcactatgctttctctctggtgctcctggcccagagcacaagcccagtgcagggagggagggtaactgctgacttcacgtctctgcccctccccaggaggagttcaacgtgtcctgcctgacagacagcaatgccgatacctactgggagagcgatgggtcccagtgccaacactgggtacggcttactatgaagaagggcaccattgtcaagtaagtaggctctgggcaggacagggtgggtgggctatgtccctgtgggttcacaaagactcatattcacactctgacccttcaggaagctgctactcacagtggataccacagatgacaactttatgccaaagcgggtggtggtctatgggggtgaaggggacaacctgaagaagctgagtgacgtgagcattgacgagtgagcacgctggcctggggagggaagtagggcatgttccaagcctagcccagcttgaaagcctaagtttgagtgagactccagcagtctctgaaggcctgaggcaggaggtatctgaagtgcttcacactcatctcctcaggaccctcatcggggatgtctgtgtcctggaggacatgaccgtccacctcccgatcatcgagatccgcatcgtggagtgccgaggtgaggtttaaggctataaggagggaaagagagcccggcgtggagatgggggcaaacagagagtgtgtgtggagagaagaggatgggcttggagttggggtgaaggcgatgctgaactaactccaggatttggagctttggggcctgagccagctgggacatgccaggtataggcctgccttaaagccatacaggtggttgggctcacctggaagaggaactgagttgggaccctcaggcatcccagcattctagtggaagacagaggaatcagcaggaatagatcaatcagaatcaggtgatagaaggtgatcccgaaggtcccgagtttctaggggctaacggtgacacaaggctgagcgttcaaggagccggtcccaggtctgagggccaaggaggcagcaggtgctgtaaatgaccttactctgaccccttcccccagatgatgggattgatgttcgtctccgaggggtcaagatcaagtcatctagacagcgggaactagggttgaatgcagacctgttccagccaactagtctggtgcgatatccacgcctagaaggcaccgaccctgaagtactgtaccgcagagctgtcctcctgcagaggtggctgtggtcctggacctatgggcccttcccttcccccaacattgagccttgtgtgtctgcatggaggaggttcccaaggtctcatagtataagctgttcaagggtcagagaagcccccaggtcctgccttttcctgtccctttatgttggggagttgggggtgttacaggtatgctaaact

SEQ ID NO: 1376 - DNA, 2300 bp, Homo sapien
gaaaggggagtagagggatagagtcctgagttggaagactcaaattagaagcccggctagccacaccgcgtgctctggagaactcaccccaacccattcgcttccatggtcagctgtctgtaactgcgagctcaatccacaatttaacctgaatctgagcctgccccccagtccaggctccgcccctttctgtagggaaccaagagcgtcgccatgttgaagatcacatgatcggactccagcgacagctccagggctgccctggctgctgcccgtaggacccctaccttttttcaccgtaaagtttgctgtagcgacgcaacaacaaaggcccaaaagaaaactccgctgtaaatgtatcttacggtgacatgaggaatttgttctcatctgacagtctgggtatccggaggcttggcgcaagtcccactcatgataccaacagtcttatccagccaggtccatactatagcctggacctatagtaggtgcagaggttagctctgctcaagacagccccagcctttaaggagctacaagactggggaaacagaaatcagcaatcacattaaaatgaataatgatctccagtgtccttgggattaggagtgacaaacagaatcaaccctaatgactcaagactcctgtcagtggcaggggaaggggccattgtctcaaacactttaatcacaccacccataggatagggagtccagcagattcgctgggagtgggaggaaaaacagcaggccgaagaaccagaaaaatgactgttggcaatgacccaggctagctagaatggtgacttgaatgagggtagtagcagtagagataaaatggtagtcacaaggaaatggagagagggagattgatcaggtagcaatcaccaatcttgggtttggtcggctgggttagggtggcacagagataagtaatatggttgagtgtgggagtacacagtccaatacagtgagagctggggtgcgcttagtccagaacatacggcaaaggctggccaaaggcggggaagggcgtggtgggaagctctgtccgcggtcgcgccagctgttccccgggcagggtcgcctctaggtgctcacctccgccacttcgccatggcgggtcctggcccgggcgcggtgctggagtccccccggcagctgctgggccgcgtgcgcttcttggcagaggcagcgcggagcctccgcgccgggcggccgctgccagcagcgctggctttcgtgccgcgagaggtgctctacaagctttacaaggacccagcgggaccgtcgcgcgtgcttctgccggtgtgggaggcagagggcctggggctgcgtgtgggcgccgcaggcccagcccccggtaccggctccgggcccctccgcgccgcccgcgacagcattgagctccggcgcggcgcctgcgtgcgcaccacgggcgaggagctgtgcaatggccacgggctctgggtgaagctgacaaaggtgcgctcttccctgcccaggacccggtaaaagacccctggggccagagaaacctctggctgtttgccttttctcccctgtattgagttggcattgcgttcggcgccctttgccctgggctgggcacgacaggcggctgggcagttccctgacggctgtccccatcctacgcgtcccggcaggagcagctggcagagcacctgggcgactgcgggctgcaggaaggctggctgctggtgtgccgcccggcggagggcggagcccgcctggtacccatcgacactcccaaccacctccagcggcagcagcagctctttggcgtggattatcggccggtgctcaggtactgcacttgaaggagcggggctggctgtcagaaggccgggccaggagggcttgggaacacttcagccacagcctggggtgggtgggatactggagcggaggcagggttaagagcagaaaggggcgggacgtgaagggggctcggagggagactgggagatagagccctgaagaaggctacacggcatggaggtagtgtcttgctgaccgctgatgtctccccatcccactccctactctgtgcccacaggtgggaacaggtggtggacctgacatactcacatcgcctgggatcgagacctcagccggcagaggcatacgcagaagctgtacaaaggctactgtgagtgagctggaatggggtggggaggaaggagctctgcgtctgggcccagtctaattaggggcttggggttgcttagctatgtacccccgacatggacctacgagtgcgacgaggacctgatccac

SEQ ID NO: 1377 - DNA, 2300 bp, Homo sapien
ccctaattagactgggcccagacgcagagctccttcctccccaccccattccagctcactcacagtagcctttgtacagcttctgcgtatgcctctgccggctgaggtctcgatcccaggcgatgtgagtatgtcaggtccaccacctgttcccacctgtgggcacagagtagggagtgggatggggagacatcagcggtcagcaagacactacctccatgccgtgtagccttcttcagggctctatctcccagtctccctccgagcccccttcacgtcccgcccctttctgctcttaaccctgcctccgctccagtatcccacccaccccaggctgtggctgaagtgttcccaagccctcctggcccggccttctgacagccagccccgctccttcaagtgcagtacctgagcaccggccgataatccacgccaaagagctgctgctgccgctggaggtggttgggagtgtcgatgggtaccaggcgggctccgccctccgccgggcggcacaccagcagccagccttcctgcagcccgcagtcgcccaggtgctctgccagctgctcctgccgggacgcgtaggatggggacagccgtcagggaactgcccagccgcctgtcgtgcccagcccagggcaaagggcgccgaacgcaatgccaactcaatacaggggagaaaaggcaaacagccagaggtttctctggccccaggggtcttttaccgggtcctgggcagggaagagcgcacctttgtcagcttcacccagagcccgtggccattgcacagctcctcgcccgtggtgcgcacgcaggcgccgcgccggagctcaatgctgtcgcgggcggcgcggaggggcccggagccggtaccgggggctgggcctgcggcgcccacacgcagccccaggccctctgcctcccacaccggcagaagcacgcgcgacggtcccgctgggtccttgtaaagcttgtagagcacctctcgcggcacgaaagccagcgctgctggcagcggccgcccggcgcggaggctccgcgctgcctctgccaagaagcgcacgcggcccagcagctgccggggggactccagcaccgcgcccgggccaggacccgccatggcgaagtggcggaggtgagcacctagaggcgaccctgcccggggaacagctggcgcgaccgcggacagagcttcccaccacgcccttccccgcctttggccagcctttgccgtatgttctggactaagcgcaccccagctctcactgtattggactgtgtactcccacactcaaccatattacttatctctgtgccaccctaacccagccgaccaaacccaagattggtgattgctacctgatcaatctccctctctccatttccttgtgactaccattttatctctactgctactaccctcattcaagtcaccattctagctagcctgggtcattgccaacagtcatttttctggttcttcggcctgctgtttttcctcccactcccagcgaatctgctggactccctatcctatgggtggtgtgattaaagtgtttgagacaatggccccttcccctgccactgacaggagtcttgagtcattagggttgattctgtttgtcactcctaatcccaaggacactggagatcattattcattttaatgtgattgctgatttctgtttccccagtcttgtagctccttaaaggctggggctgtcttgagcagagctaacctctgcacctactataggtccaggctatagtatggacctggctggataagactgttggtatcatgagtgggacttgcgccaagcctccggatacccagactgtcagatgagaacaaattcctcatgtcaccgtaagatacatttacagcggagttttcttttgggcctttgttgttgcgtcgctacagcaaactttacggtgaaaaaaggtaggggtcctacgggcagcagccagggcagccctggagctgtcgctggagtccgatcatgtgatcttcaacatggcgacgctcttggttccctacagaaaggggcggagcctggactggggggcaggctcagattcaggttaaattgtggattgagctcgcagttacagacagctgaccatggaagcgaatgggttggggtgagttctccagagcacgcggtgtggctagccgggcttctaatttgagtcttccaactcaggactctatccctctactcccctttccccaccctggagacctcccaacctgaactccgttagctgggatcctgaatcctaaaaccatggat

SEQ ID NO: 1378 - DNA, 2300 bp, Homo sapien
tgactggactgatagaaggattttcaaggcgtccttggattatattctaggatcaggtttgagtgggtacctggggtacaacaaggatgtcggagaaaatgatggcagcatccagagggaagcgacgcagtggctgtaggaaacaggagacaggttgctaggtggcagactgaaggcataaatctttccctcttttgtggacccctcacctgcagagtcagttcacagcaggcctcaggagagcgacacgtgctgaaaaagtcctgggcagcccgggtttccctaaactctgcatacagagggaagacagggctcagccttgaggccctccagagccctcccctgcccctcgaaaacttttctccctccggagttttatctagatttccagaccctgactcttacctggtaagtaacggcctgcctggcgcatgcaccaaacgggagtgtagtctgtttcctctccccaggctgctcgcaggaatgtgtcattcttcagctccggaaaaccctgaggtctggcgatcaggtgggggtgggggtaggtgtcagtatgctacgctggaggctggggaaagcgcgggttcataaggccgattcagtccaggaccgctatctacctcctccaggccagctcccaaaccctggctttccgcccgttccgcctcctctctgcctatcaggtggtgcacaaactccagaagggcccgccctggggcctcttccctccacttagtctctactcttccaagctcgaagcaaccagagggactggggggagggaatgaaggcccactaaggatagtttgggggtcttcgaactagtgagcctcagaaacgggaatgtcactgggctggttcaggggctgagaaatacccaggctgggggataaagagggatcagagttgatggtcccagaatagagatcctggttggaaatcctgaggcatcccttgaattaaggccctgggatgaacatctcaaaaatccatggttttaggattcaggatcccagctaacggagttcaggttgggaggtctccagggtggggaaaggggagtagagggatagagtcctgagttggaagactcaaattagaagcccggctagccacaccgcgtgctctggagaactcaccccaacccattcgcttccatggtcagctgtctgtaactgcgagctcaatccacaatttaacctgaatctgagcctgccccccagtccaggctccgcccctttctgtagggaaccaagagcgtcgccatgttgaagatcacatgatcggactccagcgacagctccagggctgccctggctgctgcccgtaggacccctaccttttttcaccgtaaagtttgctgtagcgacgcaacaacaaaggcccaaaagaaaactccgctgtaaatgtatcttacggtgacatgaggaatttgttctcatctgacagtctgggtatccggaggcttggcgcaagtcccactcatgataccaacagtcttatccagccaggtccatactatagcctggacctatagtaggtgcagaggttagctctgctcaagacagccccagcctttaaggagctacaagactggggaaacagaaatcagcaatcacattaaaatgaataatgatctccagtgtccttgggattaggagtgacaaacagaatcaaccctaatgactcaagactcctgtcagtggcaggggaaggggccattgtctcaaacactttaatcacaccacccataggatagggagtccagcagattcgctgggagtgggaggaaaaacagcaggccgaagaaccagaaaaatgactgttggcaatgacccaggctagctagaatggtgacttgaatgagggtagtagcagtagagataaaatggtagtcacaaggaaatggagagagggagattgatcaggtagcaatcaccaatcttgggtttggtcggctgggttagggtggcacagagataagtaatatggttgagtgtgggagtacacagtccaatacagtgagagctggggtgcgcttagtccagaacatacggcaaaggctggccaaaggcggggaagggcgtggtgggaagctctgtccgcggtcgcgccagctgttccccgggcagggtcgcctctaggtgctcacctccgccacttcgccatggcgggtcctggcccgggcgcggtgctggagtccccccggcagctgctgggccgcgtgcgcttcttggcagaggcagcgcggagcctccgcgccgggcggccgctgccagcagcgctggctttcgtgccgc

SEQ ID NO: 1379 - DNA, 2300 bp, Homo sapien
ttaaaatattcattttccaagccttacagcaatgacatacattttcattgtcttctcccaattccctgcctccatctctcacaccatatctttgtcttgctcaagattttgctgaatctagatatgcccctctctctcttgaaagcaatagccagactcaccgtgtcaccacctgaagtttcctctgatcatctttcttctcctgtgatccagcacttctgaaacgtaaatctaataagcatgtgaaagaatatacatctcattaacaaagatgcaaattaaaacaacactgagcattttttgattttcaaatggtcaggtgtttttaattaagataattagtttctggtgtgggagaggttacatggagctaggtactctcatttactacttataggagtgtaaatacttagtctttctgaagggtatttcttcttatcaaaagccttaaaatatgttcatcccatgtgatccaggaattctacatgtaggaatttatcctgagccataattaactaaggatatgcatatagctaaggggctcattacagcatggataaaaataaggtacagatgagaaaaattgggaaccatataaatgtccaacaataggggattgattagctcaatagatatacatgtattcaccagaattatatgtaatcatttttaatgttatagatgtatatttgataacatggaaaaatatttacaatgtgttattaagtggaaaggccagttacaaaacagtaagtataataccatcccatttttagtaaaaacttactaggctgggcgcagtggctcacgcctgtaatcccagcacattgagaggctgaggtgggtggatcacctgaggtcaggagtttgagaccagcctggccaacatggtgaaaccctgtctctacttaaaatactagaaattatccgggtgtggtggcacacatcggtaatcccagctactcaggaggctgaggcaggagaattgcttggacctgggaggcggaggttgcagtgagcggagatcacaccactgtactccagtctgggtgacagagtgagactccatctaaaaaaaaaaaaaagttactagaaaagtgtgagtaaatatacatgacactggaaagagtgattatttctgatttttattttatatttctttatatgtattttcaaattttccgcaattctataatttttaattttatctttaagaaaaaaagcacaaaataaaccataaagcttgttatagttactcacctatttgtaagtctttggtttggtagtcttccattatccctaaggtaaattcaaactccatagaatggcattcacagctgtttacattccagactctaccttttccaggctatcttaggccacataacataattctaactacatggaactatttgccatactctgaagatggatgctattaatatattgaataatttttatgcttttacaatatgcccttgcttatgtttcctttgtcaggaatgtctttccctgtttgtctacctgtttgaaatcttacttgtccttcaaagcacagctcaaatattattttctctctgtatatatttctatcatgttacttctttttagctgctttataattacatttatgtatcatttgtgagctctttgagggcaatgaccatttcctattcatctttgtactttctttgcccagcatactccctggcatttaataggttttcaggaaatgtaggattaattaaatgaatgagacttttcccattaggcagttagttgctacctccattggtttcccatagtataatatatgtttgcaaagagaaactacattttattatcctacttgtgtgtccctttctacaccatagaccacgctgaggctgcaaggtagctctttcaagatatcacctgtgatttattcaactttttatatccttaaagataaagacacagttcctggtatacagtaggtgtcaggttgaatttgaggaactggactgaatacaaactctctttgtcaggtataaattttcctgacttgaaattttaactagaccaaaatatcttcttcttacttggtagagcatgtgcctacagcctgtgctcgagttgacgccctgcgttcccatggttatccaaaagaggccctcagactcacagtggccattattaatactctgaggttgcagcagcagcggcaactggaaatctacaagcatcagaagaaaggtatagtaattaggagccatctaacccccttaggcccaaagctgatgaggatcctcaggggatac

SEQ ID NO: 1380 - DNA, 2300 bp, Homo sapien
cattaccctgagaactacttggtttgtttgtattatagaggtcaccctaagcttctcagagcagctgagtaagctagagggcccttcttgcggccatctgctcccctcccagactcctctggcaaatcaagtggttttccctgtattaacctccgaagaacagccattggcccccctcagcaccagcttcagcagccagtggtctctgttctccatctgtaccagaaaccacagttcaagaacaatgaggcttccgaagcccaggtattcacttacagcgataaccttgcatttacctagttttctagtgttctttcacttgtgcccctacaaggaaattagatgtgtattttaaaagactgagatcttcggctcgccgcaacctccctgccttgggctccggtgattctcctgccttggcctgccgagtgcctgggatgccaggcacgcgccgccactcctgactggtttttgtatttttggtggagacggggtttcaccgtgttgaccaggctggtctccagctcctggcctcgggtgatctccccgcctcagcctcccgaggtgctgggattgcagacggagtctcgctcactcatgctcaatgttgcccaggctggagtgcagtggcatgatctcggctcgctacaacctccacctcccagccgcctgccttggcctcccaaagtgctaagattacagcctctgcctgcctgccaccccgtctaggaagtgagcagcgtctctgcccggccgcccatcgtctgggatgtgaggtgtgcctctgcccggccgccccgtctgggaagtgaggagcgcctctgcccggccgccccgaatgggaagtgaggagcgcctctgcctggccgccccgtctgggatgaagtgaggagcgcctctgcccggctgccccgaatgggaagtgaggagtgcctctgcctggccgccccctctgggaagtgaggagcgcctctgcccggccgccctgtctgggaggaagtgaggagcacctctgcccagctgccccgaatgggaagtgaggagtgcctctgcctggctgcccccgtcggggaagtgaggagcacctctgccccgccgccaccccatctaggaagtgaggagtgtctctgcctggctgcccattgtctgggatgtgaggagagcctctgcccggccgccccgtctgggatgtgaggagcacctctgcctggccgccccatctgagaagtgaggagcacctctgcccggccgccccgtctgggaggaagtgaggagcgcctctgcccagttgccccaaatgggaagtgaggagcgcctctgcccggttgccccgaatgggaagtgaggagcgcctctgcccggccgccccgtctgggaggtgaggagcgcctctgcccggccgccccgtctgggaggtgaggagcgcctctgcacggccgccccgtctgggaggtgaggagcgcctctgtccggctgccccgtctgggaggtgaggggcgtctctgcccggccgccccgtcggggaagtgggcgcctctgcccggccgccccctctgggaggtgaggggcgtctctgcccggccgccctgtctgggaggtgaggagcacctctgccccgccccctctgggaggtggggagcgcctctgcctggccgcccatcgtctgggaggtggggagcgcctctgcccggctgccccgtctgggatgtggggagcgcctctgcccggccaccccatctgggaagtgaggagcgcctctgcccggccgccccatctgggatatgaggagcgcctctgcccggccgccctgtctgggaagtggggggcgcctctgcccggccgctcttactctgggaggtggggagcgcctctgcccggccgcccatcatctgggatgtgaggagcgcctctgcccagctgccaccctgtctgggaagtgaggtgcctctgcccggccgccccgtctgggaagtgaggcgcgcctctgcccggccgccccgtctgggaagtgaggagcgcctccgccaggctgccccatctgggaagtgtatccaacagctccaaagagacagcgaccatcaagaatgggccatgatgactatggcggttttgtcgaaaagaaaagggggaaatgtggggaaaagaaagagagatcagattgttactgtgtctgtgtagaaagaagtagacataggagactccattttgttctgtactaagaaaaattcttctgccttgggatgctgttaatctataaccttacccccaaccccctgctctctgaaacatgtgcgtgtcaa

SEQ ID NO: 1381 - DNA, 2300 bp, Homo sapien
ttttggcaggtggtagaaataggcccttacatggaaatggttcctgcccttccacagctcatagtctagttagggggacaggcattaaaggaatattcgttctcccaaaaaactctgataaattataggaaagaaaatagtgtgtgttatggaagcctgtaaatgtggtaccagattcaaggtggagtagggattatgctattttgcagtaatctatttatagttatttacagatataaatccatttaccaatataaacagatttctttttctttctttttttgtttttttagagagggtcttgctctgttgcctgggctagagtgcagtggcatgatcatagcttactgtaaccttgaactcctgggctcaatcaatcctcctacatcagccttcagggtagctaggactacagggtgtaggccactaatccctgctattttttatttcttgtgtagagatggggtctccagtctgctctgttgcccaggctggtctagaactcctggcctcaagggatcctccactttggcctcccaaagccttgggattacaggcatgcgccactgcatctggcctaaacagatacttattgagtacctactacactgaataagcaaacaatttgaattacttctaattccagccagcctgggcaacatagggagaccgcccctctacaaaaatttagaattagctgggtgtggtgctgtgcatctgttgtcctagttattctggaggctgagatggaaggatagtttgagtccaagagtttgaggttgcagtgatcaccccactgcactccgggctggacatcagagtgagatcctgtctctaaaaaaactttttttaaagtgaattatttctaattcttacaacatttatgtgtagaagcattattactagctcccttttgcaaatgatttaatagaatcatgaatagcatcacacacagcaagtgtgattcacacccaattctgcctgtgctctttaattctgagattacagcaaaaccaaactgtggctccagcctgtctccaatcatttactctcttcttactcttattttatcctacactctaaatctctcttactttgaagggcaaactcaactatagaaactcttttaatacagttcttggaacgttttaaagttgtagagattagtttgtcagcaaattctgaaataatctgagctttcttgatcgagcaagaaacagtaacttacaattgcgtgttgtttatggagttagtgatgaagctgccattcttgagcacccactatgtgccaggcagaggataaattatagtgaaggaaatagacatgattctcactctcatggagttgacagtcagacattaaacaaatatataaaaatacaactatgtaaaggtgtagaagactgagccaagtgaggaaaacatgaaagacctaattcagattggaggtaggggatcagagaattctaccaaaaaacacgcaaaagtgttttgtattctaggatgcaaggtgctaaaccctccaaaagaccccaccaggatgcaacccccgtggcgataagatcttgatgccccattgtcaaggggtggtgcgactttgtcccactctggggtggggtgaccgccggctttatcctacattgttgtggcgtgaggtgagttttcatcatccgaactttctgatgttttcccctagtgtcttctttcccagcgtctttctgccagatcttccgctctgctgtgacaacctcctgtcacatcagtaccgttggagctggattgtttttttctccttgtaccccgcgagcctataacttcacggaggcggctccttggatggcttatggccccgccatttcattcagtcacacagtccattcctgtctggccggcggcaggtgggttggaggtgcgcgggcgggcgggcgggcgtgcgagagcgtccggcgctcctctcccctccgcggtcgccggatccgcgagagcgctcggctcgcgttctaggctgtttgcgcctggagcgcgccgcgggcccgcgctcgctcccgcctgtcttcgcgtccgcggcggccaggacaccgcgcgccgcctcacgctaccctgcaggccgcccgcgtctgccctcgcggcgcgctcccgggcccggccgcggttccccactcgggccggctggctcgcgggttctctcgccccgcccccctcggcgccaccgctgggcgcttgcgcggggcgcgtggccgtggccagggtctccgccgcagcccgagcagccgccgccgcctcagtcagtcagtcagtcc

SEQ ID NO: 1382 - DNA, 2300 bp, Homo sapien
gagagcagtggaacagctactgagatgggagcatgagaagggggaggataatgttgggtatgattgatttgaggtccctgtgggacattcaactcaagatgacaaataagcagttgaataaaggttaggaagggagacttcactgtgtggatcaactgcatgtagatggtaaccaaagctctgagcagcaccaacatttcagagtgggcagaggaaagacaacatggctagagcaaaaccaggcgaatgtggcactatgaaagctgggagaagaatgtttcacaaaggagagaatggtcaactgtatgaagtcttttagagaagcagtgaaatgagatctgaagattgtccataggacaacatgaagatcattggtgaccttagagcctttgaaggtgcagtgatagagagaagccaaattagaatgagttgtggagtgagtaggaggtaaggttgtggagaaagcgagtgcagacaatttgaataaatgtagctaaacaagtcactagtgggagggtaaataggtaaaatcataaattaaacacacacatagcttttaccccaacaattctacttccaagaaatcagcctacaaatatactccatatgtgcacaaagacctacagaaaggatgtttactacaccattttataaacagctacaatgttaatcaatagggggctggttaaattaatataacacatccacacaatataacacacacagggtattacgtggccattaaaaataccatggtaggctgggcgcagtggctgacacctgtaatcccagcactctgggaggccaaggcaggtgatcacctgaggtcaagtgttcgagaccagcctggccaacatggcgaaactccctctctaccaaaaatacaaaaattaactgggcatggtgcaggtgcctgtaatcccagctattctggaagctgaggcaggagaatcacttgaaccccggaggcggaggatgcaattagccgagatcgtgccattgcctgggcgacagagcaagacttctgtttaaaaaaaaaaaaaatcatggtagggccgggcacggtggctcagcctgtaatcccagcactttgggaggccaaggcaggcagatcacctgaggccacgagttccagaccagcctggccaacatggcagaaacccccatctctactaaaaagacaaaaattagcccagcgtggtggcgcatgcctgtaatcccagctacatgggtggctgagacacgagaatcgcttgaacccagtggtgtgccactgcactccagtctgggcaacagaaccagactccatttaaaaaaaaaaaaaaagtacatatggtaaatattatgtgtattttaccaaaacaagtttttatttttaaggcacaatcttgccctgtcgtccaggctggagtgcagtggcgcgatcacagctcactgcagccttaacctcccccagctcgggcgatcctcccacctcaacctcccgagtagctgggaccacaggcctgcgccactacgcccggctaatttttgtatttttgtagagacggggtttcaccatgttggccaggcggatctcgaactcgtgatttcaagtgatccgcccgcctcggcctcccaaagcgctgggattacaggcgtgagtcaccgcacctagccgaaaaagaattttttaaagtcaccatctctacgaggtttttctgggccaccccccggtaaaatgtcaagccctcgacgagccgggagagagtcggaatcctgtgggggaggcaggggcgtgtccagaaaggcgggagcttccggaaccgcttagagctaagggagctcggagcgggggccggggccgagggcggagcagggtggggaaggggcgggtccagaaagacgggagcttccgaggccgcctccacaggaagggaaaggggcgggagcttggagggggcgggtccagaatggcgggagcttccggggccgccgcctctggaaggaaaaggggagggaacgtagagggggagggaacgtagagggggcgggaccaggaacgagagcgcgtgggtttctggggtgtccgccggcgccccctgggattggggagagagggaagggctgaggctcacggtttcggagtaaggggagcggcccggcgagccgccgcgcctgggttaagagctgcaggaggaacgtggcttcacgagttcggctcctcggccatccacagcccgggcctccgcctctgctgacctggcggctgtagaaggcagaagaggcctgaaacctgcagcaggagcaccaccctgccc

SEQ ID NO: 1383 - DNA, 2300 bp, Homo sapien
ctagtaggccacacaacaccttctgggaggtaccactggcattgtatcatgagataaaataaaacaataactaaatagccaggcatggtggtgtgcacctgtagtcccaagctacttgggagactgaggtggaaggattgcttaagcccaggagttggagcctgcagtgagctgtgatcatgccactacactccagcctaggtgacagagtaagacctcatctctaaaaaaacttttttcttttctttttttttttttttgagacagagtttctctcttgttgcccaggctacagtgcaatggcatgatcttggctcactgcaacctccgcctcctgggttcaagtgattctcctgcctcagcctcccgagtagctgggattacatctaattttttgtatttttagtagagatggggtttcaccatgttggccagggtggtcttgaactcctgacctcaggtgatccgcctgcctcagcctcccaaagtgctgagattacaggtgtgagccactgtgcccagctctgaaaaactttttaaaataaataaatattagaatatgtgggaaaataaaattaattaaaaaaaaaaacagtaactacaatagcaacagctactatttactgaacacttactccacctcacttaatcacaactctttgaagtaggtactattatttccatttttacagatgggcaaattaaggctcagaggcgttaagcaacttgcccatacagacagtaagtgttgctggtgattcaaacccaggtccgtctggcttttggaactcatgtcctcacattcactggtctgcagagtagcaccaagtaccttttaccaccctgaccagctcctgggtactgccctcctgcctgcaggcctgaacaccatgacatccagctagcccctgtcccctatgacatccttctccctcttgccaatgaaacccagtagatcaggctgcctgacaaaaaaatttcttgtgatgccttggactgtggcattcatcctaaatgcctccctaacagcatggcccattgctcctctaagagtctggctcacactcttactgagtttttgcttatgccctttgcccttcttggatgcccttccctaacccttcaagggccactcagttgaagttccagaagactacaaattcctcaatccagtcatctcacacaattctgggtttcagagccagaagtgcccccaccacagaaatctctggctcaatgccaagtcaggaagctgcaaagagcaaggagggcctgtgttccagtcctcaaaggatggggaaggggaatgacagccaggcagctgttcctttcagatcccgaaccgtcagatttttcctccaaatcttgcttgggacaaggggttaaatgatgttgacagaagggtgattgaagaaagagacaggactggttgagagattgcccaacactttgggaggctgaggtggaaagatggcttgagcccaggggtttaaaaccagcttgggcaatatagcaagaccccatttctaaaaaaaaaaattatttttaattagctgggtgtggtggcgtccgcctgtggtcccagctatttgtgcactgaggcaaggaaaatcgcctgaacccaggaggtggaggctgcagtgagctgtgattgtgccactccagcctgggtgacagagtgagaccctgtctcaaaacatataaacgtgtgtgtgtgtgtgtgtgtgtgtgtgtgtgtattccagggaacattaagacttagaggcaaactccagaacttaaagaaaaaacatgaaagtgctaaaaaattccgtgcttgtggagagagaattccaactctttccctgaacccgggctgagtcccttcgctgtgaggttggggggatgagtgggagcccagtgcctggcgccgagtgaaggcagccattgtgagttcctgggctggggaagggaggctcagtgcccaaggatgtgaccaggcgtgaggcccggggaaagagcagcgcggcgaccccgcagtatccgaggcgacagggtgtgggggagggggtggggagtcaaaggcggagtcacgggctccgccctctttctcctgcttggcgcgagcacaggcaccgcgtggttctcacaaccagcagctcggctcactgagacccggtggtccagacgctgctcctggctggggtggcgctgcagggagaaccgcgagctctcaggggtcggcgggtgacttctttccggaagaaagcgaggaacgcgctctgcggggtgagccggactccccaactccggacgatcag

SEQ ID NO: 1384 - DNA, 2300 bp, Homo sapien
tgggtcattaaattcttgagcaagctggttgtggtggctcaacactgtaatcctgctactctggaggctgaagtgaagaacagcttgagcccagaaggtcgaggctgcagtgagctatgattgtgccactgcactccaccctgggctcagcaagaccttgtctcttaaagaaaaaaaaagattgagcaaatatttatagagccccctaatatgtgccaagcagttttaggcacttggcatacttcagtaaataaaacatcaaaagttcctgccctcagggagcttatattctaatggggacagaaaaggaataatgaacataagtaaattccataagatgttaggtgataaatattagcataaaaagcaaaaattagaccaagaggggaaaaaaaagagtgccaaggtggggtttaatgttgcaattttaaagactgtggtcaaggtagacccaaagcattctaagtgagtgcaaaggccccaaggagggtgcctggtatgtctgtggtacagtaagtaggtcaatgtggttagaatggaatgagatgggactgagtggtagaagaggtcagagaagtaaaccagatgaggtggggagaggagggtcacaaagtaccttataggccattggagggatttggctgccacacccttgctcttagaaggcagtcctcttactacagccttgcaggtccagtgatccgggcaccatccgcctcatcccctcactatgctctagccaaggttgactgaatttagttgcttaaacacctcaagtgtgtctgcccaccttggggcctcacacaatccatttcctctgtttggactcttttatgcttttacctaacaccttatcatttttcaagtcttgactgaaatgtccaaatcaggtcccctcatcttatcctatcacatatttctgccttgtagctcttacctaatgtaattttacattactttgattctttccatcagtgtgtacttcctgaatttgactgtaaaaaacgacttgagtgcaaggactgattctcttgttgattggtgtgtgtccaaagtcagtgccaggtaaactgtacacaatagatacctgttaaatgaattaatgggatgggggatagtcaaaagagtttcccttttttaggataggagaaatccaaagagtttttttatttttgttttttttttgtttgtttgttttgtttttagagacagtgtgtccctcactttgctgctctgccactcaggctggagtgcaataagaacatggctcactgcagcctcgacctcctgggctcaagccatcctctcacctcagcctcctgtagctgggactacaggtgcgcaccaccatgcccaactaatttttaattttctttttgtagagacaaggtttcactatgttgcccaggctagtcttgaactcctagggtcaagcgatcctcccaccttggcctcctaagatgattacaggccataagccactgcgcccggcccaagcagttctgaataatgatgaaatgggctcagttgagagaagctgaagattaactataaacaatgagtaacaaaggagcactggaaggcagaggtggatgggaatcgtagtgtttacggagggactagtctccaataggaattttttttttttttttttttttgagacggagtttcgctcttgttgcctaggctgaagtgcaaaatggcgtgatctcggctcaccgcaacctctgcctcccaggttcaagcgattctcctgcctcagcctcccaagtagtgggattacaggcgcccgcaccatacccagctaattttttttgtacttttagtagagacggggtttcaccatgttggccaggctggttttgaactccggacctcaggtaatccgcccgcctcggcctcccaaagtgctgggattacaggcgtgagccaccgcgcccggcctaggaacctctttcaaattcaatcaccctctaggtcgactataccgcctagctgcttcacaatttgtcccttcctcgccatccatactgccagccttaattcaagttcacattatcacttgattggattattacaaaagcttccctaccaatcggtcgctcttacaccctgggcagcctcctccgatggcccactccccgcctctttcactttctggagatcactgagctctccatcctctctgggaatttaccgatgcccagaacgcccttctttcccccacacgaccctctcctagtctaactcctgggcgtgctttaagctcagctcaggcagcgtcaccttctctggaaagc

SEQ ID NO: 1385 - DNA, 2300 bp, Homo sapien
ctgagtggtagaagaggtcagagaagtaaaccagatgaggtggggagaggagggtcacaaagtaccttataggccattggagggatttggctgccacacccttgctcttagaaggcagtcctcttactacagccttgcaggtccagtgatccgggcaccatccgcctcatcccctcactatgctctagccaaggttgactgaatttagttgcttaaacacctcaagtgtgtctgcccaccttggggcctcacacaatccatttcctctgtttggactcttttatgcttttacctaacaccttatcatttttcaagtcttgactgaaatgtccaaatcaggtcccctcatcttatcctatcacatatttctgccttgtagctcttacctaatgtaattttacattactttgattctttccatcagtgtgtacttcctgaatttgactgtaaaaaacgacttgagtgcaaggactgattctcttgttgattggtgtgtgtccaaagtcagtgccaggtaaactgtacacaatagatacctgttaaatgaattaatgggatgggggatagtcaaaagagtttcccttttttaggataggagaaatccaaagagtttttttatttttgttttttttttgtttgtttgttttgtttttagagacagtgtgtccctcactttgctgctctgccactcaggctggagtgcaataagaacatggctcactgcagcctcgacctcctgggctcaagccatcctctcacctcagcctcctgtagctgggactacaggtgcgcaccaccatgcccaactaatttttaattttctttttgtagagacaaggtttcactatgttgcccaggctagtcttgaactcctagggtcaagcgatcctcccaccttggcctcctaagatgattacaggccataagccactgcgcccggcccaagcagttctgaataatgatgaaatgggctcagttgagagaagctgaagattaactataaacaatgagtaacaaaggagcactggaaggcagaggtggatgggaatcgtagtgtttacggagggactagtctccaataggaattttttttttttttttttttttgagacggagtttcgctcttgttgcctaggctgaagtgcaaaatggcgtgatctcggctcaccgcaacctctgcctcccaggttcaagcgattctcctgcctcagcctcccaagtagtgggattacaggcgcccgcaccatacccagctaattttttttgtacttttagtagagacggggtttcaccatgttggccaggctggttttgaactccggacctcaggtaatccgcccgcctcggcctcccaaagtgctgggattacaggcgtgagccaccgcgcccggcctaggaacctctttcaaattcaatcaccctctaggtcgactataccgcctagctgcttcacaatttgtcccttcctcgccatccatactgccagccttaattcaagttcacattatcacttgattggattattacaaaagcttccctaccaatcggtcgctcttacaccctgggcagcctcctccgatggcccactccccgcctctttcactttctggagatcactgagctctccatcctctctgggaatttaccgatgcccagaacgcccttctttcccccacacgaccctctcctagtctaactcctgggcgtgctttaagctcagctcaggcagcgtcaccttctctggaaagcccaaacccagccaccccactacccgctacccgcggcccacgctgatgaagacagcagaacacggaggccccgcgttcccgccgcgagagcaggagagaaagattacctcccgcgagctctagcgcgcccggctttccggcgcactccagggggcgtggctcgggtccacccgggctgcgagccggcagcacaggccaataggcaattagcgcgcgccaggctgccttccccgcgccggacccgggacgtctgaacggaagttcgacccatcggcgacccgacggcgagaccccgccccatccccgactgcctgaaccgcgccaggagacggaccgcaagtccagcgtacccacagacgactcaggcgggagacgagcggtgtcatggccgccgacagtgacgatggcgcagtttcagctcccgcagcttccgacggtgagcggcttcccagaggtagccttcaaagcctctgcgctctgggagaggggaaggcctcgggctcatagttctagaggctcctcaagcttcagaggactgctccttccgcctga

SEQ ID NO: 1386 - DNA, 2300 bp, Homo sapien
tgaagccatgctgtatcaggaactgcacagactttggttctatgacatactcctccatgcacagcagagtgagattgaacacttgagccagataggaatgttcaccctgggagaaagagaagtctgctatatcaagatttcagagagccaagctaggaggatgcaaaagcttaagaatgatacaatggactctggggactcaggggggaaaggatggaggcaggtgagggataaaagactacgcattgggcacagtgtacactgggtgataggtgcaccaaaatctcagaaattgccactaaagaacttactcatttaaccaaacaccacctgttccccataaacctattcaaataaaaaaaaaaaaactatcaagtcaaaaaaaaagatttgggagagaaatgcttcctatctgatgttccctagaatctctctaccctccaccccacagccacacctaggattggggtgagatcagctcataccttgtctggctgccgcttgaagcaggcgaggcccagggaaaggatagaacgggtcctggcagcatgacacacggccttgtaacgttcctcaatgcaccttggggttgggtatgggggttgctgtggctaggagttagccttatgaaggacccaaaccacccaggtctgtgacccccccactccacagttgagggctggcactaaagagaaaagggcttatacttactggttcagcaaactcttcctgtccccaagcccactcagctcctgtgggtaggtaaagggagagttgtgacaggcctctagcaccagccccttcacaaccacctgccctccttgtttcccaactctcaccgtgtccacagccacgaaattagctgtctttatggctagcaggagggatggccacatctccttgaagttgttgctttgcacatccactacgggaacctggactactagctcctccccagatgttgtgcttttgctgacaccacctgggggttaggagggtgatggatgttcatgcttaaggaaagagcccaggggaacagacaccaagctaggccacggtgatggtggtaaggggggtagtttccattggtagcttttcccacaagcctttgtaacccacgtgttctacacacaggccttggagtggagaatgccctgaatttggggagaggaagcctgagtcttctactggcttgtatgagcctgggtaaattacttcccacctcgctttcacaatctgtagaggagaaagttggactagacgacctttgattcttttttcccatgtcctgcaggaaacattttgtagggcttgaggatctcagctcccttaatatcccacagggatccatactactgttctcatggtgccccagcgccacaagcaacagctcccagtaagccccagagcctggcagtgccccacaccagagctcccaatacgtcctaccttcctttggatcacaacgctcaatccactccactgaactgaatcacaactattactactaaccgttatgagctccagactacatctcccgccatgcctccatcagccccatgctcccaacgctccaggcttttgcagccggagccgcggtgtacaacggaacttgtagtctcctcgtggctagttcaggcggaaggagcagtcctctgaagcttgaggagcctctagaactatgagcccgaggccttcccctctcccagagcgcagaggctttgaaggctacctctgggaagccgctcaccgtcggaagctgcgggagctgaaactgcgccatcgtcactgtcggcggccatgacaccgctcgtctcccgcctgagtcgtctgtgggtacgctggacttgcggtccgtctcctggcgcggttcaggcagtcggggatggggcggggtctcgccgtcgggtcgccgatgggtcgaacttccgttcagacgtcccgggtccggcgcggggaaggcagcctggcgcgcgctaattgcctattggcctgtgctgccggctcgcagcccgggtggacccgagccacgccccctggagtgcgccggaaagccgggcgcgctagagctcgcgggaggtaatctttctctcctgctctcgcggcgggaacgcggggcctccgtgttctgctgtcttcatcagcgtgggccgcgggtagcgggtagtggggtggctgggtttgggctttccagagaaggtgacgctgcctgagctgagcttaaagcacgcccaggagttagactaggagagggtcgtgtgggggaaagaagggcgttctgggcatcggtaaattcccag

SEQ ID NO: 1387 - DNA, 2300 bp, Homo sapien
actagtgattccccatactccctaagaagcagattctccccagacatccagcctagggtaggaagaaataaagtcacagaaagggcagactcaaggctagggaggctagaggcctaccttgtcattgcccttatggtaggggatgccttgggcatactgctggttgaagttgaagccatgctgtatcaggaactgcacagactttggttctatgacatactcctccatgcacagcagagtgagattgaacacttgagccagataggaatgttcaccctgggagaaagagaagtctgctatatcaagatttcagagagccaagctaggaggatgcaaaagcttaagaatgatacaatggactctggggactcaggggggaaaggatggaggcaggtgagggataaaagactacgcattgggcacagtgtacactgggtgataggtgcaccaaaatctcagaaattgccactaaagaacttactcatttaaccaaacaccacctgttccccataaacctattcaaataaaaaaaaaaaaactatcaagtcaaaaaaaaagatttgggagagaaatgcttcctatctgatgttccctagaatctctctaccctccaccccacagccacacctaggattggggtgagatcagctcataccttgtctggctgccgcttgaagcaggcgaggcccagggaaaggatagaacgggtcctggcagcatgacacacggccttgtaacgttcctcaatgcaccttggggttgggtatgggggttgctgtggctaggagttagccttatgaaggacccaaaccacccaggtctgtgacccccccactccacagttgagggctggcactaaagagaaaagggcttatacttactggttcagcaaactcttcctgtccccaagcccactcagctcctgtgggtaggtaaagggagagttgtgacaggcctctagcaccagccccttcacaaccacctgccctccttgtttcccaactctcaccgtgtccacagccacgaaattagctgtctttatggctagcaggagggatggccacatctccttgaagttgttgctttgcacatccactacgggaacctggactactagctcctccccagatgttgtgcttttgctgacaccacctgggggttaggagggtgatggatgttcatgcttaaggaaagagcccaggggaacagacaccaagctaggccacggtgatggtggtaaggggggtagtttccattggtagcttttcccacaagcctttgtaacccacgtgttctacacacaggccttggagtggagaatgccctgaatttggggagaggaagcctgagtcttctactggcttgtatgagcctgggtaaattacttcccacctcgctttcacaatctgtagaggagaaagttggactagacgacctttgattcttttttcccatgtcctgcaggaaacattttgtagggcttgaggatctcagctcccttaatatcccacagggatccatactactgttctcatggtgccccagcgccacaagcaacagctcccagtaagccccagagcctggcagtgccccacaccagagctcccaatacgtcctaccttcctttggatcacaacgctcaatccactccactgaactgaatcacaactattactactaaccgttatgagctccagactacatctcccgccatgcctccatcagccccatgctcccaacgctccaggcttttgcagccggagccgcggtgtacaacggaacttgtagtctcctcgtggctagttcaggcggaaggagcagtcctctgaagcttgaggagcctctagaactatgagcccgaggccttcccctctcccagagcgcagaggctttgaaggctacctctgggaagccgctcaccgtcggaagctgcgggagctgaaactgcgccatcgtcactgtcggcggccatgacaccgctcgtctcccgcctgagtcgtctgtgggtacgctggacttgcggtccgtctcctggcgcggttcaggcagtcggggatggggcggggtctcgccgtcgggtcgccgatgggtcgaacttccgttcagacgtcccgggtccggcgcggggaaggcagcctggcgcgcgctaattgcctattggcctgtgctgccggctcgcagcccgggtggacccgagccacgccccctggagtgcgccggaaagccgggcgcgctagagctcgcgggaggtaatctttctctcctgctctcgcggcgggaacgcggggcctccgtgttct

SEQ ID NO: 1388 - DNA, 2300 bp, Homo sapien
agggaggtgtgcatagaagttctggtacaggaacaccaagtctataaggccattgtgtagcaccaggggccggcgggctcggattagctccaggaatagggtccgtactgactggctctggctctcatcaccctagatgaaagtaaaggggtcaatgaggaggacagagtcccccagggagcctcttctgctgggcacttatcccagacttccccacttggaacgctctctctctaccttacccaatgctgcccaccctcctcataccagtcttgtttcccaagccctgtcactagtgattccccatactccctaagaagcagattctccccagacatccagcctagggtaggaagaaataaagtcacagaaagggcagactcaaggctagggaggctagaggcctaccttgtcattgcccttatggtaggggatgccttgggcatactgctggttgaagttgaagccatgctgtatcaggaactgcacagactttggttctatgacatactcctccatgcacagcagagtgagattgaacacttgagccagataggaatgttcaccctgggagaaagagaagtctgctatatcaagatttcagagagccaagctaggaggatgcaaaagcttaagaatgatacaatggactctggggactcaggggggaaaggatggaggcaggtgagggataaaagactacgcattgggcacagtgtacactgggtgataggtgcaccaaaatctcagaaattgccactaaagaacttactcatttaaccaaacaccacctgttccccataaacctattcaaataaaaaaaaaaaaactatcaagtcaaaaaaaaagatttgggagagaaatgcttcctatctgatgttccctagaatctctctaccctccaccccacagccacacctaggattggggtgagatcagctcataccttgtctggctgccgcttgaagcaggcgaggcccagggaaaggatagaacgggtcctggcagcatgacacacggccttgtaacgttcctcaatgcaccttggggttgggtatgggggttgctgtggctaggagttagccttatgaaggacccaaaccacccaggtctgtgacccccccactccacagttgagggctggcactaaagagaaaagggcttatacttactggttcagcaaactcttcctgtccccaagcccactcagctcctgtgggtaggtaaagggagagttgtgacaggcctctagcaccagccccttcacaaccacctgccctccttgtttcccaactctcaccgtgtccacagccacgaaattagctgtctttatggctagcaggagggatggccacatctccttgaagttgttgctttgcacatccactacgggaacctggactactagctcctccccagatgttgtgcttttgctgacaccacctgggggttaggagggtgatggatgttcatgcttaaggaaagagcccaggggaacagacaccaagctaggccacggtgatggtggtaaggggggtagtttccattggtagcttttcccacaagcctttgtaacccacgtgttctacacacaggccttggagtggagaatgccctgaatttggggagaggaagcctgagtcttctactggcttgtatgagcctgggtaaattacttcccacctcgctttcacaatctgtagaggagaaagttggactagacgacctttgattcttttttcccatgtcctgcaggaaacattttgtagggcttgaggatctcagctcccttaatatcccacagggatccatactactgttctcatggtgccccagcgccacaagcaacagctcccagtaagccccagagcctggcagtgccccacaccagagctcccaatacgtcctaccttcctttggatcacaacgctcaatccactccactgaactgaatcacaactattactactaaccgttatgagctccagactacatctcccgccatgcctccatcagccccatgctcccaacgctccaggcttttgcagccggagccgcggtgtacaacggaacttgtagtctcctcgtggctagttcaggcggaaggagcagtcctctgaagcttgaggagcctctagaactatgagcccgaggccttcccctctcccagagcgcagaggctttgaaggctacctctgggaagccgctcaccgtcggaagctgcgggagctgaaactgcgccatcgtcactgtcggcggccatgacaccgctcgtctcccgcctgagtcgtctgtgggta

SEQ ID NO: 1389 - DNA, 2300 bp, Homo sapien
tgatttcattcttttttgtggctgcaaattttttgtcttataaccctaaatttttttgagacaaggtcttgccctgttgcccaggctggagtgcagtggtgctatcacagctcactgcagcctcaaactcctgggctcaggcaatcctcctgcctcagccacctgtgtagctgggactacaggcgtgtaccatcatgcctggctagtttttacattttttcatacagacgaggtctcactatgttgcccttactggtttcaaactcctgagctcaagtgatcctcttgccttggcctcccaaagtgttaggattataggtatgagctactgtggccagctaaccctaaatttttgttcttgtggatgtaagtatttggtctggtggtgctgatgccactttttggcataggttcaatagaggtacttaaatgttttgttatttgggaactcagagtattcttccttttttgaagactgtggtagaactagattaactagattcaggtagatctcatggaacctcaggatgcagttaggccttaagaattggggattagagcagaatagggaattcaaaaagttcccttcctttttttttctttgaaaattggcctcaatctcttgacttcttctgccttccaggcagtattatagaaaatgcccctggccagcagcttctgagtttacatggcttctattttagaaagccgccatattgagactggactatttaattccaattgcacattgccaggaaagaaactgtggttgtacacactgggtacggtgctgacttctggcaatgggtaaggaggcagactcatgttactaagatggccctgggattcctgccacttttctgagttgcagagctggttagaagtggtggtggtaaactgagtaggtatccacctcctttatgaaagcatttcactaattgaggagtcacaatgttgtattttgcatagaacccttacaattgagtctcatggaaaaaagtagaaagagggagagacaggctaaaagaaaaagtaggcttgtgcttttattcttagttatgtaccagatgggatggagccttctatagttacttctactggactgtgctttttcatcaacagtgaatttttagattgcttttggatatagttttcttttttaaaaattatataatatataattttgaagtctccttgtaatgtttgttttatatatttggaattaatttttgaaataaaatattatatgaggctataaagggtattgattggtagaaagaagcacaggcttttgaatcagacaggctttgcacttcaatttttttttttttttttgagacagtgtctcactctgttgcccaggctggagtgcagtggcacgatctcggctcactgcaacccctgcgtcctgggttcaagtgattctcctacttcagcctcctgagtagctgagattacaggtgcttgccaccacgcctggctaatttttgtatttttagtagagatggggtttcaccatgttggccaggctggtctcaaactcctgacctcaagtgatccgcctgccttggcctcccaaagtgctgggattacaggcgtgagccactgcacccagcttccattttatctctgccttttagtgactgatttcttgatctctctgtgaaatgaacataataatccttatatcatggattatctgagaatcaaacgagatgatgtatgtcaagctcttatactatgtttcctagaaagtaggtgctcaatgaatgatagatattatcattgttattttgttacttagaatgtaattggtgatcttcatgatattctactcatggtaaagactgactatatcttgggctttaaatatatcagtgttatttgagggtaaagacataaaacattttttagatctgaaaaccaggaactagaatgtgaaaggaaatatttttgcattgagcatttattgctttacatgtatttattcattaaagatttcagtggaaatttttttgatctctttagtgtcaaaccagaagagaagtaaaattcaacaaaaatttatgtgtggagttccttcttaaaagaagaaaaaagtgattatttagactatggatcggagcaaacggaattcaattgcaggatttcctccacgtgtggagcgtcttgaagagtttgaaggaggtggtggaggagaaggaaatgtgagccaggtgggaagagtttggccatcttcgtatcgagctcttataagtgccttttccagactgacgcgtttggatgatttcacctgtgaa

SEQ ID NO: 1390 - DNA, 2300 bp, Homo sapien
tcagggggactgggctggggtgatctctcttctcccttcagagattctgtgagctaccaattaatcttcctaaaacactgccctgtttagtttatggtcctgctcaagaatagctctcacagcataaaaaacaaaagacaaatttgaatattggcatttaagcccaacccacatgcagcctcttctctctccaatatctcctaccacacttctttctttctttttatatttttttgggacagggtcctgctctgttgtccaggctggagtgcagtggcaccatccacagctcactgtagccttgacctctgggctcaggtgatcttctggctttagcctcccaagtagctaggaccacaggtacatgccaccattttgggctcatttttttttttttttctgtacagacagggtctcgctatgttgcccaggctggtctcaaactcctggcttcaagtgatccaccttggcctcccaaagtgctgagattacagaagtgaatcactgtgtctggccatattttttttttttttttttttttgagacggagacttgctgtgtcgcccaggctggagtgcagtggtgcgatcttggctcactgcaacttctgcttcccgggctcaagcgattctcttgcctcagcctcctgagtagctgggactacaggcacgcgccaatacacccagctaatttttctatttttagtagagacgaggtttcaccatgtttgccaggatggtctcgatcttctgacttcgtgatccccctgcctcggcctcccaaagtggtgggattacaggcgtgatccactgctcccggccctggccatatttcttaaactttatggccaccaggaatgcataccacttatactcttccaggaggatgaaagtcttaagatgtctgaaaaggggtctctaacccctgggagtgctaatacagtaaggcccatactgcttgctcttgccctcctcctgttctagtctcttcagtcatgagattatgagctcctgatgtccaggcacatgcaaaaagtgaagaaatatgtgccttgaacagctgggcagaattcttagctgggagcggtggctcacgcctgtaatcccggcactttcgtaggccaacgtgggccgatcacttgagtccaggagttacagaccagcctgggcaacatggtaaaccccgtctctacaaaatatacaaaaaattagtcaggcatgctggcgtgtgcctgtagtcccagctatccggggaggctgagttgggaggatcatcttaatccaggagtttgaggctgcaagtgagccatgatcgctccattgcactccatcatcctgggcgacagagtgagacccttctaaaaaaaaaacaaccaacaaaaacaacaaaaaatcccaacttattccccaccagctttctttcaaaatctgttttcaagctagctgaagtgttacctcctctaagctttcacttaaccgaatctcatagtcatgattaattgcttccctagcattttgtttagctctactgattgctcttactatttcaagtcggtattattgatatattttttcctcctcactatactgaaatcctgcaggacgcagcattcttaccgcttttccttactcagctataccttgaccaacccgaaagccgcgccagtctagtccattttctattggctttatcaattaccaatcatttctgtgtttaacatttttattggtccatcttgtgtttactgccccgccctctaagaggctcctggacttgggtttcccccaggtgtattccctcctcctcggttccgcctttcccacacactgcttcttctgtttttacctcgacttccttcctattggttcccttcgtcctccggagttggcacctacggctgttgattggcttttctggacgcccattgtgcccaccctcataccacgtggcattcctagcgctaattgggcaattccactacctcgtttatcaggagttgacggttgactggctactctgagggagggcttgagggaggggcgtggccagccgagaccccgcccccaacccccctgctgggccgggtaggcgtttcagtctttcgcggcccgggagctcagcagagctaccagctgccctgttggcttcgctggtcggatcgtcctcctggccccgccaaacaggcggggggagcggccccgactgtggggccatggcagtagtctcctcgttcgccgccgccgctagcctagctgagtcgccggcttctgcgctaggggctcccaccgcctccgcaggct

SEQ ID NO: 1391 - DNA, 2300 bp, Homo sapien
caaccctgtgctctctgaaacatgtgctgtgtccactcagagttaaatggattaagggcggtgcaagatgtgctttgttaaacagatgcttgaaggcagtatgctcattaagagtcatcaccactccctaatctcaagtacccagggacacaaacactgccgaaggccgcagggtcctctgcctaggaaaaccagagacctttgttcacttgtttatctgctgaccttccctccactattgtcctatgaccctgccaaatccccctctgtgagaaacacccaagaatgatcaataaaagaaaaacaaacccaaaaaaaaaaaaaaaaaaaaagaaggcaaggtcttgactatcccttactcagtctgcagctcctgaggaaggccattggtagtactgcattctcctggtcctgtttgcatctgggcttgggcttgggcttgggtttgctcccacacctggctctgaaggccctgcagttcctttctcagctcctccaggcattgctccaggagaaaagcactcccctttggggccccctgcagcaaccttagtgatgctgtagtgggacaagttagggatcatcctctctaagagtttcacaagaccctagatactctacttgcaaaacaagacacatgtgcacacacaacaggtgtgtggcaaaattgtgtgcatacatatgaagctgtgtatatgaagaaaataactggccagataccttccaggacactgatctggtacttctgctgctctcgctcttctagcaggccctgcactgcctgccttagtgcctgtcacctccccaggcagaaaaaagcacatgaactactgtataacagcttttcccgacccctagtatcctcatcttacacaaacatcacatatacacaccaaggattccaagcctcacctgagcctgacattgaaattaggatcagagaatagcaacctcaccccagagagaggatgggctctaggactcagggcagctcagcctttgtggaactatgggagtctctaaagcccaaggctgttgagcttggactcctgactgcagaggcaagtgatgagaggaaatccaggtcccagccaggtccccggctgaggaaataaggaagggttaagtgcagggtctgtgtggggaaacagagttcaggaaaggacagagttggaatttggaaggaataatggatgatacgggcactggaggaaggcacagaaagagaaagggcttggaagtagaaagagacattacttacctgcggtggagaccccaagaagatacagccactgctacagaagaaacagatgcacaggccaatgagctctgtggagaccccaagaggatacagccactgctacaaaagaaacagatgcacaggccaatgaactctgagagtcccttagcctccccacgcaaactggggacctccaccaacccctcaccttattccggaccacatttccatcagtagcgttgagaagcacatccagctgctcaaaccagctgaggctcgtattcatatcctgtggcaggggagcggcaggggtctggctccctggtgtcttgtgcttgctctcctagcgggggatacccaaggtatccccaggaaaggccaccacgttagatggaaagagggaagtggggatgcaacactggggtaggtggatgcactatcagaccaaaactgcgatcctgtgactagggaaaggaaggacgctcttggggaactgggggaaaagcgggataccgtgatgatacgcagatatcaggtggggattgaaggtgccagaacctggttgagacctccccagaagtagtacactggcgccaccacgccaaacctgtgccagtgacaactgccgccgccgggttcaaaacttcgggttggttttgaaagtccgactttggactggctgccgcagcgccacctgggaaactgaggtcgcctcttgcgaacacaaccggcgatggaggcggtggaactacctttctctagaagagacacgtacatgcacacccccaccgtgtagcttgccgggaaactgagtcttcctgatttcgtgtggctgtctccaaggaggaaacgaactacgcatcccaagatgcatcgcgcataggcaatatggtcccgctactggacccatttcctacctgggaaatggagtcgaagctgactcaaaacgtaacggcccaattgtccttgagacttcattccccagcaagctcagcgtgtaacgtgcgctatggagccgaaagtcgcagagctgaagcagaagatcgaggacacgctatgt

SEQ ID NO: 1392 - DNA, 2300 bp, Homo sapien
ccggctaattttatatttttagtagagatggggtttcaccatgttggccaggctggtctcgaactcctcacctcaggtgatccgcccgcctcggcctcccaaagtgctgggattacaggcgtgagccaccatgcccggcctcgaccactacctttttaacccaagcccccactgaaactctgtccctgttgtcacatggacactgggctgcaggaacccaggaggatcagaggctcccgaggcctcacgccagttgcaacgaagccaatcatatatttcgccctagaacagcaggagggataaactaacctggaaggggtaaacctcgaagccaaaaggacatagcgtgtcctcgatcttctgcttcagctctgcgactttcggctccatagcgcacgttacacgctgagcttgctggggaatgaagtctcaaggacaattgggccgttacgttttgagtcagcttcgactccatttcccaggtaggaaatgggtccagtagcgggaccatattgcctatgcgcgatgcatcttgggatgcgtagttcgtttcctccttggagacagccacacgaaatcaggaagactcagtttcccggcaagctacacggtgggggtgtgcatgtacgtgtctcttctagagaaaggtagttccaccgcctccatcgccggttgtgttcgcaagaggcgacctcagtttcccaggtggcgctgcggcagccagtccaaagtcggactttcaaaaccaacccgaagttttgaacccggcggcggcagttgtcactggcacaggtttggcgtggtggcgccagtgtactacttctggggaggtctcaaccaggttctggcaccttcaatccccacctgatatctgcgtatcatcacggtatcccgcttttcccccagttccccaagagcgtccttcctttccctagtcacaggatcgcagttttggtctgatagtgcatccacctaccccagtgttgcatccccacttccctctttccatctaacgtggtggcctttcctggggataccttgggtatcccccgctaggagagcaagcacaagacaccagggagccagacccctgccgctcccctgccacaggatatgaatacgagcctcagctggtttgagcagctggatgtgcttctcaacgctactgatggaaatgtggtccggaataaggtgaggggttggtggaggtccccagtttgcgtggggaggctaagggactctcagagttcattggcctgtgcatctgtttcttttgtagcagtggctgtatcctcttggggtctccacagagctcattggcctgtgcatctgtttcttctgtagcagtggctgtatcttcttggggtctccaccgcaggtaagtaatgtctctttctacttccaagccctttctctttctgtgccttcctccagtgcccgtatcatccattattccttccaaattccaactctgtcctttcctgaactctgtttccccacacagaccctgcacttaacccttccttatttcctcagccggggacctggctgggacctggatttcctctcatcacttgcctctgcagtcaggagtccaagctcaacagccttgggctttagagactcccatagttccacaaaggctgagctgccctgagtcctagagcccatcctctctctggggtgaggttgctattctctgatcctaatttcaatgtcaggctcaggtgaggcttggaatccttggtgtgtatatgtgatgtttgtgtaagatgaggatactaggggtcgggaaaagctgttatacagtagttcatgtgcttttttctgcctggggaggtgacaggcactaaggcaggcagtgcagggcctgctagaagagcgagagcagcagaagtaccagatcagtgtcctggaaggtatctggccagttattttcttcatatacacagcttcatatgtatgcacacaattttgccacacacctgttgtgtgtgcacatgtgtcttgttttgcaagtagagtatctagggtcttgtgaaactcttagagaggatgatccctaacttgtcccactacagcatcactaaggttgctgcagggggccccaaaggggagtgcttttctcctggagcaatgcctggaggagctgagaaaggaactgcagggccttcagagccaggtgtgggagcaaacccaagcccaagcccaagcccagatgcaaacaggaccaggagaatgcagtactaccaatggccttcctcaggagctgcagactgagtaagggatagtcaagacct

SEQ ID NO: 1393 - DNA, 2300 bp, Homo sapien
agggagagaaggctggagagatcaataggagtgagattttgattggctttgaataccaatttaaggaatatggatttaatttggtgacagtgaagagccactgaagatttaaggagtaaactagcatgatcatttttagatcacactggctgcagtgtggaggagggactggaggtaaaattacagcaaggaggttattacagtaatccaagtgagaaatggtggcctggaccacagcatagatgggtggaatacaagggaatggatttgggagattcagtagacagtcttataggtcttggtggctgattggatgtgggggtagggaggtgagaggtaggagcctagggtgactggcagggctgcagttggctttgttcagtacaaaagctcctaatacccaggtctactcaacttgccagataggcattctcactctcccacacacctgccatccactgaaacggtgtctcaaagagttaaaggtcgatctgcaacaaatagcttttgttttctcaaaaacccagtgtcataatattagcttccagcacatcaggcatcaagcccttttacttggtaacaccacaccactatctccacacctttactcaagctttttctgatatttgggatgtacataaccctccttccttccaatctatcttttcatatatagctcaattccattttttctggcaagaccagtctcaagctagacccaacctacttctccctctatatcctctcccaggactgctgtgagccactcagcagaaggaatgggaagtgggtagtctcttaagcatcaggcaaagggctcaagctgagctgatttagctttgtaacttaactgctcagtgcacagggcactgatgtggggaaatgtaaccgtgtaaatgggggtcggggtgcggtgctgagactgctgtgccaggcaagtgtacaaagtttcattacccagcccagcactgatgactggaaatatcatgaattatccttctgttggtagagggaacaaaccagccaattgtttgcctgttcatcaccaggaatgcccttccttcctcagctgacctaaatgatagctatgcaaaccttctaggctttgccctctcctaaatcctttaggaagttccaaggtgactttgcctcacaggtccctttcttcttgtaaattatataggtgacaatctgagccacacacgctacaggtcatatggtgtctcccgttaacgaatccggcattatatggtggcaaaaggttaaacatgcgacaacttttttttttttttttttttttgacacggagtttcgctctttgttgctcaggctggactgcaatggcgcaatctcggctcactgcaacctccgtctcatgggttcaagcaattgtcctgcctcagcctcccgagtagctgggattacaggcatgcaccaccacgcccggctaattttatatttttagtagagatggggtttcaccatgttggccaggctggtctcgaactcctcacctcaggtgatccgcccgcctcggcctcccaaagtgctgggattacaggcgtgagccaccatgcccggcctcgaccactacctttttaacccaagcccccactgaaactctgtccctgttgtcacatggacactgggctgcaggaacccaggaggatcagaggctcccgaggcctcacgccagttgcaacgaagccaatcatatatttcgccctagaacagcaggagggataaactaacctggaaggggtaaacctcgaagccaaaaggacatagcgtgtcctcgatcttctgcttcagctctgcgactttcggctccatagcgcacgttacacgctgagcttgctggggaatgaagtctcaaggacaattgggccgttacgttttgagtcagcttcgactccatttcccaggtaggaaatgggtccagtagcgggaccatattgcctatgcgcgatgcatcttgggatgcgtagttcgtttcctccttggagacagccacacgaaatcaggaagactcagtttcccggcaagctacacggtgggggtgtgcatgtacgtgtctcttctagagaaaggtagttccaccgcctccatcgccggttgtgttcgcaagaggcgacctcagtttcccaggtggcgctgcggcagccagtccaaagtcggactttcaaaaccaacccgaagttttgaacccggcggcggcagttgtcactggcacaggtttggcgtggtggcgccagtgtactacttctggggaggtctcaaccaggttctggcaccttcaa

SEQ ID NO: 1394 - DNA, 2300 bp, Homo sapien
cagcctcccaaagtgctgggattacagacatgaaccaccgcgcccggccctgacagtgaggagttttaactcagtaaattgactacagagcctcagcttttattttattttttatttttcttttctttttaaattttactttctttctttctttagccccagcttttaaaccacgaataacagtgacatgatcagacttcagaaagatttccttcagctgcagtggaagggatggataagagatagtgttaattgaaatgagtgactaaactgactaaaccatgtcacagacacttttgtggctgtttcttccccagcttttaaaccacgaataacagtgacatgatcagacttcagaaagatttccttcagctgcagtggaagggatggataagagatagtgttaattgaaatgagtgactaaactgactaaaccatgtcacagacacttttgtggctgtttcttcccaagaggttctcaggaggtttttagtatttatacattttccttgaaaagtgggggtgggaaagattgaggcaaagactttagctaatgctcaggaaatctacgttttgttttttgagacggagtcttgctctgttgccaggctggagtgcagtggtgctctcggctcactgcaacctctgcctccgggttcaagcgattcccctgcctcagcctcccaagtagctaggactacaggcgcgccaccacactcggctaagtttttgtattttagcagagacagggtttcaccatgttggccaggatggtctcgatctcctgaccttatgatccgccctcctaggtggcctaaatctacatttttacataagataaggtgaatgtttgaagaaaaagggaatggaggaagaaaacaattatgtggtggactcagggtaatctagtagtaaggtactactagaaaggtagaaagtagtctagtagaaaggtaatctagtagtgaacatttatggaatttgtggaatagaggccaggtgcggtggctcgcgcttacattcctagcactttgggaggccaaggcgggcggatcacctgaggtcaggcgttggagaccagcctagccaacatgatgaaacctcgtctctactaaaaatacaaaaaattagctgggcgtggtggtgcgtgcttgtagtcccagacactccggaggtgaggcgggagaatcgcttgagcccgggaggtggaggttgcagtaagccaacaccgtgccactgcactacagcctgggcgacagggtgagtgagactccgtctcaaaaaaatgtggaatagaacaaactttagttttaggaactagactttatattgtagatctagttgcaattgacacgtccttgttttatgggaggctacatactttaaaggtttccaggggagcaaataattaattatgattttgtgtatgtgtgtttgtggggggtagtcatcaggaaatgtctgaggccttttgccttaccgtgtgggtctggctaatgtgtaatgttttgactcaagattgtaaagtcaaattattcatccggggagaggatggtcgtgtaactgaatcagcctcccaagatgaactttccctctggcgtaagtttaggagtcctgatattttattttcctttacaacagaaagcagcaaccctgtaattaaagagaacaatgaaggaagctatctaagccatgagggttactgaggatctgcgctggggttaaggctgcgaacttaagaaatatttggatagacagttctcatggcttggtgtggttagacgtggtcctccgtgggcagcagctaagacgcttactccagtttgggcattgagggcacagtgcgtagtggtcctggaagtaaagagaatcctggttttccgcagagatctaggattaacctaagcgttcgggttcgggagcggccacaagggcgcctcactccaacctcagccatccgcaacagggtggggtattagtatttttccgcacccgccccaacgagggaaagcgccgagtcattccggcggggcgcgccgggcggggctcgggccacatccccctcctctctctcctcctccggcacccccgtccgttccgactctcgcgagatccctactggctataaaggcagcgccccggagagctcttgcgcgtcttgttcttgcctggtgtcggtggttagtttctgcgacttgtgttgggactggtgagtgtgggcagtgcggcccctgcggagtgaggcgcggcgcgcccttcttgcctgttgcctcttcctcctcctgtccggggcccgcccg

SEQ ID NO: 1395 - DNA, 2300 bp, Homo sapien
tgtatttttagtagagatgggggttctccatgttggtcaggctggtctcgaactcctcacctcaggtgatctgcctacctcggcctcccaaagtgctgggattacaggcgtgagccaccatgcctggcctattttatttttttttgaatacaggctggagtgcagtggcgcgatctcagctcactgcaacctccgcctccctggttcaagtgattctgttgcctcaggctcccaagtagctgggattacaggctcgcatcaatacatccagctaatttttttttttttttttttttttttttttttttgaggggcagtctcgctttgtcaagaggctagagtgcagtggctcgatctcggctcactgaaacctccgcctcccgggttcaagcgattctcctgcctcagcgtcctgagtatctgggactacaggtgcgcgccacgacgcctagctgaattttttttttttttttttttgagatggagtttcactcttgttgcccaggctggagcgcaatggcgcaatctcagctcaccacaacctccgcctcccaggttcaagcaattctcctgcctcagcctcccgagtagctgggattacaggcatgtgccaccacgcccggctaattttgtatttttaatagagacggggattctccatgttggtcaggctggtctctaactcctgacctcaggtgatccgcctgcctcggcctcccagagtgctggaattacaggcgtgagccaccgcacccggccaagtctgattgtttttatgaggatggcctgatacattagacatttggtccaccaggacatcacttatgttggggagacagtgggggataacgggggtggggaaatgggaagagttgctctcagggagtaaaggtgtggggaaaagcagagccaaaccgagataaccctgtgtcttgcccatccctgccaaggaaaacacatacatgcaagacacctctccactcaaacagcacagactatttcaaatcgcagatgtgtcatttaattaatacctgtgtgactttgggaaaattataaatagccttaaccttgctgagtctgtccaatctgtaaaatggattatgaatactttcctcacaggcttatggtgtgctggtaatatcttcctctggatggcagttacattgcaaaaaataatttaaaaaaaagaactgtatacatttaagatttatacattttctttcttcctggatgtagaataggaaaaaaagaaaaagaaaaaaaaaaagactggtgtattttctgtatatatgctatactacgatttttaaaaaggcttgtacgaaataaaagaatattccttttcggccaggcgcagtggctcactcctgtaatcccagcactttgggagtccagggcgggtggatcacgaggtcaggagttcaagaccagcctggccaagatggcgaaaccccgtctctactaaaaaatacaaaaaaattagccaggcgtggtatcgggcgcctgtaatcccagctactcgggaggctgaggcagagaattgcttgaaccagggaggcggaggttgcagtgagccaagatcgcgccactgcactccagcctgggcgagagcgagattccgtctcaaaaaaaaaaaaaaaaaaggaatattccttttccaggattattatgaagattcaataaaaccatgtttattaagtgttaagcacagtgcctggcacataacgtgctgggcggggtctatggtccagacagggggaccaggcactttccagcgcctggatctgcagacgcgaggtcttctgtattctggccaatcttggtgttgcagctgctctctgggcctcagtttgcttgaactaaatgtaacggggccaacttaggtgaactttgggaatccagccaacctgactttagggagagtatggagccacggatggcattgtgaatccggagggccgacaccagaagaacctgcaacgtggcatctgctaccttacttcccccggaaaagcgcctgcggcggcgcctaggcgcgcggtgcaatgtgggccagcaaaaggcgaggctggccccgccccttgcaccgcccacgtggccagcgccacctgcctcattgtgcccaggagttctccaaacccgcgctgcggagtgagtgaccaagttccggccagttcgacctcgaggatccagaggtggagacggtactacctcccagctctgttttccatccccttcaggtccttcctcgggaggcggcgaaggcggtccaccctgcgcgtgatcctttatgcccggcc

SEQ ID NO: 1396 - DNA, 2300 bp, Homo sapien
ttgttttcaattttttgttgttattttttttgtgtttttttgagacggagtctcactctgtctcgcccaggatgaagtgcagtggcatgatctcagctcactgcagcctcccccgcctgggttcaagcgattctcctatctcagcctcctgagtagctgggactacaggcatatgccaccatgcacagctaatttttgtatttttagtagagaaaagaatttcaccatgttggccaggctggtctcaaacccctgacctcaggtgattcacctgcctcttcttcccaaagtgctgggattataggcgtgagccaccacgcctggccttaattttttttttttttttaaagaggtgggggtctcactatgttgactaggctggtcttgaacttctgccttcaagcaatgctcccatgtcagcctcccagagtcctaggattacaggcgtgagccactgtgctcagcctgaaaaaatatttactgaagccctctttatggtagatgccgggaaaatattgttagtttttgctagaccttgctgagatggcttgggtaggaaggcatcttagagactggttggggtgggagcagagcaaagggtttggagcctctgaagaggcttctggtcccttagactgaaaccatcttccatctttttttttttctttctttgttttgagatggagtttcgctcttgttgccgaggctgaagtgcagtggcacaatctcagctcactgcaacctctgcctcctgggttcaagtgattctcctgcctcagcctcctgagtagctgggattacaggcacctgccaccacacctggctaattttgtatttttagcagagatggggtttcaccatgttggccaggctgacctccagctggccaggctggtctcgaactcctgacctcaggggatctgcccacctcagcctcccaaagtgctgggattacaggcgtgagccaccgcgcccagttcatcttccatcttttcacctccactgcatagatgtgcctgttatatttctgagcccccttcccccagcattgaccttggggtggtgacagtagaaggctgaaaccaacatagctgaaacctctgcttctctcacctggcaggtaaaagcagctgttaagtatgcccttagcgtaggctaccgccacattgattgtgctgctatctacggcaatgagcctgagattggggaggccctgaaggaggacgtgggaccaggcaaggtaaggactggggttgtaaatagaggtgggataagagaacttagaagctgaagctagggctggggcccagctggagggaatctggcatcagcttccttccagttcctctcccagagttgagggtgggtgagaccacgtgctcatggctcttctcactgtgggccctgccccctgcactaggcggtgcctcgggaggagctgtttgtgacatccaagctgtggaacaccaagcaccaccccgaggatgtggagcctgccctccggaagactctggctgacctccagctggagtatctggacctgtacctgatgcactggccttatgcctttgagtgagccttgccagagcctcatctggggaatcagggggttgagcaggatggtgttagtaacttattgtaagtcacagcagcagagcaggataggaacactcatttgcatgccaagctgaggagcttgacatgggatcttagcctcttctgctacagcagcttagctgtagctacaggagtttaactctggaaaaaggaaggcagtctcacatggtgtgtaccccagggtatgcacctgtaaccctcctgctccctttattcatttagaaaaggtgctgacttttctgttgagcacctggggttacagtaataagtaagtctcagcagaagatgtgagaagagctcaccattagtgccgtgccctgtgctggaagaagggtggataactccctgaggatgagttaaggaagacttcctaggggagaggagatatctacgtctaggaagaggagggggcataggcattccatgtaaacttaacacctgggttacgatctggaaggatgaaaaagcatggctttttttggccaggcgcggtggctcacgcctgtaatcccagcactttgggaggctaaggcgggcggatcacgaggtcaggagatcgagatcatcctggctaacacggtgaaaccccgtctctactaaaaatacaaaaaattagctgcgcgtggtggtgagcgcctgtagtcccagctactggggaggctgaggcaggagaatggcgtgaa

SEQ ID NO: 1397 - DNA, 2300 bp, Homo sapien
tttctctgagttcctcaaggtagagtccatgtcttttgtccccagaacctagtacaaagtcttgtacctcaaagttgctcagtgaatattaatttaatggatgaatcggtcacaccagtaattgcagaggttttctcaggccctagccctggctgcaaggactttggagagatctcccctcccaacaccctccatttaccacatcatcagactgtggtagccattcaatgagtgcttagcgtgaattctacacagtgctaattacctgtaattctcacaatgtccttaagcggtggctactaatatgtcttcattttacacttaaccttaatcccagctactcgattacaatccgggttacgtgacctggctcacgtcacctagctaataatggaagagcccatgtatgtttgccataggaattggcattttcacgtccagctctctagccccaaagatttcaacctcttcgagccttgacagattggaataagaatcctctccaggaatctttcccaatatgctggaacctaaagggaaataaaaacccctactccgatcagcgtagactgggccatggtgaaaaggaatggatgatactccaggtgtgaggaattgcagctttttagcctgccagttatttttcactcagccatttgcaggaaatgaggcacactgctttccataactgatttgtcttgcaactttctgaacaagtcacagcttccccttttttttttttttgagacggagtctcgctctgttgcccaggctgcagtgcagtggcgagatctcggctcactgcaacctttgcctcccgggttcaagtgattctcctgccttagcctcccgagtagctgggattacaggagcctgccaccacacctggctaattttcgtatttttagtagagacggggtttcaccatgttggccaggttggaaccttggcctatttatttatttatttttgagacggagtttcgctctgttgcccaggctggagtgcagtggcgagctctcggctcactgcaacctctgccttccgggttctagtattctcctacctcagcctcccgagtagctgggattacaggcgcccgccaccacgcccggctaatttttgtattttttagtagagacgggggggtctcaccatcttggccaggctggtcttgaactcctgacctcgtgatccaccagcctaggcctcccaaagtgctgggattacaggcgtgagccaccgcgtccggccccttggtttatttttctaagaaacagactaacactgatctcactagtagcattgttaatattaaacaagatagctaatagctttaaagcgtctaatcacggtacccccacgagtagtagtcacacagcaaatcataggcaggagtggacaaacagcgctgggagcattaattctggtagatttggagtctgggcagggcctaagaggatgggatcagcggattgggccagccaaagggggcgggttcagagggaggagccagctgcctcccgctgcaagccccgagctttgaatcaagcgcggtagtttcagctgtagccaatcctagaacaaaatctttttgcgtcagttgttgctgaggcctagatctcacccagatcagttctagtcgctgctgcttgtacccgtcctcggcccttgcgtgtccgtccgttacgactcagaggacggagagaaagtctaagtcaccttcctcagtatccaggccggaaggagactctcagctactcgccctgaacatgcagagcagcactggcttccctgtctctggatgccgcaggggcgtcctgtcaggagttgtagtgtcaagattccagttcttcttatgcgacttgctggagaagcaggaagttgctgtttattggagaagtcgggctagggagggaaacaatcccgcggagccatatggagagggcaggaggtgtctagatagtggtaggccggcgggggacggagggtatgggtggtgagtcctggccctttaaacccgagggggaggatccggaagtggatgggcggggcgaagggtcctcgtatataaaagggccccggccgcgcggggtctctaatctgccattttctgtccctgagtgagtctctggcgtcccaaattgcctgtttttctcgcaggctctattccgttcgctggttcgccacctcaggggaacgatggccatggagtccacagccactgccgccgtcgccgcggagctggtttctgccgacaagtaagcgggactgtggaaagcttaaggcactggccagtc

SEQ ID NO: 1398 - DNA, 2300 bp, Homo sapien
catctgctgaaacttggtaggctttttgagggtttaaagggaatgtatttttagtttccatttatgcctttatcattaaactcgaagacatgtttatgcttcatgttctttaaccatgtagaggaagcaagggaagagttgagagaacaggtttatgacgccatgggagaaaaagaagaagccaaaaaaacagaagacaagtctttggcaaagcctgaaactgataaagaacaggacagtgaaatggagaagggtggaagagaagatatggatataagtaaatctgcagaggagccacaggaaaaagttgacttgactctagattggttaactgaaacctctgaagaggcaaaaggaggagcagcaccagaaggaccgaatgaagctgaggtcacttctgggaagccagaacaggaagtaccagatgctgaggaagaaaaatcagtttctggaactgatgtccaagaagagtgcagagaaaaaggaggtcaggagaagcagggagaggtaattgtgagcatagaggagaagccaaaagaagtttcagaagagcagcctgtggtgactctagaaaagcagggcactgcagtggaggtagaagcagagtctttagacccgacagtcaagccagtggatgtgggtggggacgagccagaggagaaggtagttacctctgaaaacgaggcaggaaaggcggttcttgaacaactggtaggtcaagaagtaccacctgctgaagagtcaccagaggtgacaacagaggctgcagaggcctcagctgtagaggctggatcagaagtctctgaaaagcctgggcaggaggctccagttctccctaaggatggtgcagtcaatggaccgtcagttgtaggagatcagactcctattgaaccacagacttctatagaaagactgacagaaacaaaagatggctcaggactagaggagaaggtcagggcaaagctggttcctagtcaggaggagactaagctgtctgtagaagagtctgaggcagctggagatggggttgataccaaggtagcccagggagctactgagaaatcacctgaagacaaagttcagatagctgctaatgaagagacacaagagagagaagaacagatgaaagagggtgaaggtaaccgggatatgcaagagctgcagtgggtggagtacattctggatttgactcactaattatgggtaaaagtcagccttccattcaggattttccgtctgcctttggattaggaaagggctaaatgaaaaggggggtagtttaacaaggtcgtgatagtcaagtaagttcaatcaaaagcagcaagtcttctttagctggcttataaactaacacttttactaactgcaaaataggccttctgtgtgatttctgagacttggctagctatcagtaacttgttgcagcatactagccaataaagtgggatggaaaaggtagatgaggggtggggtaggtagggaaatagtgggctaggctggcagagaatgctgaatggatgttcacttgcatgcctctggattttaaaattattgttcacatgactccttttctgtgcgttgggaagcagctacagagcagtagaatccactgaattggtacactgaagcaggcatgccatttaaatgaaggcagttaaccttgactgttgtatcaccagagttaaagaattctggtgcccctctttaagtcttcaggaagtgtttagaggcttattcacattagttaaaacaggccccccccaccttccccaaggcaacagaaaacataaccattagctctcttcctgttttccttcctcatttcatgcttgcttcggctgctaaactgaatttttgttacttagaatattataaagtgtggatgctttctataatgctattggtctaagtgtgattaaatttcattaaggtgtataagcctctaattattacataactggcacgtctgacttttgctatcatttgaggattctactgtatataagtttcatctaacattggcattaataaccacaggtatattccaactaattgttacttcttgtaattgccagactacttcaagagttctcgtaagttttagattttcagagacccatcttcaatactttgaactcattctggtaaacttccttctacctatgtgcaggtccctgtactccagccaacacaggctcagtaactggaaatgaattggctaaaatggtagcaccattgggtttcttaatggagctttaggagttctttatggaaaaaagcacagaactaaattcctcaaa

SEQ ID NO: 1399 - DNA, 2300 bp, Homo sapien
agggctaaatgaaaaggggggtagtttaacaaggtcgtgatagtcaagtaagttcaatcaaaagcagcaagtcttctttagctggcttataaactaacacttttactaactgcaaaataggccttctgtgtgatttctgagacttggctagctatcagtaacttgttgcagcatactagccaataaagtgggatggaaaaggtagatgaggggtggggtaggtagggaaatagtgggctaggctggcagagaatgctgaatggatgttcacttgcatgcctctggattttaaaattattgttcacatgactccttttctgtgcgttgggaagcagctacagagcagtagaatccactgaattggtacactgaagcaggcatgccatttaaatgaaggcagttaaccttgactgttgtatcaccagagttaaagaattctggtgcccctctttaagtcttcaggaagtgtttagaggcttattcacattagttaaaacaggccccccccaccttccccaaggcaacagaaaacataaccattagctctcttcctgttttccttcctcatttcatgcttgcttcggctgctaaactgaatttttgttacttagaatattataaagtgtggatgctttctataatgctattggtctaagtgtgattaaatttcattaaggtgtataagcctctaattattacataactggcacgtctgacttttgctatcatttgaggattctactgtatataagtttcatctaacattggcattaataaccacaggtatattccaactaattgttacttcttgtaattgccagactacttcaagagttctcgtaagttttagattttcagagacccatcttcaatactttgaactcattctggtaaacttccttctacctatgtgcaggtccctgtactccagccaacacaggctcagtaactggaaatgaattggctaaaatggtagcaccattgggtttcttaatggagctttaggagttctttatggaaaaaagcacagaactaaattcctcaaaaaacaaacaaacaaaaccacacacacaaaaaaacaaaactcccatgtcttgatcttaatgattgtgagcaaggatggtaaaaagctctgctggctgacccctaagaccttgaatggtaagctacaatacagatatcacagtcccttacagattgttcgaaaactcgttggatcataattaacattgttagaactctcatacattacatctgatcctaaaacaatactatgtgataggtagtattgcccaagttacagtgatgaggttgaggtttaaaggttacatgacttgtttagggtcataatactgaatctgaacccagatctgccttgaatatattattcttcccaagttaccacacattgaagaagacagtgttcatccttttcctacacccactgcttagaaattttgtcgtgggctgggcgcagtagcttcacacctgtatcccagcactttgagaggccgaggtgggcagatcacatggtcagaagtttgagaccagcctggccaatatgttgaaactttgactctactaaaaatacaaaaattagctggacgtggtggcatgcgcctgtggtcccagctacttgggaggctgaaccagaagaatcgcttgaacccgggaggcagaggttgcagtgagctgagatcatgccgctgtgctccagcctgggcaacacagcgagtctctgtcttccaaaagaaaaaaaaaatctgtcacttatttaaaaagttaactatattttaaaagccccaggcttttcatatgctgcattttttggtgttgtatatcagatactgttctgcttgtaaagacaatacagttttccatattttacaaaagaagaaatgggagaaaggggtttaagtaacttgccctagtcacacagtaaggagaagcctgctacccaaacttctggcttgagtactcaaccacttactttctgtgctttatttccctttacgtggcagcaccattctgcagaaaacttccaagcagtttttttcacttaaaaattaaaaccctgtttactgccacctcttgactctttgccatgtgttgggctgtacatttgcttctaataaagataattggtctgttctttttctctttgaatcgggtcttgctcttttgccaggctggagtacagtggcatcgcagtcatggctcacgacagcctcaaactcctatgctgaagccatcttcctccctcagtctctcaggcagctgagactatgggtgtgtatcac

SEQ ID NO: 1400 - DNA, 2300 bp, Homo sapien
cgtggtagcacacacttgtagtcccagcttcttgggaggctaaggcaggaggattgcttgattccaaggcagttcagggctacagtgagccatgatggcaccactacaatccagcctggatgacagtcctgctcccgcctcttcggcctagagcaggagattagagaactacaagctgtctcttgagggaaaaaaaaaaaaaatggtagtagtatttctactgaatgcctatcactgttgcaccattgtaaagtcaaccagtcaaaagtcttaaccattgaaaattgggacaaacttagttgttgaaaaggaggttttgatttgggctttgccatttacttgttttctgagaacatatttctaaaaatgtactctttatgtcagttggaattaagctgaactgagatgacatactttgaacactttgtaacttgctgctggtgggtcataccttggctttaggtactgagtagggaaatgtcttaagtccctgtcttgtttagaaaagggagtttcggccaggcatggtggctcacacctgtaatcccagcactttgggaggccgaggcgggggaatcacgaggtcaggagatcgagaccatcctggctaacactgtgaaaccccgtctctactaaaaatacaaaaaattagccaggcataaggctgggcgcagtggctcacgcctgtaatctcagcactttggcacgccgaggcgggcggatcacaaggtcaggagatcaagaccatcctggctgacacggtgaaaccccatctctactaaaaatacaaaaaaaattagccgggcacagtggtgggcacctgtagtctcagctactcgggaggctgaggcaggagaatggcttgaacccggaaggcggagcttgcagtgagcccagatagtgccactgcacttcggcctgggcgaaagagcgagactccgtctaaaaaaaaaaaaaaaaaaaagccgggtgtggtggcaggtgcctgtagtcccagctactggggaggctgaggcaggagaatggtgtcaacctgggaggcagagcttgcagtgagccgagatcgtgccattgcactgtagcctgggcaacagagcgagactgtctcaaaaaaagaagagaaaagggtgtttcttggccgggcgcagtgccttacgcctgtaatcccagcactttgggaggccaaggcgggcagatcacgaggtcaggagatcaagaccatcctggctaacatggtgaaaccccgtctctactaaaaaatacaaaaaatgagccaagcgtggtggtgggcacctgtagtctcagctacttgggaggctgaggcaggagaatggcgtgaacccaggaggcagagctcattgcagtgagctgagatcgcgccactgcacttcggcctgggcgacagcgagactccatctcaaaaagaaaaaaaaaaaagtaaagagggtttcttaagaaatatgcggtcacctcagagctcctccatatattttgggagtgggagtggagtgaagaatttcaccaacagttcagggtctttctggcttctggccaatcttgggagagagaaggggtttttttctggacttgattccctcatctgatagattcattctgttcgcccacagctttcatttcttgggctgtgctgattatcttcgtctacagctgaaaaatgaggaatcagggaatgggagttagggagactgctatccctggtgcgacatggtttccaggcagaatgctggaaaggtcagagtgcctcctttgccaggtagttctctggattggagaatggtacaaactgttacatccacttgggagtacagcaatgaaaaagatgacacttgccttttagaggctattaaatgaccaatgatgtagtaagtgataagggcccagcctagtctaggaggcagctgctttttcctctttattaatagtcagggaaaccaagctacaattagagacttgcccacgttcagactttgtaacactttttcaagccagtggctcctcccaaacggccgaggtttccccacccattctcctgacctgcccagccctgtggttgctgtccagggagctaaggctctccccaaacaaacttgaagatctcacagacctaatagacacggcctttcctctctgcctctggctttatgtctctttcatcctcctctgcctttcccctgcccttgatcccttctgcaggtcttggctggtttcaggaaacgggtcccatcccatggactcccactctggggagcctgcgctcctgccctgtgggacctgtgaca

SEQ ID NO: 1401 - DNA, 2300 bp, Homo sapien
ccaataaatggtagctattgttaccaacctgccagcacaacttatgtttgtcccatttcttgagagtttataaagactttcttaagtgttactttaagatgtctgcaagcattctgcaggactacagaaaatataaaaatgagtaagaaaatgtcattgtgtcctcaaggatctcataaatcaaaaggtaaaaaaatttttacaaggataaaaattatgatacaaaacttaagatcactttagccctgttgtgagtcaggggtagaatgaagattggaaaactaatataaaggctgctgctcttgaagcttgaagaggatggtaacagttggcagagaatggcagagatggtaacagttggcagaggtggtaatggcagatagtgggaggcaaattaggcagcaaaagaaaacagaagacattcttcctgggaaaattggggtaaatatggaaggtcaggtttcaggaaatgtgattgtggttctgggtacgtaggatatgagatgttagagggaggaagaggtaagataactaataagcagatgttgatttatccattcattttatctaaacattagcaataattattgagtatctgagtagtaaacactgtgtcactagagacacaaaataatacttggcctgtaatcgcaaagagtttactgtctagtgaagaaagagttatttgaaaaaaattgtgcttctctgcctggggagggtcatcaaagtctttacggataactgggattcaaatacatgataaaggaaagagaactgccatttgttgacatcttactatgttgcttggttagggcttttacacatattaaagcatttactcttttaatcctgggatatagagaatacacactgtggggttacatagctaataagtgatagagtcaggcttttaactcaggtctgacttcaaaaccagggctctttctactgttccagaatgcctcctgtcttgaaggatgaagaatagaagaggaagttgagaaattaatcttttgactcaaacttaactaagttgaaatctttgtgacactttctagggttgtgatcttaagcaagttattagattttgctaaactcttcttgacagtaaattggagcaagtacttggaatatagtttttgaaacatcctaattacccagtaagtggacgtttaaaaacagtagtacagtagttcattagaaagcaagtaggtagggcattctcggcagagggaacctgttgttaaccagaaaatggatgcagaatatggtatgtttggagtaaaggaaccatattggttcggtatggctggtatgtgaaagtgaatggggaagtcagacttgatggaggcctgtataaaaagaacaggagagaagttaaagtaggtagagatgcaattttacatattatctacacaattttaacattttaaactgaaacagttataagtaattgctttttctaatgaaattcacctagttcaacagactacagaagaagaagagtactgagtctggaatgctagtatacttacatccattgaaaagaagggaattcaagaggtaaagagagaactgagagagtgaagcatcaggaaatcaagaagggaaaaagggacaggttcagaaaatattcataatgagcaatatcgcatttcccaaagaagacaggttttttagagctggcctttgtaatataaggatgaaagttttggttatttatgaaagagttttactaaaattggggatagaggtgagtattgcagggaactaagcagtaaatagttaatgaacgagtgaaagataatgtatactgacttactcagaagtttggcaataagaaggtggtatataagattgagggaaaataagaagtctggcctttttctcctaatttcaataaggtggattagcatatttgataaacccaaaaggaaagagaagaaagtgctagaaagggaggaggacattcctttgaacttgaggggcaaacggcagaggaggtgggagaaagtttgagcccagtgattttagaatttttagtccagtagaagaagattctgaagtggagcaagctagggttgattcagaatttagaggaaaaggagagaacatttaaaaaacaacaacaaaaaaaactggttatacaattcactttaatggacttttacatgtataatcatctaataaaaacaggtgtggggcataatgatttttccagggggtagtctagctatctcatagggtttaagttactgaaaattaagttgaaataaaattggcacagacatagatattct

SEQ ID NO: 1402 - DNA, 2300 bp, Homo sapien
gtagaggcagtgattgttcaactactacatggatctcagattaaatcctagaaactgttttagaggcattaacctacttaatagtttcaggggggatgtgtgttgtattaagggtaaacacaaatggaattaccagtttatatagattaaagcagacctagtcacagtacacaaaagaatcagcctgagttattgataaaacgtttgggaagctagtaaacttaaaagtgcttcccattttgccagcgaatagaggaaggatgaaattggtaggcattcccaaaaataaaggcctacctttcctattttaaaatgtggacttttgggaaggtgcttctggtctcatctagacccatgatcttttgctctaaacttcattttgtttcaattttattttactcatttatttttgagacagggtctctgtcaccgaggctggagtacagtggcatggtcataattcattacagccttgaactcccgggctcaagcaatcctctcgccctagtctctagagtagctggtactacaggtgagcaccaccatgcccagctaacttttttgggttttttgtagagatagggtctcaccatgttgcccaaggtggtctagaactggcctcaaacgatcctgtcacctcagcctccaaaagtgctgagattacaggcatgagccactgtaccaggctaaacttcatttggggatttttgtttgtttttttattgagacggggtcttactctgttgcccaggctggagtgcagtggtgcgatcatggcttactgcagccttgacttccctggctcaggcgatcctcctacctcatcctcccaggtagctgggattacaggcgcacagtaccactcccagctaattttttgtagttttctgtagaagacagggttttgccatgttacccggctggtcttgaaatcctgggctcaagcgatgtacctgcctcagtctcccaaagtgctgggattacagcaatgaaccaccacacccggctctaaacatcatttcaaattgtcttaacaaaatttgcaggacctcataattggcctaatctgacccaaagcttggagctagtgggctacctgaaaagtatatagatctatcagagaagaataattgttttagcaccgtgaacttaagtaaaaagaattagaagacattctttcattttcgaaactataataagcaaagccctgtggttttggcataatgatagacataaaaggaatagaatagagagttcaaaaataggcctgtagaggctgggctcagtggctcatgcctgtaatcccagcactttgagaggctgaggcagaaggattgcttgaaagccaggagtttgagaccagcttgggcagcaaagtgagaccttgtctctacaagaaaaatttaaaaaaaaaacaacaacaaaaactaggcaggtgtggtggtgaatacctgtcatctcagctacttgggaggctaaggcaggaggattgcttgagccaaggagtttgaggctacagtgagctgtgatcgggctactgtactccagcctgggtgactgagaccctggctcttaaaaaaaaaaaaaaaaggcttatgtatgtattttgttgatttttgactaaagtacaaaggtaattcaatggggaagtgatagtgttgtgtttttgagctagaagaactagcttctatctacatgggggcggagtaaagaacctcagcctttgcttcatacacaaaaagattaacctgaaatggaacataagttaaaaagctaaaaccataaaacttttaagagaaaacaggagaaaatctttttacccactcgaatgggtaaaatattggcaaggatgttgatagtaagaaaaataaatgtaaacatgccccgatttacggttttccttgtcaaacatacccatattttcatggctttgtggactttggtctctatcatttaagaatgtcatagaataaaattctttgaaataggaagggatattagagttcatctataataatgtttctcaaactgcttccttccagttttgttacctcaaagacttattttttctctctgacctctttcattatgtgtaaatgagtaaaatgggtatgatgccaaaagtttagtattgttacaggtattatatctggaaataaatgttttataaaactgtaaaaactctagtagttgggagctgtggcttatacctgtaatcccagagctttgagaggccaaggcaggaggattgcttgaggccaggactgagagatcagcctgggcaacatagtgagaccccc

SEQ ID NO: 1403 - DNA, 2300 bp, Homo sapien
attgtgaagtggtggaaatggatccaaaataataagtgacttctctaccaaagcatagaagattcttcatatctccttccagtggctcaatttagattttgggaaggagcagaacaagtgaaacacagaaaactgaagagaagaaatcctcattttggacctatatttctccttgactatttcttaatatccatcctacccatcgttctaatgttttaactttgctctgaatttataaatagtaaaggccaaagacatagaatatacatttagtagctttataccaagaaatttgccttgaaagctgctgttcgtggagggaaaagtgtagcaaattcctgtctatttttattttttatttttttttaacaaagacaagatttatgtccctagattttgaaggttaaggcaaatataaatacatatctgcacactattttttagcagttgcatgagtaagagtaatgagatttgtattttaaggactttgtcatgtggatgttttggagttgactgctcagatcttttatagggctttaatatttttgatctattaccttgatgacattatttgtccacacttgagcccatctgtctttctagctatgaccttgttatgaacagtatttgcactcggtgcaaatatccatgtcttacctaattaagcaacatcatagtgccataactcaaggaagttgaatgaggtgaacatagatacagctctttccccttccccccctttttaaatgtaacaaatactttttatgttccccttccccccttccccttttcccctttccccttttggaaacgtgtcaggaaccaaatagtttaagatgagcagttgaggggactgagagagtgatcgacacagaacctggcttcttcgtgcttcatcataagtcgtgctgccggccaggttacttaagcacccttttaacaaggaaaccttgtgggagatccagctggccgactcgagttcagaaacaggaccacagaggttacactctggggtaaatattctccatatgtctaacttggaaagaagactctatgtatatgcatcatgaaaaataccgactgctttctgatgtaattaattttggagaatatcagtggggtggtttgaagacaccaacagatctcaggaaaactgatgctagttggtatttgaagaaattaatgtgaactaaatataaaagctcttgagaggttgtatcgtccttctctaggaagatctttttttcccccatcttgaggcagggtctcactctgtcacccaggctggagtgcagtggtgcaatctcagctcactgcagcctcaaccttcccagctcaggtgattctcccaccttagcctccagagtagctgggaccacagacgtgtgccaccacacctggctcctttattattatttttgtacagatgaggttttgccatgttgcccagactggtctcgaactgctgggctcaagcgatccacctcggcctcccaaggtgctgggattacaggtgtgagccaccgtgcccagccaagaagatcttttctactgcttttgctagaagttacctgagtacttgaagcagattaatctcttttcataagtgtctgtggttttaaatagatgtttaattcttcatgttctttgatgtaacaatcaagaattcattagcttccttcataaaaccttccagattcactgggcgcagtgactcacacctgtaatcccaacactttgcgaggctgaagcaggatgatcttttgaggccaggagttcaagatcagcctgggcaacatagcaagacccttcctctccaaaaaataaatcttccaggctcatgttacagttttcttttgtttagaacttttgttttaacaaaaattgcttttatttagaacttctctgagttataaggcttggtaagtaatctgtagacaggctcagagggcaggtctttctgtaaagaggaatcttagaataattacagattcctttacacattggtatcagattcttgtaaacataagtgatttgaattgttttgttttcagatcctggccatgaggttggatgcctcaccttactgaaaggagacactggacctaaatggcgcagcatgattttgttcctgcttggctaaatttctcaacaccacagtcagctaaggtactgttctccattcctgtagtaacttctcaaatatgagagggtttgggggtggttttggttgttttttggtttcattttgttttgagacagggtctccctctgtcacccaggatgaagtgcggtagtgt

SEQ ID NO: 1404 - DNA, 2300 bp, Homo sapien
acagttgaaactctttggggcctctcttttattgcccttcatttccccagagatacttactatcctgaatttgatatttcttattcctatgaacttattcccatgaacaatagtgcaaggctgctgaattggatatatgagaaatatcttccaaactaagatttaccagtatagaccagaattgcccatagatgcaaaaattcttttctatcaaaaaattatttccacagccaggcacagtggctgacacctgtaatctcagcactttgagaggccaaagcaggaggattgcttgaacctaggagttcaagaccagcctgggcaacacagtgagatcctgtgtctacaaaaaaatgttttttaattagatgggcatgatggtgcatatctgtagtcccatggtttttgttactcgggaagctgaggtctctgagaggattgcttaagcctgggagttcaaggatgcagcgagctacgatcaagtcactgcactccagcctaggcaatagggtgagaccctgtttctaatttgtatcccctgaaagaatgttgagaaattaccgaagaaatttttgtttcactccgtgcctaacaagttagattataaaagttttaaatctctgaattgagagccaggtatctaaaaatatataccatataaatatataaaatatactgtgacagatatctcaaggatcctagctgtggctagtactaaacaaataggtagttggtgatataccagcaagctatatggttctttgaccactcatggcaacctgtcccatttatgagagaaaaatctatatctgaaagacctattattttgcatttctgaataccttagatagctgattggaaaatttggcctctcaaagtgttgagattacatgtgcttttatataaaaaagcaaactccaggccaggcatggtgggtcactcacgtaatcccagcactttgggaggccaaggtgggcggatcacaaagtcgagttcgagaccagcctggacaacatagtgaaaccccatgtctactaaagatacaaaaaattagctgggcatggtagtgcacacctgtaatcccagctactcaggaggctgaggcaggagaatcgcttgaacccgggaggtggaggttgcagtgagctgagatggcgacattgcactccagcttgggcaacaagagcgaaactccatctccaaaaaaaaaaaaaagagcaaactctgtttagatgacttttctcaaatccttaaaaaagatttatatccaagtcatcttgttggtataggtggtgacatacatctgtagtatctaaattggacttaagagttttgactctcaggaccttgatttcattatttaactgtgtctcattttagcagatatatgtatatatgatagtgattttgccttctgtgattttatgttttgttttttcatttacagagtgatagattcgtgtggcctttcaaatgattgtgaagtggtggaaatggatccaaaataataagtgacttctctaccaaagcatagaagattcttcatatctccttccagtggctcaatttagattttgggaaggagcagaacaagtgaaacacagaaaactgaagagaagaaatcctcattttggacctatatttctccttgactatttcttaatatccatcctacccatcgttctaatgttttaactttgctctgaatttataaatagtaaaggccaaagacatagaatatacatttagtagctttataccaagaaatttgccttgaaagctgctgttcgtggagggaaaagtgtagcaaattcctgtctatttttattttttatttttttttaacaaagacaagatttatgtccctagattttgaaggttaaggcaaatataaatacatatctgcacactattttttagcagttgcatgagtaagagtaatgagatttgtattttaaggactttgtcatgtggatgttttggagttgactgctcagatcttttatagggctttaatatttttgatctattaccttgatgacattatttgtccacacttgagcccatctgtctttctagctatgaccttgttatgaacagtatttgcactcggtgcaaatatccatgtcttacctaattaagcaacatcatagtgccataactcaaggaagttgaatgaggtgaacatagatacagctctttccccttccccccctttttaaatgtaacaaatactttttatgttccccttccccccttccccttttcccctttccccttttggaaacgtgtcaggaacc

SEQ ID NO: 1405 - DNA, 2300 bp, Homo sapien
tttaaactagaattcgtaagataaaaagtacgcaccagacagttatttatatcttttccatatggatgcttgacttatttttccagaataacttcactacagggacagtttcatttatctattactgagagttacaggtgtaggcttatataaaaacaattttggggttttttgcttttttttttttttgagacagagtctggctctgtcacccaggctggagtgcattggtgggatctcggctcactgtaacctccgcctcccggattcaagttattctcttgcctcagcctcctgagtagctggaactatgggcatgcaccaccatgcctggctaattttcgtattcttagtagtgacggggtttcaccatgttggccaggctggtcttgaactcttgacctccattaatccactgtctcggtctcccaaagtgctgggattataggcgtgagccaccgcacccggcctaatattcttttaagtgttagaagtttataaaaagagcaataagtgaatagtcatcttgtacccatcgctcaacttgagaaataaggcattacagatacagttgaaactctttggggcctctcttttattgcccttcatttccccagagatacttactatcctgaatttgatatttcttattcctatgaacttattcccatgaacaatagtgcaaggctgctgaattggatatatgagaaatatcttccaaactaagatttaccagtatagaccagaattgcccatagatgcaaaaattcttttctatcaaaaaattatttccacagccaggcacagtggctgacacctgtaatctcagcactttgagaggccaaagcaggaggattgcttgaacctaggagttcaagaccagcctgggcaacacagtgagatcctgtgtctacaaaaaaatgttttttaattagatgggcatgatggtgcatatctgtagtcccatggtttttgttactcgggaagctgaggtctctgagaggattgcttaagcctgggagttcaaggatgcagcgagctacgatcaagtcactgcactccagcctaggcaatagggtgagaccctgtttctaatttgtatcccctgaaagaatgttgagaaattaccgaagaaatttttgtttcactccgtgcctaacaagttagattataaaagttttaaatctctgaattgagagccaggtatctaaaaatatataccatataaatatataaaatatactgtgacagatatctcaaggatcctagctgtggctagtactaaacaaataggtagttggtgatataccagcaagctatatggttctttgaccactcatggcaacctgtcccatttatgagagaaaaatctatatctgaaagacctattattttgcatttctgaataccttagatagctgattggaaaatttggcctctcaaagtgttgagattacatgtgcttttatataaaaaagcaaactccaggccaggcatggtgggtcactcacgtaatcccagcactttgggaggccaaggtgggcggatcacaaagtcgagttcgagaccagcctggacaacatagtgaaaccccatgtctactaaagatacaaaaaattagctgggcatggtagtgcacacctgtaatcccagctactcaggaggctgaggcaggagaatcgcttgaacccgggaggtggaggttgcagtgagctgagatggcgacattgcactccagcttgggcaacaagagcgaaactccatctccaaaaaaaaaaaaaagagcaaactctgtttagatgacttttctcaaatccttaaaaaagatttatatccaagtcatcttgttggtataggtggtgacatacatctgtagtatctaaattggacttaagagttttgactctcaggaccttgatttcattatttaactgtgtctcattttagcagatatatgtatatatgatagtgattttgccttctgtgattttatgttttgttttttcatttacagagtgatagattcgtgtggcctttcaaatgattgtgaagtggtggaaatggatccaaaataataagtgacttctctaccaaagcatagaagattcttcatatctccttccagtggctcaatttagattttgggaaggagcagaacaagtgaaacacagaaaactgaagagaagaaatcctcattttggacctatatttctccttgactatttcttaatatccatcctacccatcgttctaatgttttaactttgctctgaatttataaatagtaaaggccaaagaca

SEQ ID NO: 1406 - DNA, 2300 bp, Homo sapien
acaatcaggtactccatacctaaagtatgttttcacttgttaaaatgtcttacactattctagtaaatatctcaaacttaatagcaccctaatttcctttcaaatattggataaaaaagaccttagaaaagatcagcagtctactaaattacaaatataagtctaatgaggagtgactaccaatcactttacttttggataagatttacacaagaacacgacttactactaaactaaaacatgaaccactattattaactgtatttttctggtaagcaataaatgtcaatgttaaaaatatttcaacaaatatgacaagccaacttcagagcacgaagttggcagataaaattgacaccacagcacaatttcaaaactataagcaactattaaacacacacaccaccgcaccgcacccattcttatgtaaacttttggaatagtcaactttgtgagcctcacctttgttttcacccagcataaggagagttaaaggtgagacaccaactgcaaaaaaccaaaatatcaaaagattcagttaatgtccccacaggggaaaggactaaaatctttaaacgttaatgtatttaagtaatcgaagggcagggcacttccccaagctacagccattttggattcagactgtctttcgaatttcacgggttggggagaactagatttaaaacaacagaaaaaaaataacacttaaaacatttcaggatcgaccagctttccctgcccctccaaggaaaggaggttggtagatatcggatagactcaatctaagcgaaaacacctcgctaccacagagaaccggaaagctgggggttaaaacttttttcccctcagatatccaacatttgacttacactttttcctccttaggttttcctttgaaggaaaacaaaagcccttagctctcatttcaagaaggaaagaaaaaaacccgtaagccaagtcactcaacgagcaccaagccggatcgcctggagaggagccaaagagccgcaggtgagcgttccgacccgacgaccgaagttaaagtaggagcgctttcgcggagccccggcgacgctcgcgtgcaaagctccatgcacgggggaggcgggggtgccgcatccgaaccacttgacccgtgggctccgctcgcccctctcgggtcggacctatacccaaccacctgtgtgagagcttctttcaactagttttaacagcccgttggttaggcaccgggcggagccccgcgccagaacgactccaggatctcctactgccccgtttcccaaactcccactcaccgggcagcggcggagctatggccagggactagacgctgcgtctgaggacgcgtccccagcttgtcgacccggcagaggcggctagtccacaaccataacaaagctcttcccaaaatggctgcccggcccacaaggtccaggaggggcagagcgggtggaggaggaggagcgaccagcagcacggccctcccatcccccgtccgaccccgccttacacacgcccacctgaagaagcgcatgcgcaagggactgctccggcgaccctcccggacgccagttccctacgctgccaacgttcggcctccagaacggcggttatgccctgccccgcccccggctcccttcttcgccgcttgaggcggcgcatggtcacctctgccccctacagaattgaatcctctgcctttcctcgtgccgcctgaggcacggacaagcctagtttagtacgccccttctaacccccttgcccacttccagggcctgggcgcgtatgaatgagtgggtgggtatgcatgtgtgtatcccttttttcttcaccctcccacagcccgccccttggccagtgcgcgtcccgaaactacctctacaaggacttgcaaaccggtttcggaggaacgtgtgttttccggccctttcccaccttccgctccttacttctcgtgtgcgcgtcgttgagactccagtccccagcgggccacacggcctggccccggaggctgcgcggctgcgtcggccgcgctacccgctgggagtagtagttcccctggagcgcaggcgtcactcccccgcccaagcgaagggcgggattccggcgagagcctgcgcttgcgacagtgccgtttctcctacctgaagtctcattgggtatcgcactactggaaggggcggcgctgccatgacagagaaggcaataaaactgaaggcctagctcgactaaaagcgcttactattaaggaagacttcgctgtggctccatccggcacggaaagctaaaccgtgtaa

SEQ ID NO: 1407 - DNA, 2300 bp, Homo sapien
gagcaccaagccggatcgcctggagaggagccaaagagccgcaggtgagcgttccgacccgacgaccgaagttaaagtaggagcgctttcgcggagccccggcgacgctcgcgtgcaaagctccatgcacgggggaggcgggggtgccgcatccgaaccacttgacccgtgggctccgctcgcccctctcgggtcggacctatacccaaccacctgtgtgagagcttctttcaactagttttaacagcccgttggttaggcaccgggcggagccccgcgccagaacgactccaggatctcctactgccccgtttcccaaactcccactcaccgggcagcggcggagctatggccagggactagacgctgcgtctgaggacgcgtccccagcttgtcgacccggcagaggcggctagtccacaaccataacaaagctcttcccaaaatggctgcccggcccacaaggtccaggaggggcagagcgggtggaggaggaggagcgaccagcagcacggccctcccatcccccgtccgaccccgccttacacacgcccacctgaagaagcgcatgcgcaagggactgctccggcgaccctcccggacgccagttccctacgctgccaacgttcggcctccagaacggcggttatgccctgccccgcccccggctcccttcttcgccgcttgaggcggcgcatggtcacctctgccccctacagaattgaatcctctgcctttcctcgtgccgcctgaggcacggacaagcctagtttagtacgccccttctaacccccttgcccacttccagggcctgggcgcgtatgaatgagtgggtgggtatgcatgtgtgtatcccttttttcttcaccctcccacagcccgccccttggccagtgcgcgtcccgaaactacctctacaaggacttgcaaaccggtttcggaggaacgtgtgttttccggccctttcccaccttccgctccttacttctcgtgtgcgcgtcgttgagactccagtccccagcgggccacacggcctggccccggaggctgcgcggctgcgtcggccgcgctacccgctgggagtagtagttcccctggagcgcaggcgtcactcccccgcccaagcgaagggcgggattccggcgagagcctgcgcttgcgacagtgccgtttctcctacctgaagtctcattgggtatcgcactactggaaggggcggcgctgccatgacagagaaggcaataaaactgaaggcctagctcgactaaaagcgcttactattaaggaagacttcgctgtggctccatccggcacggaaagctaaaccgtgtaatggctggcaaccaggaagctagactacctagaatccggaggattggagggactggccggcgtgggcccctgagatctcctactacatgtcttcagttttatccatagacacggaagggcactaaaattgcctggtgccatttcctgtgaaacaagtctagataagagaagggacttgcccaaggtcacatagccgagaaataaagccgagggcagtaggagaaatgatctgactttccgaaccacccccaagcctagggcccttatcaccacacctttcatggaagtgaaaatcctgctcttgtgctctttaacccttaatgaagtttataggtcccagcaaagaaaatggatgtaagaactgggcttttttccccctctaaatgatagtaaagggccctaatgcagtgagatgtgtccccataggccttataaaccctgttttgcaaagtaaaacataagtcccacagatggcaagcaattcaggtcacactgggcctaaaatcccgtctcttaccttccttcaccaccatcattctgagattgtttcagtacttgcactctacttacccgaactctgtgggcagattctgctgcctgggagccctggaatagaacttcaaggaccgttcaacatctggattcaactagaaattaagaatggcccccaaacagaaagccgggcctaggaaccaattagcgcaggtcaagtccctacccggactcattttttttcagccctcaggaagtaggggcctctctgaatccacttgccggaagtgcctttccagtggacctgggctgttgttgcggttgttttccttctctccgtgcaacgctggcaagtctcaaagtcgccacaggtgcaggttgggatgggaggcaccaagggttggtagtaaatttgcgacgttgggatgggagggcaccaagggttggtagtaaattggagacgcgggcactctcgg

SEQ ID NO: 1408 - DNA, 2300 bp, Homo sapien
cacttttgttcaaaatcactttcttcttaaggactttccagaccactccatttaaaatctcaaccatccccccatctttggaaactccctttcctctgtggcacgtgctttccaactagtgggtattaaaaagtgataacctaaaaagtccagggacggcaggtgatgcgggattaaggactgagactcaaagcttaatcctcctaatataaatgaaaaagctcaatattcccattgccctggtgggaagactgcaaactgccagcttcaaactgacctctgagaaaggaaggcggggtttagacgccagtgtcttcgggaaaccctgcccgagagtgcccgcgtctccaatttactaccaacccttggtgccctcccatcccaacgtcgcaaatttactaccaacccttggtgcctcccatcccaacctgcacctgtggcgactttgagacttgccagcgttgcacggagagaaggaaaacaaccgcaacaacagcccaggtccactggaaaggcacttccggcaagtggattcagagaggcccctacttcctgagggctgaaaaaaaatgagtccgggtagggacttgacctgcgctaattggttcctaggcccggctttctgtttgggggccattcttaatttctagttgaatccagatgttgaacggtccttgaagttctattccagggctcccaggcagcagaatctgcccacagagttcgggtaagtagagtgcaagtactgaaacaatctcagaatgatggtggtgaaggaaggtaagagacgggattttaggcccagtgtgacctgaattgcttgccatctgtgggacttatgttttactttgcaaaacagggtttataaggcctatggggacacatctcactgcattagggccctttactatcatttagagggggaaaaaagcccagttcttacatccattttctttgctgggacctataaacttcattaagggttaaagagcacaagagcaggattttcacttccatgaaaggtgtggtgataagggccctaggcttgggggtggttcggaaagtcagatcatttctcctactgccctcggctttatttctcggctatgtgaccttgggcaagtcccttctcttatctagacttgtttcacaggaaatggcaccaggcaattttagtgcccttccgtgtctatggataaaactgaagacatgtagtaggagatctcaggggcccacgccggccagtccctccaatcctccggattctaggtagtctagcttcctggttgccagccattacacggtttagctttccgtgccggatggagccacagcgaagtcttccttaatagtaagcgcttttagtcgagctaggccttcagttttattgccttctctgtcatggcagcgccgccccttccagtagtgcgatacccaatgagacttcaggtaggagaaacggcactgtcgcaagcgcaggctctcgccggaatcccgcccttcgcttgggcgggggagtgacgcctgcgctccaggggaactactactcccagcgggtagcgcggccgacgcagccgcgcagcctccggggccaggccgtgtggcccgctggggactggagtctcaacgacgcgcacacgagaagtaaggagcggaaggtgggaaagggccggaaaacacacgttcctccgaaaccggtttgcaagtccttgtagaggtagtttcgggacgcgcactggccaaggggcgggctgtgggagggtgaagaaaaaagggatacacacatgcatacccacccactcattcatacgcgcccaggccctggaagtgggcaagggggttagaaggggcgtactaaactaggcttgtccgtgcctcaggcggcacgaggaaaggcagaggattcaattctgtagggggcagaggtgaccatgcgccgcctcaagcggcgaagaagggagccgggggcggggcagggcataaccgccgttctggaggccgaacgttggcagcgtagggaactggcgtccgggagggtcgccggagcagtcccttgcgcatgcgcttcttcaggtgggcgtgtgtaaggcggggtcggacgggggatgggagggccgtgctgctggtcgctcctcctcctccacccgctctgcccctcctggaccttgtgggccgggcagccattttgggaagagctttgttatggttgtggactagccgcctctgccgggtcgacaagctggggacgcgtcctcagacgcagcgtctagtccctggccatagctccgccgctgcccggt

SEQ ID NO: 1409 - DNA, 2300 bp, Homo sapien
ctaagatctgtgatcaataaattagttcaatcgattttttttttttttttttgagacggagcttcgcactgtctcgtgggctggagtgcaatggcgcgatctcggctcactgcaacctccgcctcccaggttcaagcaattctcctgcctcagcctcccgagtagctgggattacaggcgcctgccaccacgcccagctaattttttgtatttttagtagagacgggggggaggttcactacgttggccaggctggtctcgaactcctgacctcgtgatccacccacctcggcctcccaaactgctgggcttacaggagcgagtcactgcgccctgcccaatcgattttttaaaattaagcagcaactgtaggtttttttagacatcccattctcttggttaagaatgaaattgtcagatctagatccatattatcattcacctgtttttactggctgcttacattagagtttttaatcagtccctcctgtgtaaagtgctttgtgtcagggacggttctcagctatttacatgtagtaacttattaagtgttatatcaggctaagtggcacacacctgcaatcccagcactttgggaggccgaggcaggtggattgcttgagctcaggagttcaagaccagcctgagcaatatggcaaaaccccttctatacaaaaaatacaaaaattggggccaggcacggtgcctaatgcctgtaatcccagcactttgggaggccaaagcaggcggatcacgaggtcaggagatcgagaccatcctaacatggtgaaactccgtctctactaaaaatacaaaaaatgagctgggcgtggtggcatatgcctgtagtcccagctactcaggaggctgaggcaggagaatggcatgaacctgggaggcgaagcttgcagtgagctgagatggcaccactgcactccaccctgggcgacagagcaagactccgtctcaaaaaaaaattggctgggcatggtggcgtggcctgtagtcccagctccttagagggctgaggtggtaagatccctcgatcccgggaggtcaaggctgcagacagcggagagcacgccactgcagtccagattgggtgacagagcgagaccctgtatccaaaaaaaaaaatgttacatcaaccctatgaattagtatccatatttcaaaggtgaatgaactgcaccataacaagattaaataatttgttcaaagacacacagctaataagtagtggagccaggattccaaccaagtttgacaccaaagtctgcactccaacaggctattctctctcagtactaagttaatgaggttattttgagcattaaatgagttaatgctcaccgggcgcggtggctcatgcctgtaatcccaacactttgggaggcctaggcagttggatcacctgaggtcaggagttcaggaccagcctggccaacatggcgaaaccccatctctcctgaaaatacaaaaattggccagacatggtggcaggagcttgtaatcccagctacttgggaggctgaggcacaagaattgcttgaacccggtaggcagatgatgcagtgagccaagatcgcgccactgcactccagcctgggcgacacagcaagactcttgtctcaaaacaaacaaacaaattaaaaaaacctaaattatattggttggtactatcgttattttgagttgtgaactcttaagccccaaaataggaggaaaaaaggaaacagaagctatgaccttccagttttgttttggttttttttttaatttcacaaaaacaccacttagaagacccttcattttaaagatgagaaaaccagtactcaagcaatttgcccagtgtcacacagctaggaaatggtggaagtatctgtaaaatctctatgtgcattactctttctattacactagacagccaaagctaaaagaacagttcagatactaaaaggatctattttgttactgtgttaccgacagtttgaaaacattaatgattcttttcaaaggaaagtgttatattcatgaattactactatttaaaaattaatgtataaaatgaggaaaattaagtgacaccttgtgttatacacagaaacatgcccctgattcagtgcctctgcttagctgtaacatgttaatcagaactacctggcatcttcctgaacaagactttcaataggggccagtatgcttcgcttcatccagaagttttctcaagcatcttcaaaggttggtttgttcagcagatatttgagcactatttgccaaatattgcttgggctaggtca

SEQ ID NO: 1410 - DNA, 2300 bp, Homo sapien
ggccaacacggtgaaactgtctctaccaaaaatactaaaaattagccaggcgtggtggcgggttcctgtaatcccagctactcaggaggctgaggcaggagaatcgcttgaacctgggagacagaggttgcagtgagccaagatcacaccattgcactccagcctgggcaacaagagcgagactccgtctcaaaaaaaaacaaaaaaaaaagtaagacactactagtcattttggctatagcagcacattgaaatttcttcagggaatgatgtataacaggagttagcaaactttttgtgtaaaagcccagatagtaaatatttttggcctgtgggccatacacaatatccttttttgatatatgctttgtctttttttaaaaaataccttttaatatgggaaaatcattgtttgttctcaggctataccaaagtagactatagttcccaacccctggttagcccacctttttgaaaatatgttctgcagattactaactccactggatgctccttgtaaaaaggattccatggtcaaataaatttgtcaggtgttccatgctgtgtcattctcttggacatttttaagactcattaaaatactaaaggcttttaaaaaatcctttggtttataagcttctttctccttggagctttgtggttcttttgtttttatttgcttatttttgagtgtattacctacttgtattccatagactttgtttcttagaatgttgtcctgtgtatgagttctaggtcatttcctgatcatgttttataatcagaccttttaaaaaattatattcctctaaatttactttgttcatgcccacttcaagtttattttaaaatattctgggccgggtgctgtggcttacacctgtaatcctagcactgtgggaggctgaggtgggacaatcacttgagtttaggagtttaagaccatcctggacaacatggtgaaattccatctctacaatagaaaaattagctaggtgtggtggtgtacacctgtagtcctacctactcaggaggctgaggcaagaggagctcttgagtctgggaggttgaggctgcgctgagccgagatcgttgctgtgcattccagcctgggtgacagagcgagaccctgtctccaaggaaaaaacaaagcaaaaaaaagaaaaaaaaatctgtatgcttacctgactagatagttttacatttaaacatgtaaaaagaactgggatatcgaatttctcagtggatttctttactatcatttcataacactgctaacatattttttttttctctcttaaccaggaaaagtgggttgaagttgcctcaatgaaagtgcctagagcaggcatgtgtgttgtggcagtcaatggtcttctgtatgtttctggaggtcgatcttccagccatgattttttggctccaggtaccttggactcagttgaagtttataaccctcattcagatacatggacagaaattggtaacatgatcaccagtcgttgtgaagggggcgttgctgtgctatgaaatataaagcataacagagcacaaggaacattttgaaaatgcaggacctgaccttttgcaaagcaaacatagatttggtgataagaccctctgattctgtgagttttccatgtatttggtagataaatgactaacgaggctgggcgcagtggcctcatgcctataatcccagcactttggaaggctgaggcagaaggatcacttgagcccaggaatttgaggttgtagtaagctacgatcatgccactgcactccactctgggcaacagaatgagatcctgtctcttaaagaaaaaaaataaactcaagaatgatttttctaaaaatatgagtgagaatggatatggaatatatcccaattaataaagagctcacacagatttgccaggtttactaataatagaaatgccatttatgctgtagaattctccagtttaagtgtagacaactcctattttacaaatttgtagaaattatttactagaagcttcctggcaaatagtccctttagctacttctccagtgcagtataaattgtaacataaaactttatgtgatataggaatagtgtcaatgacacagtttaaagacctctatattcacaattatatccagagcataattttccatggccatagtttgagccacagagaaagccaatgaaatagattcctacttttatttaatgccaagagttttcactagccccaaactttttattggcagcagatatcctaggaggggtgtttgggaaatatctagctatttta

SEQ ID NO: 1411 - DNA, 2300 bp, Homo sapien
agtagctgggactacaggcctgtgctatcatgcctggctaatttttttgtatttttagtagagacagggtttagccatgttgcccagactggtctcaaactcctggactcaagcgatctgcctgcctcagcctcctaaaaatctgggcttacaggtatgagccactgtgcccagcccctttcaccctctttaaaaaatttatttttcacttcaatttgggtgacagagtgagaccctgtcccccaaaatagatattttttaaattggcacataataattgttttatatttacatttatgaggtacagtgtgatattttgatacatgtatataatgtataattatcaaatcagggtaattaccatattcatcacctcaaacacttcttgctattatatgctagttatatgtaatatgttgatattctgtagatggtgatatgaagttttagcagctaccttcgaatctctcaatcaaatttctcaataagttaattcctagaaagtgatgataatcagccttgttattttgactttgataagtttaaatgctataaacgtaaccattttttttctaacatcagcccacactataagtcttattacccattgtcattgatacctaaattacaaaatcttagtcatcttaaatttccctgtgctattccatatgtcttatattacaggatctcatggtttttttttttttttttttttttttttttttttgagacagagtcttgctctgttacccaggctggagagcggagggcagtggtgtgatctcagctcactgcaacctccatctcctgggctcaggtgattcttgtgcctcagcctcccaagtagctgggattatagccctgatccaccacgcctggctaatttttatatttttagaagagacggggttttgtcatgttggtcaggttggtctcgaactcctggattcaagtgatcctcacgcctcagcatcccaacgtgctgggattacaggcgtgagccactgtgcccagcagtttctttatttaaaaagtaatttagaacgtgtccggtggcctaataattcctatgcagtgtgatatggtggaacagtcctggatttagagtaagaaggcctggattcagatactgagactgtcatactaacattgtatccttggggaaactttgagcttcagtttccttttctctcattttagataagattatcttttcttctcacctcttaattattgtgagagttaccattgacataatatgtggagaagttaaaagttaaaaaaaaaacccaacctaagctgttgttatttctccttgttctcattcatttcacaaacattggaaacctaacatatgttatatactggtgctaaagctatgaaagatagtacctgcctttaaagggctgtgtttcaaggagctctgaagcgcgcgcgcgcgctcgtgtgcgcgcgcatgcgcgcactaagagtagggtggtagggtatttgataaggtagacctgtgctatagaatgtaaaaccaataagcttagggtgagcaacaaactcagatgagtttgggaacatatttccacaattccagaggagcaatggggaaaggttcctggaggaagttatatttgaacagagtcttaaattataacaagaatcccgaagggctttgtgtgctacgggaagtgtacacattgaatgattttaagcagttagactgatcacaactgcttttcgaaagttgctgttgtctgtgatgtgtgctctgtgatgtgtgctttgttaactttctgtctttgtgttttattattattttttttactccatcaagaagtgtcctctcctcataccttaatattaactgtttatctttcagtttctagtgcaggtcccatttcttgtgtgaagcattctccaattattttagcttccctacttatttcattctctgaaaccatattagaaatagtaatagtaccacactttagtccttatttgttttatgtccttaagtagattttaagtatagagaatgcttcttatgtgtgaatagaaagcatgttaaaaaaattttgttgcttgatctctttgtattttgtttttcagggtagtaacagattatgggcaacagtccttttaattaatctaccgtcatcatggctaatgaggactgtcccaaggctgctgatagtcctttttcatcagataaacatgcccaactcatcttggcccaaatcaataagatgagaaatggacagcatttctgtgatgtgcagctgcaagttggacaggaaagttttaaagct

SEQ ID NO: 1412 - DNA, 2300 bp, Homo sapien
cccaggaagtcaaggctgcagtgagccccgccccaatcacaccactgcacttcagcctgggtgacagggagagagaccctgtcaaaaacaaaacaacaaccaacaacaacaacaaaaaccaccaaaaaaccaaactagtctttgagtcatggcagtttgtttcaatagctattgggtaaaactggtttcaggttacaacaggcagtttcagcagacagggttgcagagaattacattctttgagcaatgaaatgtgccctcagtgtttcccctcccaccattttcggtgggtatgagaagaatggcccaatctgtatgcttaactttcacaagtgtaatccagagtaagtcatgaaattgattttagtagtgctgaagtataattttctgaagagtaaaaccatgactctcttacaaatataaaaaaaaagtatcaaatattttatttatctcattaacttataagggagccagtaagatatttaggaatgtagcatgaatttgctaagaatcaggaatgtttaaatgaatttgctgagaagggtaaaaatggcttaatatgctacaggtcaataaaacaatgttttggtgtatcttttctacagacgggcaagaattattttaagtactaccagttttctggtgaaatactttagtcaatagaaagtcagagctccctatggatgcaaatccgtccagccttacactgaaagggcacacagaattctcttttcctcatttccaagtctttgacaatgtttgctgacaataggtccctgttagcagtttttggtaatgaagtagaaaagaagaaataaaaatttagtgcactgcgggtcgtaagtgtaaacatagttttgtgaagattttgtttcaggccaggcacagtggctcacacctcccagcactttgggaggccgaggcgggcggatcactcgagcccaggagttggagaccagcctggtcaacatggcgaaatcttgtctctactaaaaatacaaaaaattagcctggcggtggtggcacaggcctgtagtcccagctactcaggaggctgaggtgggaggactaccagagcccaggaagtcgaggctgcagtgagccgagatggcaccactgcactccagcctgggcgacaaagccaggccctgtctcataaaaagagaaagaaatacactttgggaggccgagtcgggcggatcacctgaggtggggagtttgagaccagcctgaccaacatggagaaactcagtctgtactaaaaatacaaaattagccgggcatggtggcgcatgcctgcaatcccagctacttgagaggctgaggcaggagaatcgcttgaacccaggaggcggaggttgcggtgagccgagatccggccattgcattcattctagcctgggcaacaagagcgaaattccgtctcaaaaaataaaaaataaaaataaaaataaagaaatgagattttatgttagatatatacttctatatatatactcacaagtatgtggtattgagtttgatgtaaaatatttttgttcaccgtaggctgggatcaaaacagtttgaaagccactaatgtgacacatgagggtcaacagtgaaaaaaactggacttttgagttcttccttccccaaaataagtatcccttcagtgccaggctcagtcatgcactcagaaaacgattcgagagaacagtagagaaggaccgtgccaggtgttcggctcgtctctgcttaactgagatccgcggccttcttgggacaccacaagaatcagagtgcaagcggaatggaaagggcgagccagccggccccagcaggcagaagcagaggcttgcagctaagctgttgatccttggggaagcaagcccaagccctgggccccatcagtgggcactgagaggcgccagcggcccagtctcccgcgagcggaagaacctcgcgcacgcgcagtgaaaacccagggcccgcgaagcgtccgaagtcccttcccaccgcccggcttcgcctccagttctcggggaactgtacggcccagtcactcccgcctcgtcacccccgccaggtttcccccgccctctccggccggggctggtcgcgactgcgcgcgcagggcctgagcgggcgccggagggaaggggaagcggcgggtaaggagggcctgcgttcgggcgcgtctgtgacggggttgggaacttcctcttctactccctccggctttccggacccctgaggactggagtgagagaagcctctagaactgtgtatttccttgtctttccttctgccgccgcagg

SEQ ID NO: 1413 - DNA, 2300 bp, Homo sapien
tttttttgagatggaatctcgctctgtcgcccaggctggagttcagtggtgcgatcttggctcactgccagctccgcctcccgggttcacgccattctcctgcctcagcctcccgagtagctgggactacaggcgcccgccatcacgcccagctaattttttgtatttttagcagagacagggtttcaccgtgttggccaggatggtcttgatctcctgacctcgttatccacctgccttggcctcccaaagtgctgggattacaggagtgagccaccgtgcccggcctcatttaactgttttttttttttttttttttttttgagacggagtcttgctctgtcacccaggctggagtgcggtggcacgatcttggctcactgcaagctctgtctcccaggttcatgcagttctcagcctcctgagtagctgggactacaggcacccaccaccacgcctggctaatttttttgtatttttagtagagacggggtttcactgtgttagccaggatggtctcgatctcctgaattcatgatctgcccgccttggcctcccaaagtgctgggattataggcgtgagccactgcacccggtccatttaattgttttaagcaagcaagtaacatataggaagagtcttgtgagggctttttgaaggatgagtttaaagacaatgagactggcataagtgaacccgttgaaggctttctcagtcaagtaggtgagggaagatgaaacttgaggtggtgccaatgggacggaaagaggaggcagattggagaaatagtgaggttatagaggcaataagacttgttcatttattggatgtgaggaaaggacaaggaaggagtccaggatgatttccaggtttctggttgaggcaactggatgggtggtaaggaactgggacagggaatagaggagcaggctggtgacaggccgtagagcacattggttatgtgcatcctcccggcctcccagaaggaatccatcactttttccacttttataggtgtttccgcactgtctttctgtccggatctggcagacctgggtttgagtcctggctctggacttataagctgtgtgatgttgagcatattatgtaatttgagcctatttcctcaactgtaaaatggaaatacaacttacttcttgtttgtgtatgtctgaattgaatgcacagtgtgtggtatgcagtgggcactccatagtgttggctatttttattactcagaaaggggtcagggaagaggcccaggacaaatgggtgaaggctttaagcaaggcttctaggtcaaaagaggaaaaacacaacatgtggcagaccagctgaagccagagggaggccagagctgagctaccaccacatgttgctgagcagatgagtcactgcaggcagcaggtcaggctacccaggccacagcagactgggctgggctctacacgatgacttcattgtatgccttttttgtcctctcctcctcccagaaggaatccatcactttttccacttttataggcgtttccacactgtcttactgtccggaaagagcaaacacggtggaaagggacagaagagccagaattccgtctagtttgatcactgatttgctgggtgacctggtgcatttcacttcgcctcagtctctttatctgtaatatgagaatgcgcagatttgcctcctaagtgtgatgtgagaattaggtgagagttggcaggcactaaataaaaaagcatgcattagccttctattcattagttgtgttattctgtctccttcctgctcccggcccctctctccctagttctttgaggacaccgatcgactcgaactcatttttgggtccccagcactgagcttggcccagcagtttcatgaatggatgaatgaaagattcaatgggagtccgcagccgctgacggcgcgccgagagccccgctcgcttctggtcctccgactgcgcgccagggccacgggcgggtcctttgcgaccgttcgctggcgcgtgcgcgggaggcggcgcgcggccggaggtggcgggcgggctcccggtgcgcgcgcgtgaggggcggggccggccgaaggctggctgtaggcaggcggctgagccggcggcgggtggcctgcccaacgtgtgctgggtgggagaaggcgaggcgtcagcgatgctgtctcttccgtgaggagcgcagaggaggtcgcggcgccggaggccccagaaggctcgaaggcgccgcgggctggggtcggtggcttagggagcccgtccggccatggtggccgcgggtggtg

SEQ ID NO: 1414 - DNA, 2300 bp, Homo sapien
atggttgtattcttgtttatccacaaaggatttgaggtggggaaagatggggtatgttcaggaaactgtgccttgttctttccaattggaaggttaagttacaataaggtactactgaagataaaatctgttgtttccatgatatggcgtgtcttgaatgccaaggggagacgttttttacttaattttttagatagtgaggactgaagattttttttttttttttttaaccttgagtggctggagtgcagtggcacgatctcagctctgcaacctctgcctcttgggtttgaatgatttttctgcctcagcctcccaagtagttgggattacagctgcctgccatcatgcctggctaatttttgtatttttagtagaaacacggttttgccttgttggccaggctggtctcgaactcctgacctcagatgatccacttgcctcggcctcccaaagtgctgggtgagccactgcacctggccaggttgaagatttttaagctgtgtacaacgttttgggaaaggaaacctgtcttggtgaaaggttgataatcccataacgttagttttagtgaccaaatggcacttccacttgaagcctttttgtaggctttccactataatgaattgagccttctttgacactcccatagcactttgtcataccttttagcacacttctcatgtgtcataattacttgtttgtatttggcttccccattggattttagctcttctagaataggattattagtttatggttaatgttgattttggtaatctttcctcatccctatctcagtggttggcaaaataaatggttcttgaattagtaaatgaataaagagtttgaattttgaatcttttgtctgaatagcttctcagaatgcatcttttttatatttttactgattaccgggttgaataaattagaagccactcctacttcctctctgctgatacatatgttttagctagttaaacctattttgatagaggagttctatgactttaaaggcctatgactttgcagacactcatacagtgtacagcataccctatgcaaatcagctgtctgttcaggtcttgtgtttgttttccccatagacataatccagccgttagttattcaaagcagcagatgggagaaggaatccgtggaaatgtggatttattagctctcacaatgaaagaccacactggttatgctaaggattagaagatttctgctgaatgaaagggacatggatcctgttttttgtgctattttcagcagtgtggcaatttcttatgactataatcagttgtaaaaagaccagaaaatgatcttgtaaatagactttccttcaagccctagactgttggttgcagctgtcataattataggagggactgcttttcttcctttttgggtgcagactgaatctggcctttagctattgctatatttacaccttaggtagtataactggctgattgtgtgctttatacatacctttatctgtcaaattagggaatttggattcgtgtctcctgaattttgtaggagagtaattattgtagcatgtcttatagtttggaaaaaatgattgaatttaatgtgttaaactcacttcctaaaaatataatgctgccttcactaacaattttgtgtgtgtgacttgttagaaagatcagcaactttcctttgtgtttactaagattctgacaattaccataaagttggaaagtttaaacgttgcttatggagtgtgtaaggaacagaatcatatcatgagaacaatctttcactcttaaaatctaaaagattatgtattttgagccatgaattaagaaacagaagcatctttaaacttggctgaagttctactttaaaaatggcagccagtaaccaaagaaacaattcttgagatcattaaagcttggataaaatgagactttttcatgctgtgcccttttagaagtctgggggaatggggagcgtttcctgtgacagcactgtaagtgataaacagctgaatgaatttgtccatgctcagaactcacaacacgtggactagccccctcctgcacataaaagagcagggaaaccgaccttagcaatgatctagctcctgaagaaagaggctttcgttactgtccaagaagtgaagaccagtgagtctagcgataaagaaacaaaagagcccctgacagtatcgaaagaatctgacatttgctttgtctgtacaaaggatgaaaggaattttgccgacttagtcaaaacaataactggttttatatcattttgagtctaaaata

SEQ ID NO: 1415 - DNA, 2300 bp, Homo sapien
gattttagctcttctagaataggattattagtttatggttaatgttgattttggtaatctttcctcatccctatctcagtggttggcaaaataaatggttcttgaattagtaaatgaataaagagtttgaattttgaatcttttgtctgaatagcttctcagaatgcatcttttttatatttttactgattaccgggttgaataaattagaagccactcctacttcctctctgctgatacatatgttttagctagttaaacctattttgatagaggagttctatgactttaaaggcctatgactttgcagacactcatacagtgtacagcataccctatgcaaatcagctgtctgttcaggtcttgtgtttgttttccccatagacataatccagccgttagttattcaaagcagcagatgggagaaggaatccgtggaaatgtggatttattagctctcacaatgaaagaccacactggttatgctaaggattagaagatttctgctgaatgaaagggacatggatcctgttttttgtgctattttcagcagtgtggcaatttcttatgactataatcagttgtaaaaagaccagaaaatgatcttgtaaatagactttccttcaagccctagactgttggttgcagctgtcataattataggagggactgcttttcttcctttttgggtgcagactgaatctggcctttagctattgctatatttacaccttaggtagtataactggctgattgtgtgctttatacatacctttatctgtcaaattagggaatttggattcgtgtctcctgaattttgtaggagagtaattattgtagcatgtcttatagtttggaaaaaatgattgaatttaatgtgttaaactcacttcctaaaaatataatgctgccttcactaacaattttgtgtgtgtgacttgttagaaagatcagcaactttcctttgtgtttactaagattctgacaattaccataaagttggaaagtttaaacgttgcttatggagtgtgtaaggaacagaatcatatcatgagaacaatctttcactcttaaaatctaaaagattatgtattttgagccatgaattaagaaacagaagcatctttaaacttggctgaagttctactttaaaaatggcagccagtaaccaaagaaacaattcttgagatcattaaagcttggataaaatgagactttttcatgctgtgcccttttagaagtctgggggaatggggagcgtttcctgtgacagcactgtaagtgataaacagctgaatgaatttgtccatgctcagaactcacaacacgtggactagccccctcctgcacataaaagagcagggaaaccgaccttagcaatgatctagctcctgaagaaagaggctttcgttactgtccaagaagtgaagaccagtgagtctagcgataaagaaacaaaagagcccctgacagtatcgaaagaatctgacatttgctttgtctgtacaaaggatgaaaggaattttgccgacttagtcaaaacaataactggttttatatcattttgagtctaaaatacaggcatcagaatcgtatgtttttctttgtatttctgaagaattgtcatctttttaaaaacgtatgtggagtggttttgtttctggaaaggaaaacgtgacatggattttataagcttagtagctgtaggtggagactcttgttttgtttgctaaacctttttaataagcagcaaagtcaggatatcaaagattggaatttttcccccggaaccttttgttcttttcttagtacttcaaataatttcaaccaaaggggtatgcatggaaaatgaaaacaaatatgaagtctttccgctatttggcagtgcttcagatgagatgtatctatacttctgtgaagaaagacgtgattctgatatgaggcagtgattgtatacttacgctggacagagggataactggtttagtggaacagtgggttagtggtgtgctgaaaggattgtttgcctctttatccagcagtaagtaggcactagtagttgactgtctggggagtggcttttttttgtctgatatctattatggatgattccagtattctgagaaggagagggttacaggtgagtaaaagaaaacctttttcactgatctccttccttttaatgtctcttgtaaatgtactgaacagattgttataatgtatttaattcatttgaggtaggaggcagagtggagtgcagctaagttcctctttattctttgatgtatagttataattag

SEQ ID NO: 1416 - DNA, 2300 bp, Homo sapien
tcagaaatttctactgaaaggtaaagcgcagtgatttatagcattggaaacttgagttagactgctccagtttaccaacttggctgaagacacttctggctagtataattcatatataggtaaccaggtgccaacatattgaggaaatgctacttttctacttaccattggcatgatcttaacttctctgtgtctttaaaaaataataataattttaaaaataataataatggaataatagtacatatatcatatggctatgatgagtactacatgaatattaatgtgtaaaatgcttagaatagaacctaatagttaagcacttaataaatgttggttgctgttatgtcattattattattgttatattattattattattattattattattattattattattattattatgtagcctggtctcgggtattagagaattggagaatattgagtagaaacttaggattcagccataactgcaagccttagctggggatgggaggatagacccaaggttggggcttttggcaactgaccctgatatcatcacaaggctttccaaagtaggagccagtacttgttgagaactgttagatttctaaggtgttctagttatctttaggacctgctactgaactggggattctgaaaaaaagagggtgctgagagggctgaataattggactaatacatggagaggaaaagtgagggcttgtggctactaggtgggtgagtttgcttgggtaattagaacagtggctttcaaactttttagactttgacttcaataacaaataaagtttacattatgacccatcacacacgttcgcatttgtatatttgtatgtatttcagtaatggatgtcataaacacacatttcacaaaacagtgcttacccttgctgtgtgcgaaggactaatattttcttttctattctatttcatttgtatatgtactttttgtgtgcaggtagtttccctttttagaaaatgttgatcctgacttcctaaattgatataatgtcttactaaagaggtgtgacccacatttgaaaaagcactggtttgcctatgagttagtcctttgaacattaccctagaaaaaacagtttgatacgctttgtcatctaggtgaatgagagaagcccctcagagttggcagagccgctgaagcaggggacaagacttgcttctctttggctctcttagctgccagggtttagctccacagtttacttgatcacttggttttcttgagtctaggttctttttctcagatgtcttcctatttgttgggactaatctcttcctttagactgggagattgctccaagagggcaagacttacagtaatagctaacacttttatagtgctttctctgtgctaggcactttgctgtttacatgtattagtcctcaccacaacctatatattaggtaccttaatgatcttcattttacaggtggggaaaccaaagcatacagaagtatgcttagcttacccttcaatagaggtcttctgcaacttaccttaaacattaatggatgaaattaagctagtttctgggcttattttcttaactttccttatggcttttcttaccacaagaatgattagagagtaatagaaattgaacaaaaaatggcactgaactttgtctgaaggagtacagtttagttaagttggtcagattcggcatttgaataatgactgtgctttgagccctaacattaaagccctgtagtcttccttcaggcttgggtttgagaatgaataatgctgcagaaacgcccacatagtcttcgctcattattttaccagtttcttccagtcccttgcccactgcaacagctgtttagcctggcccatgccttctgggttaatagtatttctgacacagtgtgagttttcaagttgctatgtataatttctgccagagtttttactgccgccaggcctcagggttggaggttgcaactgatttgtgggggagggagtttggtgcttgtcactgacgcaggaacaaggtgctttctgtagctctgatttgttgctggctgagtgtgaatgatgtcaggcagatcagaggacagctgattcatttgggatctggaacttgtcactgtcccactgctgcctcgtgggctcttaggtcttttgtggggggatgggaggggtgttctgaagatcatgtttttgaagaaaagtactttaatttttgccgtaagtttgggaagcttttataatttcctttggctgacagaactgcataccccttgtgtgagagaacttccta

SEQ ID NO: 1417 - DNA, 2300 bp, Homo sapien
gttagtagtggccattgataattatcacctagattcattattttcttaggagtttgcaaaagatgattctccttccctttattaactacagtacttacacaaaagaattttctcctcattatctgtttttttttaccctgaagtacagataattacccttattcgcattgactcagcttagactctttcctgagtcttcagcctaaagcctgagtgtcctcagttccttggtcagtgtttcatacctgcttattactgcttcgttgtgaagattgtttgcccagagcagcagggggggagttgttggtggtgaagccccttggagtttgccatttacatagctaactgattgctcagctgaggaaaaccttggcttcctcttctggcccacgtagaaagaggaattatctgtagtagtcatgcttgttatgtagactctgggactctgagaggtgagaatgcatctagaaggcagcagcttttctttcatgtccctagatgccacaagaggaggagccattgctgatcctgatggcctcattttggtagataggatgggcttagggctagagagtcctgctgttaagaaactagcatactggagtagtcagagaaacgattaatttacaataatagatccttgacacagaagaattaattttcatggctttgtttgttaatatatacatatgtgtgtgtaaatagatggatttttttttttggagggctatcttcaggataaattactagaactgggatagctgagtcaaaaattaaatgtatatgtagttttattagatattgtccagtttcccttcacagtctatggttatactattttacatttccatcagcagtttaagataatgtctatttgcacacagccttgccaacaatatgattgtcaagcttttgaatttttgctaatctgagagctaaaaaatggtatctcaatgtagccaagtaaaaagtcatattaaaatattcctaaaggatgaagtttgttttgaggggggatggaatttctctgtcgcccaggctggagtgcgcgatctcagctcactgcatcctccgcctccaggtttaagcaattctctgcctcagtctccccagtagctgagattacaggcacccaccaccacgcctggctaattttttttgtatttttagtagagacggggtttcaccatcttggccaggctgatcttgaactcctgacctcatgatctacccgccttggcctcccaaagtgctgggattacagatgtgagccaccgcgcctggcctgttttttgttttttttgttttgttttgttttgttttgttttgttttgtttatcttatgtgaagggaatcagtttcctgtcctgggaaattgagatagatgcattcattcattcattcattcatacattcaactgcatactaggccctctgagcaggagaagatgcccacataggcaatagaacacttcgcagcacggggtagagtaaaagggatgctttttatttcataagctttcagccttattcacccctattcagtcattcccagaacttttcaagtgatttctctggatgttagcagaaatatttttttaatgtcaaaattccaagaatagttcaaagagcttttcaccccccaaaccaggggtcagcaaaataaaccccatgaaccaaatgtgacctgtgggctgtgtttatacaagccacaagctaataatgaagtttacattttttaagggatatttacaaaaaacaaggaatatgtgacagagaccacatgtgacctgcaaagcctaaaatacttattatctggcctttacagaaaaagtttgacagcccttgtcctaacccatactgaattagctcctgatatgttatctcatcagccctgaacactttagtgtatacttcctacagagacattttcataacagtacagccattaaaatcagaaaattaacattaataaatattaccatctaatctacaagtttaattcatatttcaccaaatgtcccagtaatatcctttgtaacagaaggctccgatccaggatcatgtgttagaattttactgttattcgtcttctatctcctttaatctgatgcagttttgtagttatttcctcaacttttataacctcaatacttttgaagattacagaccagtttatttgataggatgtcctttaatttgaatttgtctgttatttcctcaggattagaatcaggttatgaacctttggcagaaatatcacaaaaaggtggtattgtgttctgttttttttttttttt

SEQ ID NO: 1418 - DNA, 2300 bp, Homo sapien
gggcgcctgtagtcccagcgtctcaggaggctgaggcaggagaatcgcttgaacccaggaggcggagattgccatgagccgagatcacaccactgcactccagcctgggtgacagagcaagactatctcaaaaaaaaaaaaaaaaaaaaaatcccctttcccataactcttcactcaaacaagtgatttttttagaaccaaggtaagtctcatctgcaaattttaagacttaactcattgctccagcttattaggattctttaaaataccagttttgcccactgtagtttacattgcctcactagtttcatgttagctatagctggtaagaatattttttgcaactttgatccaaatcatttattaaaatggggccaagaaataaccctgtggagacatctcactcgctgtttataacttcatgtattatagcattctatgagagaaaatgtgcactgttagcaaaaaagaaatgctgatttctcacttgtttattgagcctgtgacaacagagttatctcagtgtggtgctttagctttgattcttaaatggatttagatatttaaaccttggctctgggagcagtagctcaggcctataatctcagcactttgagaggtcaaagcaggagttccaaaagaccagcctggacaacacagcaagaccctgtcacttaaaaaaaaaatagctggacatggtggcatgcacctgcagtttcagctgcttgggaggctgaggcatgaggatcacttgagcccagaagtttgaggcagcagtgagctatgataacgccactgcactccagccaggacaacagaacagaatcctgtctctaaaaaaacaaacaggctgggcgcggtggctcacgcctgtaatcccagcactttgggaggccaaggcgggcagatcacctgaggtcgggagttccagaccagcctgaccaacgtggaaaaaccccatctttattaaaaatacaaaattacccgggcatggtggcacatgcctgtaatctcaactactcaggaggctgaggcaggagagtcacttgaacctgggaggcggaggttgcagtgagccaagatcgtgccattgcactccagcctgggcaacaagagcgaaactctgtctcaaaaaaaaaaaaaaaaccccagatcattgattagtttggtaaatagaacttgggctggccctgacttgcctgttctctttgtcagtcttgtcaggtaatggaggggggagttccctgatcctgggactgaatgggtgcttcagcattagctgcgcctgtagaagtcctgtgatagccgagcaccctccctcagatggcctgttgagattggcagtgctgttgtgaggaatcctcagtcactgagccatgtttagaattcatgagtgttttcaggtcaagcctaatcttcaggtccagatgtaaaagtaattttcttccctgctggattttcttgcctgctggacatcaggccatagttggtctgcaggctgtagtttgctaacccctggcacaatacattggccagcttgagtgagtctgggcacagccttcacagccccagcaaaggcacttctcctccagatagcagccaaaaggaaacattgctgagctgcccccagggtggctctctcaagattgtggaagggcgaacttaagaggatgttatttgcagctgggtacacctaaaacatgtcccaagtgaggaagcatgatttattaactacttttgcagctctaaaattccatgaaggtctgggcccaactccctgcacaacccttgaaggactccagtatattgaattcctcagggctgagggctctgaagggctggagaaaaacaggatcaagcacaggcaaggctaagggagtaggggaaagaagacctgctttgggtttatagtgactgggaagttccctgaccattttcagtccttccccattcttggactgctctgggacatgtctttaatgccacttcttaatgttttcccctctagtcatcatgctcctcacaggaaaagctgcatcagttgcctttccagcctacagctgatgagctgcactttttgacgaagcatttcagcacagagagcgtaccagatgaggaaggacggcagtccccagccatgcggcctcgctcccggagcctcaggtgagggtgctctctgcccactgttccagtgcatgtggatttcagcttgtttgcataacacagaggtgggcacactatgctataaggggccaagatagtaaatatttttaggctttataggccatatatctctgtca

SEQ ID NO: 1419 - DNA, 2300 bp, Homo sapien
gttttaatagtaatataaagccacatattgagtgacaagggaataatgtagacagtcattaccataagggttcagagtatagcaaaacgttgtgtgttggaaaagcttatagctgtcatctgttgcgtgcttaccaagataatgtcagggaatgtttttgtcctttacatgtattgtcacatttaattaacagaaaaacccagtgaagtaagtactgttgtaggtacccatttgtattagtccattttcatgctgctgataaagacatacctgagactggggtagtttacagaaagaagagatttaattggacttacagttccacgtgactagggaagcctcacaatcatggtggaagggaaggaagagcaaatcacgtcttacatggatggcagcaggcaaagagagaatgaggaagatgcaaaagcagaaatccctgataaaaccatcagatctcgtgaaacttactcactacaatgagaacagtagtggggaaaccgcctccatgattcagttgtttcaccttggtccctcccacagcatgtgggaattatgggagtacaattcaagaggagattcgggtggggacacagccaaaccatattattctgcccctggcccctcccaaatcctttatctttacatttcagaaccaatcatgcattcccaacagtcccccaaagtcttaactcatttcagcattaactcaaaagtccacagtccaaagtctcatctgagacaaggcaagtctcttctgcctataagcctgtaaaatcaaaagcaagctagttatttcctagatacagtgggggtacagacattgggtaaatacacctgttccaaatggaagaaattggccagaacaaaggggctacagggtccatgcaagtctgaaatccagcaggacagtcaaatcttaaagctccaaaatggtctcctttgactccatgtctcacatccaggacatgctgacgcaagagatgggttcccatggtctggggcagctccgcccctgtggctttgcagggtacagcctccctcctggctgctttcacagggtggccttgagtgtctgcggcttttccaggcacacggtgtaagctgtcaatgaatctacaattctggggtctggaggacagtggccttcttctcacagtgccactaggcggtgccccagtaggaactctgtgtggcggcttcgaccccgcatttcccttccacactgccccagcagaggttctccatgagagccccgcccctgcagcaaacttctgcctgggcatccaggtgtttccatacgtctgaaatctaggtggaggttcccaattcttgacttctgtgcacctgcaggctcaatgccacatggaagctgccaagacttggggcttgtaccatctgaatccatggcctgagccctatgttggcccctttcagccatggctggagtggctaggacgcagggcaccaagtctctaggctgcacacagctcagggaccctgggcccagctcacgaaactcctttttcctctaggcctccagggcttgatgggaggggctgccttgaagacctctgacatgccctgaagacatttcccccattgtcttggggattaacttttggctttttgttacttatgcaaatttctgcagccggcttgaatttctcctcagaaaatggaattttattttctattgcattgtcaggctgcaaatttttcaaacttttatgctgtttctcttttaaaactgaatgcttttaagagcacccacgtcacctcttgaatgctttgctgcttagaaatttcttccgccagatatcctaaatcatctccctcaagttcaaagttccacaaatctctagggcaggggcaaaatgctatcaatctctttgctaaaacgtaacaagagtcacctttgctccagttcacaacaagttcctcatctccatctgagaccacctcagcctggaccttattgtccatatgactatcagcattttgggcaaagccattcaacactaggaagttccaaactttcccacattttcctgtcttcttctgagccctccaaactgttccaacctctgcctgttacccagttttaaggtcacttccccattttcgggtatcttttcagcagtgccccattctactagtactaatttactaaattagtccgttttcatgctgctgataaggaaatacccaagacagggcaatttacaaaaggaagaggcttaattaggcttacagttccacgtggcttgggaagcctcacaatcatggtggaaggcaaggag

SEQ ID NO: 1420 - DNA, 2300 bp, Homo sapien
aggtagagggtgaaacgtggcaactcttccataggcgaatcaatatagcagacatgctcaaggtaggaggttttgctagggcttaaatcaggctgtcaactcaaacacaatgggctttgttactcctgtgtaaagaggaaatggagcagtttttggcctcctcagactgtattgtagggtatacaggatggcaattccaggcacaatcttcaggagacacaaatctgcttttagctattcagtgttccccagcaagttaattagctgtttctgaaatgcatggaaatattcagcattttcatagtgaagccaatctcccagatttaagctttgggggtgggaatgagtatgtgaggaagagggtctgtcagggaaacagaatagagcccttttggtgagagattccaacacctgtgacttatcttagaaattacacatgcactgtaattccaagactttttttttttttaattggtttgagcactcgagcaggagggcttgctgagacctctcactattttaggcgtggggagttacctctgggttcaaaagtctttgggtgggaagcacagaggaactgcgaaatgcctccctcagaaatgtccaattgctcaaggggagaagcagggagtggggtcaggtagcagccaggaaggttgcaggggccacgggcacatcctctccctgagtggtaaggtggcaagtgggtttggggaccattgctttgacaacttgtcaagggtgcggagagggctgtcccagcaaggtgaagaggtctgtaggaaaggagtctccccagagacctcctaaggaccagaagagcgcgcaccccgccaagtgacagaacgtgccccctctgtgtccgctcccttcccccgcggccaatcaccgggcagaggcgtctcacgccagcaggtcctccctggctcctctccttactcgtccgggcggaccaagcctcagcaggagccccgcctgtctccaggcagtttgagcccccgagcgctcgcccagcctgtcagtaaccgccgtttgcgttttcttcctttctttctttcttttttttcctcctcttttcttttccccttctgcctttgtcccgcttagtaactgggctctgaccaatcgccgccttaccggccggcgccggctgtctcctgattggcccgcttggggcgcgcagccgtctcccgctccttcgcaggagcaaggcagacaaaagacgcaggctccaggctccggcaaccggcctcagccaatcaccacccaccttgcctctcttccctcgccccactccctcctcgcctggctcgcgtgctcccggcactgactcctggagtgcggccagcgcccggatcgtaccattctgattgaggctgggggagagcgcggatggctgattggggagccgaagcctagagagcggtggggagacgtgaaagtcgagatggagagcagctttttgaacatgttctcaggcacttgacagaatcccggtacatcgaggcgggacggcgtggaaggggcggtggtgatgcctgctgtcccccctcccggcgcggttgggtggcgcctcagcgggtgggcagcatggggcggggagggtgtcccctccgcgccgttaaaatgaaactctagtggctggagtccgggcagagcttgagggcagttggtgcggtcgggttggttcttacaccccggcgggagcgcccagacaagccgagctgactggacttctccggccggccccattcccgaggctgcggcagcttcggttccgagaccgaccggagaggagcccgagtcccggcctctgggggattcgctctctgcagaccagtgggaccccgaaacttgaacgcaatctccagcccccttttttgccttcctttgtcacttgcccgggtttctcccaacgtgttcttttttttcctcttcattctccctccttcgaaggacacaaaagtggcttccgcggaaagatttggaggcggtgggagcttttctccccggagagcgactgtgtagaaaggatttttgggaagccgctttttaacacctctgctctccgtcccccaagcctctgtgtaatcctctgaggagaaaagcccatagcttgaaagttcgggggcattttgttgtgttctgtaggagagagggggaggaccctgttcgggtagtttggccggactggtactggccgttggaaaacccgaagtacatttccgtgtggaacttttgcagatatatatttttagatttttaaataccagataaaaaatatatgccttctatatatc

SEQ ID NO: 1421 - DNA, 2300 bp, Homo sapien
tgcatcacttattctctggagatatattcaaaggtctatttaagttggagagttgggtcatacaattttaggtggaaagactgaatcacagctttactccatgtgtcagccttgaccacttgattatatactgtgcttggacgtcacttcatctctcaaagccttagctgtgggaaaagcctgggtgattgctctgtgtattagaaactgaaaccccaccactaaatgctgaaaagtggtccaggcaaaaggtgctgtggaaatctgaaagccattatcttttccacacttcctctctcttcaccctcattttgtttgggaatgcacatgaacacccgtgaacaaaaataaaccaacccacccttgactgattgttctgtcttttgagttatcaaacttgagtgcttctggctcccagatatgctgaagtagagactgctgggaaggcagccacaaattagagttgatcttccagtatcttctacctgtaaggaatggttcaggaaattataattaatgagtcctgccccaaagttgaaatcatatttggatttcagaaataataagaaagcatataagaatcctggtgtcttttcttagctcaaccatgtccatccatactttctggcccttttaaaccagttactctatacccagtccatatacattttgactgtctgccctcaggaactgtctcaactcagggcatctttaaggaaggcagaaccaccttaggaggtagagggtgaaacgtggcaactcttccataggcgaatcaatatagcagacatgctcaaggtaggaggttttgctagggcttaaatcaggctgtcaactcaaacacaatgggctttgttactcctgtgtaaagaggaaatggagcagtttttggcctcctcagactgtattgtagggtatacaggatggcaattccaggcacaatcttcaggagacacaaatctgcttttagctattcagtgttccccagcaagttaattagctgtttctgaaatgcatggaaatattcagcattttcatagtgaagccaatctcccagatttaagctttgggggtgggaatgagtatgtgaggaagagggtctgtcagggaaacagaatagagcccttttggtgagagattccaacacctgtgacttatcttagaaattacacatgcactgtaattccaagactttttttttttttaattggtttgagcactcgagcaggagggcttgctgagacctctcactattttaggcgtggggagttacctctgggttcaaaagtctttgggtgggaagcacagaggaactgcgaaatgcctccctcagaaatgtccaattgctcaaggggagaagcagggagtggggtcaggtagcagccaggaaggttgcaggggccacgggcacatcctctccctgagtggtaaggtggcaagtgggtttggggaccattgctttgacaacttgtcaagggtgcggagagggctgtcccagcaaggtgaagaggtctgtaggaaaggagtctccccagagacctcctaaggaccagaagagcgcgcaccccgccaagtgacagaacgtgccccctctgtgtccgctcccttcccccgcggccaatcaccgggcagaggcgtctcacgccagcaggtcctccctggctcctctccttactcgtccgggcggaccaagcctcagcaggagccccgcctgtctccaggcagtttgagcccccgagcgctcgcccagcctgtcagtaaccgccgtttgcgttttcttcctttctttctttcttttttttcctcctcttttcttttccccttctgcctttgtcccgcttagtaactgggctctgaccaatcgccgccttaccggccggcgccggctgtctcctgattggcccgcttggggcgcgcagccgtctcccgctccttcgcaggagcaaggcagacaaaagacgcaggctccaggctccggcaaccggcctcagccaatcaccacccaccttgcctctcttccctcgccccactccctcctcgcctggctcgcgtgctcccggcactgactcctggagtgcggccagcgcccggatcgtaccattctgattgaggctgggggagagcgcggatggctgattggggagccgaagcctagagagcggtggggagacgtgaaagtcgagatggagagcagctttttgaacatgttctcaggcacttgacagaatcccggtacatcgaggcgggacggcgtggaaggggcggtggtgatgcctgctgtcccccctcccggcgcggtt

SEQ ID NO: 1422 - DNA, 2300 bp, Homo sapien
cccttcccaacttcatcctcctttctgtttgtggaggactctgtggcacccttagtaccaccctcacaaacctcatctttcccccatcccctcctccagcctctactcttgccatcctcagtcttaaaatatgaccttgcttccaccaacttctagcaactgtaactataaaccgacctgcccctgctcctcctcttcctcaggtcagaccaaggcctcttcccttgctctttatggaagccagccttgtctgcctctttagagattccatcagtgtagacagtctgcttggtggttaagatgtagactctggtgccagactaactgggattgaatcctggctctgccacttacaggctttgtgatcatggcaagtacctgaccctttggtgcttctatttccccatatttaaaaatggagatcagaaagtctatctcatgggatggttgtgaagaggaaaaaaagccttaatatatgcaagacatttaaaataagatcagtattattagtgtagtctgtaatactattagcccctctctcttctgtctcttcagctgcctcctttcactataaaaacaaaacaaacttagaaatccacttcctcagctaggcacagtggctgatgcctgtaatcccatcactttgggaggctgaggcagaggattacttgagcccagttcaagaccagcctggatagcatagcaagacctcatctgtttaaaaaaaaaaaatttgcttgagtgccggcaaatacctgtggtcccagctacttgggaggctgaggatcatttgagctcaggaggtcaaggctgcagtgagctgtgatgttgccactacactccaacctgggcaacagagcaagaccctgtctcagaaaaaaaaaaaaaaaaatcaacttcctccatctcatagccccactgcctgtgactctctcgactttgaccttcttgctctgtgctcattccctactgtcccttccttctagagcaggaagaaaatctcatttgaaaagcccagaactattctgttacacagaagaccaggaaagagaagtttaaaaccaagtctaagaaaagtccccagggtcacacagttcataagcgacagagccaggattccagcacctggtctgaatgacccagaagccaggacttttcccccgcacctctacatcaggcgtgctggagcaggaagcggtcaggcagccccactaggagtaacaaagatgggatcacagagccttggaactgggggtggctccttcatgagaccatggtgccacctactggcagaaagagaaggggtgtacacagagcgctaagagaagactgggaaggagaaaaagaaaaagatggggaaggagaggagatggaaagatgaagggaggggaaaaatggggaatgtgaggtttcatggagggaagaggattaggaactatttgctactcgcaggagagagcggaagctgccaaatctcagtcatttccttgaaagtgagtgagagacagagaaagagaaagagggagtgtgtgtgtgtgtgtgtgtgtgtttgtgtgtgtgtgtgagtgaaagagatacttaagtacgtacatcagatattattctgttgtttgttagttgctgggagtcagtccacaaagaatttagtgtgcgtgtgtgcgcacggacgcacacacacacatgcattcaggaacactagcacatgtttatgtatgtaactgggtgcttgctgtatgaacatatggatggcagcatgagcagatgcatgtgcatgtgagcatgagcacagagggtatgtatgagtgtatcagcagatgcagggtaagaagcacattacactgttgtggtggagggcacgcagacattctgggaagccacttgccccacccctgggctgcttcttcttgagatcaggaggggcgttgcccagggctggtgttgccaggtggaggcctgctgaggcagtggttgtggggatcggtctccaggcagcagggggcagcagggtcaaggagaggctaactggccacgggtggggccagcaggcgggcagaaggaggctttaaagcgcctaccctgcctgcaggtgagcagtggtgtgtgagagccaggcgtccctctgcctgcccactcagtggcaacacccgggagctgttttgtcctttgtggagcctcagcagttccctctttcagaactcactgccaagagccctgaacaggtaatgggatagggatacagattatcctgtgaagtgatatcgatctggaaacaggtctggggagctggaggggctctagtg

SEQ ID NO: 1423 - DNA, 2300 bp, Homo sapien
ctgcctcctgccaggtcctgtcttcggggagaaacattctaaatcacctgccctctcttcctggggggacccagtcctgctgaagacagatgtgccattgagctcagcagaaggtggagttagtggagcatggatggggcagggcctgggctgggggtgggcatttagatctctctgtggagctttattcctttgattgtgtgcctggggctcttcaaaccttgctggccccatgcctccatgacaaccgcatccttccctcagaggcagagtgccactgggcagacacagagctgaaccgtcgccgccggcgcttctgcagcaaagttgagggctatggaagtgtatgcagctgcaaggaccccacacccatcgagttcagccctgacccagtgagtggggccttaagacagtgaggtttggactccttcccagctcagcaggggggccccaggaatgatctaggttgggctttccctacctgagcctgggagagaaccaggggcaggatttacactgcgctctgaaagacagggctggggtgaaggggcaggccatgtgagtaaagctcagcgctagagttgggctgagtgtgtggagagcccagaacagggaagatcctctatcccttccctgtctactccagtctgcacctaccctcacctgagaagtcttccctaggtggggatcccagtttgaagggggaataaggcaagagctaaacgctatttctcccacagctcccagacaacaaggtcctcaatgtgcctgtggctgtcattgcagggaaccgacccaattacctgtacaggtaagcctgggaatgggctatacccagcactgaacaggagggtgcttaggtcatctacctccaggaggaactcttgaggtgggcagaaaggcaatagattctagacgcattcacctctgtgggtaagcatagggactctgggcccagctgtaaacacaggggaacctgagttgaggggtgatgaagtgaccctaacctatccctgggctccccaggatgctgcgctctctgctttcagcccagggggtgtctcctcagatgataacagttttcattgacggctactatgaggtgagcaggacttggggggtgcctcgggtggagtacaacatggagcagcagtgattgccagggacgggcaagggagaccgcccaggcaagggctgtgaaatgtgaaggccttggattgcagaggtgggcagagggaaagtgacctcacatggtgagcagtggccatgtcccccaggaacccatggatgtggtggcactgtttggtctgaggggcatccagcatactcccatcagcatcaagaatgcccgcgtgtctcaggtactgcataggcaagtggggatggggcagacacctggctctgccttctaccctaaagctcatgtgccctattcccaccccactcccagcactacaaggccagcctcactgccactttcaacctgtttccggtgagtactaaggatacaactcttgggcctgggaggggggaaacatgggcataaggtctgggcctgttacgtggcaagctcttcccctcactgggcctcatccttcacatctggaaaatgggggtaatgctgcctgcaagaagagggttgggggcaaaggagatcacaggatggagagacccctttgggaccatgatgtcccattccccttctaggaggccaagtttgctgtggttctggaagaggacctggacattgctgtggattttttcaggtgaggggagtctctaggtttcagttgaggtccctcagtctgcagggaaagagtcagtgaggtgtcctagagagctttctggaggacatgagctcacaagtgggggcgaagcctgggcaaaggtaggatggcaggtgttggggctgctgttgaaggtacagtggatgaatggagacagtggggatttgggggaaggaggtactccaggaaggaggtgctcctgagacccagctccagcaattctagcatctctgtgtgactagatttatccttgtccctccctgaactctttgaccctgcctctctcagtttcctgagccaatccatccacctactggaggaggatgacagcctgtactgcatctctgcctggaatgaccaggtaggctggaatgaccagggtttagcaggcgagtttatgaggcctcagctaatacctcccactatggcaccctgtccccaggggtatgaacacacggctgaggacccagcactactgtaccgtgtggagaccatgcctgggctgggctgggt

SEQ ID NO: 1424 - DNA, 2300 bp, Homo sapien
tttgacacgtactcacctcatgaggatgaggccatggtgctattcctcaacatggtagcgcccggccgagtgctcatctgcactgtcaaggtcagttattctgtcctgaccctgacccctactccctagctccaaccctgcttctagccccggcttctctgcccctcatataacatagtgggaagattctctgaaggaaggttactcaggttccaatctcagccttaacatttgtattaattcagcaaatagttattgagcaacagctgtatgccaggtacttctctgggtgctgaagatacaatgggaaacaagacagagtccccaccctcatggagcttatattccagcagtgggaggtcaacagaaacagccaagtaaatgtggataatgctagtaaatgataacttgtataaagaagaaaataaagcaggggataatgaatgatagaggggaggggacattttagaaagagaaggcccctgcaaggagatgatatgtgagcagaaagctgaggaattgaggagtgagccaggtgagtatctggaggaagagcattccaggtggaaagaatggcaagtgcaaagcccctatagtgggaaggtacacggcatatttgaggaacagcaaagatgctagtcgaggtggagcagaataagggaggagagtaggagagtggttggaaaagaaggcagagagtggcgggagagagaggtgcagatcgtgtgggtttgtggaaaggacttattagctggatgaccttagaatctctaagccttcagttattattttatctgtgaaagagagtaaccatagagggttattgcaataatgtaatgagctattttaagtaaaaggttgctacatagttcgtgctctgtgaggccaggtctcctggaaccatgccagtcaggctaactgccttctctggtcccccaggatgagggctccttccacctcaaggacacagccaaggctctgctgaggagcctgggcagccaggctggccctgccctgggctggagggacacatgggccttcgtgggacgaaaaggaggtgccggcatcagaggccatccactctgtagtatcaagagcctgggaggagcagaaccctaggagatggggtggggtggggaacaaataggagccagtggcagtgggttggatgaaagtaggcagggagatgggaaaaagcccccaaactggtgtctgggcccccatggccctcattcctgcctcctgccaggtcctgtcttcggggagaaacattctaaatcacctgccctctcttcctggggggacccagtcctgctgaagacagatgtgccattgagctcagcagaaggtggagttagtggagcatggatggggcagggcctgggctgggggtgggcatttagatctctctgtggagctttattcctttgattgtgtgcctggggctcttcaaaccttgctggccccatgcctccatgacaaccgcatccttccctcagaggcagagtgccactgggcagacacagagctgaaccgtcgccgccggcgcttctgcagcaaagttgagggctatggaagtgtatgcagctgcaaggaccccacacccatcgagttcagccctgacccagtgagtggggccttaagacagtgaggtttggactccttcccagctcagcaggggggccccaggaatgatctaggttgggctttccctacctgagcctgggagagaaccaggggcaggatttacactgcgctctgaaagacagggctggggtgaaggggcaggccatgtgagtaaagctcagcgctagagttgggctgagtgtgtggagagcccagaacagggaagatcctctatcccttccctgtctactccagtctgcacctaccctcacctgagaagtcttccctaggtggggatcccagtttgaagggggaataaggcaagagctaaacgctatttctcccacagctcccagacaacaaggtcctcaatgtgcctgtggctgtcattgcagggaaccgacccaattacctgtacaggtaagcctgggaatgggctatacccagcactgaacaggagggtgcttaggtcatctacctccaggaggaactcttgaggtgggcagaaaggcaatagattctagacgcattcacctctgtgggtaagcatagggactctgggcccagctgtaaacacaggggaacctgagttgaggggtgatgaagtgaccctaacctatccctgggctccccaggatgctgcgctctctgctttcagcccagggggtgtctcc

SEQ ID NO: 1425 - DNA, 2300 bp, Homo sapien
tgggaggtcctccctcatctccccagaaggcatcagactttgggaggagcatcttaccccatgtggccctctggtcccttcagattcctgaagtcatgggctggccaggacattggtgacccgccaatccggtatggacgactggaagcccagccccctcatcaagccctttggggctcggaagaagcggagctggtaccttacctggaagtataaactgacaaaccagcgggccctgcggagattctgtcaggtatagagatgtcccaaaccctccccaccgagcgctccctcccagcttcctccccacctaaatcaggcactgggacccctgttggccagccccagtgggaaaggggcagcaggttcctagaggggagacctctatgtgtcatgtccctataggtaatgatttgaacccaaagttctggaatcggaacccaagtacaacttctaagcttctgacggaagcctgaagtctgatcaggctggctttgcagagaggcacacccctgtgaggcagttagggccaggacccaggtctgatcccccgcttgggtccctgggcctggctccatctctagaaaccaacaatggaggggaccaaggaaatcaaggtctcaaatagaagaatacaggagcactgggtagggagggccctaatggagggggaagtgtcaggggaggttccctggggaaagtggctgtgaaactaggccctggtcaggggagtagagctaggcagacagaggaagggacaggacccagtttctctggatgtcttcactgcagccagggccctcctttcagaaagaccctctaggatctgaaggaggtgctcctcttaatcatccctacccctcccctcagacaggggccgtgcttttcctgctggtgactgtcattgtcaatatcaagttgatcctggacactcggcgagccatcagtgaagccaatgaagacccagagccagagcaagactatggtagggctaggctaaggatggggtagggggccttggatctcacagctggagtggcaggcagaccctaagcggtgagactctgctgaggagactatctccatgacctgttgtaccccacagatgaggccctaggccgcctggagcccccacggcgcagaggcagtggtccccggcgggtcctggacgtagaggtgtattcaagtcgcagcaaagtatatgtggcagtggatggcaccacggtcagtgggccagggtctggtgtacagtcactctattctgctcagggcatggtccactggcagcagggtctactgcctaagtgggaactgcaactctgccagtttctagctgtgtgactttggagtcctcgattccttatctatagactgggactaatgatttctacttgtcaggattcaatgaaaagtttgtgaagtgtcttgtatgtagtgggatctcaaaagtaatcattcataatagtaggcagtcaattcattgatttattttataaccatcccctggtcctttctttggcctcagccttgtgctgggcactggggacctgaaagtaatcagacctggccctaccttgaggggttcagtgtggtggaggattgtgatacttccaggatgaagcagagacagcagaggctctaagagccatgaaagtcatggaggggagggttgtagaaagacgtgatctcttctgatgggagtgctatagaggctttctggaagaggtggccttcgagctgagttggaaaagaactgtgtgaacagaaacataggcaggaggtgatgtttcaagcagctggtgttttaagtacccctaagacagagacaccttgaatgccagagtgaaaagctggactttgtctctgccactgtgtaggtgctggaggatgaggcccgggagcagggccggggcatccatgtcattgtcctcaaccaggccacggtgagtttctaggggtgggtgacccagagggctggagctgggctcttgctgatgacaccaactcaccagaagtatatcccctgccagggccacgtgatggcaaaacgtgtgtttgacacgtactcacctcatgaggatgaggccatggtgctattcctcaacatggtagcgcccggccgagtgctcatctgcactgtcaaggtcagttattctgtcctgaccctgacccctactccctagctccaaccctgcttctagccccggcttctctgcccctcatataacatagtgggaagattctctgaaggaaggttactcaggttccaatctcagccttaacatttgtattaattcagc

SEQ ID NO: 1426 - DNA, 2300 bp, Homo sapien
gaatacaatggtgagcaagacatacctggactggtcactggagacagacaaggagtcaagggtgactcccagctgtttggcctggtgcagttcactgaggaggggaacccacaggaaatctaggagtgaaaggaaatgattccagaagttgtgctgttgcgttagaggggcctgtgaagatgtcctgctggacatcaggcagcctggagctcaggaaagaggttagaactgccaatgtcagtttgggcatctagattggtaacagaggtcatgagagaatgagatcatccatgaagagtcagtttgaggagaaaagagggtcaggaaggaaccctgagggacatcttttaattatttatttttatttttttattttttgagacggagtcttgctctgtcactcaggctggagtgcagtggtgcaatctcaactgcaacttctgtctcccaggttcaagcgattctcctgcttcagcctcctgagtagctacgattataggcgcctgtcaccacgcccagctaacttttgtatttttagtagagacggggtttcaccgcgttgggcaggctggtctcaaactcctgacctcaactgaccaccccacctcggcctcccaacctgctgggattacgtgagtcatggtgcccagccgggacatcttttcaaatgtaataaaatgtgttgggttttcttccattcttatacatacttactaggaaaaatcatgtatttctttaactcctaagacaagtactgttaacatttcattttgggggatattaccccaccattcaggaagcagatggaatacagaaagctcaaaaaaatctaactggtcttctggcttcctctgtctgcttccaacccattctccacaaaaaaagtaaaggttctcttaaaacagaaattggattatattgctcccctgcctaaaactgttctatggctatccacttcaaacaagcatcaacatcacctagaaacttctcaggaatgcaaaatcccaccctgccccagaccactgaatctaaaactctagggatggggcccagcacctctgttttaagaagtcatccaggtgattctgacgcaagctaaagtttgagaaccattgtgttaagctaactgctttctatgtatgatgttatttaaacctggcaattcttatgtattgttgccagcagagtgcagtggttaagagcagaatctggagctaggctgagtttcaattccacctctcctagctttgtgatattaggtcttatttctttatctgcgacagggatagtaatagcgcctatagccagcacggtggctcactgcccataatcccagcactttgggaggccaaggcgggcggatcacttgaggtcagaagttcaagaccagcctggccaacatggtgaaaccccgtctctactaaaaatataaaaattagctgggtgtggtggcgcacgaccgtagtcccagctactcaggaggctgaggcaggagaatcgcttgaacccagaaggcggaggttgcagcgagccgagatggtgccactgcactccagcctgggcgacagagcgagactccgtctcaattaaaaaaaaaacaataataatgataatagcgcctacctcatggggttgttgtggaattaaacatcatcagtaaggtgcttagaacagtgacagaacctggattttaatctcccttggcctccaatagctgtgcatgccccaggactaggtaacggccttgcccaggacgggtatggggcgggtggtgtgtgccctgtgtccaagggttgcagcccctctgaccctggcgtgccctgtgatctggtccaaggtgctaggcctctgactggagtcgggcttgccatcggcggtgctggggagcgggctgctctcgtgcaggcagccccaccagccagccgggctgcgaagctgcctagcacggtctgagcattcgccttactcgctggctgcttacaccccgacgccgctgccgccaccgccgccgccgccgccgccgccctaagcaccgcccgtcgccctctcaccccgcggcagcggcggcggcggcggcggcggaagcgggggggcgggccaggccggggcggggccgcaagcggcatggaggaggcggaggccgcggcgagccgggccgagcagtgagggccctagcggggcccgagcggggcccggggcccctaagccgtgagtgcctccgcgtgggtgtccggaacgggtagcgctgccggtgcaggtctcctgagccctcgggcggctccgggccctgggaggaggag

SEQ ID NO: 1427 - DNA, 2300 bp, Homo sapien
aggcatggtggctcatgcctgtaatcccagcactttgggaggctaaggtgggaggattgcttgaggccaggagttcgagaccagcctgggcaacatagcgagactctatctaaattttaaaaaaagttaattacaaaggtaaccttagatgaactaaaaagagtgatagaaatatgtagtgccaggccgggcgcagtggctcacacctgtaatcccagcactttgggaggctgaggcaggcagatcacgaggtcaagagttcgagaccagcctgaccaacatggtgaaacccccgtctctactaaaaatacaaaaattagtcgggcatggtggcacgtgcctgtaatcccagctactcaggaggctgaggcaggagaatcgcttgaacccaggagggcaggttgcagtgagtcaagatcgtgccactgcactccagcctgggcgacagagtgagactccatctcaaaaaaaaaaaaaaaaagaaaaaagaaagaaaagaaaagaaatatatattgccaatgggggaaaggaactacagagtgtgagttaaacccatatatccatatttatctgaataggacaataaacagcagatgaatgtttaaaattgagaagtagtgtggctgggcatggtggcatactcctgtagtcacagctgcttgggaggcaggaggattgcttgagcccaggagtttgagtccagcctgggcaatgtaggaagaccctgtctctaaaaaagaaaaaatagtggtaggatttacaataagaggatagttactcctaccctaccctttcacacctctaggcccactcccaattggcaaccacttttagttaactctaaacaataacgttatgggtatgaacaccaaaagaaaaaaaaaaactaaaagttattttttgccaattgggagtgggcctagaggtgtgaaagggtagggtaggggtaactatcttctcattgtaaatccttctgcaaccatgggctggaattacttgaattaaaagcctaaacaaaccagagttttcatggctgttcattacctgttaaataaaacccaaacatctcagaaccattttctgtaaccttgttactcaaagtgtggtcccttattacttgaagtgtggaccagcagcatggccatcacctgggagcttattagaaatgcaggatcttggctgggcgcagtggctcacacctgtaatcccagcactttgggaggccaaggcaggcggatcacttgaagtcaggagttcaagaccagcctggccaacatggtgaaaccctgtctctactaaaaatacaaaaatattagctgggcatggtggcgcatgcctgtaatcccagctactcaggaggcagaggcaggagaattgcttgaacccagggaggcagaggtttgtagtgagccaagatcgcgccaccacgctacatcctgggcgacagagcgagactctgtctcaaaaaaaaaaaaaaaaaaaaaaaaaaaatgcaggatctcaagccccaccccagatttacaaaatcagaacctacattttaacaagatccgcagataattcatacgcacagtcaagcttaaggagcatcttgcttgtaagcccaacgtggacctcttcagcttcagtactggttgcccttttctactccgttagcctgaattctagcccctggggggggggggtggtgtgtgtgtgtgtgtgtgtgtgtgtgtgtgtgtgtgtctagctaaaatccagtcatcgttttatacccaattcctctgctccaggaagacttccaagccctctgcagctctctgttaccgctgttccttaaactcccacatctctgactgaagctgcttagacttcattctgcaaacatgtattgggcgcctgctgtgtgcctggctggattcagtgccagggtggggcgaaggcgctgaggtctccgagtgctctttcaggtccaactccagaatcgcccagccccacgcaatccagggccagaggttgtgtgcgcagcactcgaatacatccacagacggtgctgcgcggcttttctgagtgttacggcgccctcctcccgcccccgcgccgcgcgggcggggacccaccggttttgctccgctttagcagcggcgaagggaggacccccgggagccggtccccggcgtccggtcgcccagcccttttcaggcttgggcccgcatggaggggaccgtggagtcccagacgcctgacctgcgggatgtggagggtaaggtgggcaggaagacccctgaagggctgctccgcgggctgcgaggcgagtgtga

SEQ ID NO: 1428 - DNA, 2300 bp, Homo sapien
taacatatggagcagttaccccagagttcaaagggttaatctctaagaattcattctctgacaccagccacagctcttgtccccatctctgggaccgtcccctctgagccccaggttggcagcttccctgaattccttctatgatataatttgtaattcggcagggctctgggacccaggctcagagacccaggctctgctctctcctcagtttccgggagtcagggcttgctctaagggaggaagtaaacaggcctttcccttgctccctctccttttccaggatggggccccgggaccaaagagcttctgtctttccctgccacgcccccacgctgcagcctagacaaggagattccttgtgtcccgacctcaggcaggcatccttgtgaccaaatggtggaaggctggggacagggtgggggaagggcagtcacaaagtcagaaaggatgacacctcccctatccaagattctggtacacccccagagctctgagaccttgaggttctctctccctggctcccatcaacaaagggcagaggaggccaggactcatttgcatataaaaggcctggagaaactgaaaaggcatggacacacagaagctgaacctcctggaagggagatatggagtcagaatacaggaatagggccagacacagcagctcatgcctgtaatctcagtaatttaagaggctgaggcggaaggactgcttgagcccaggagttcaagtgcaccctaggcaacatggtgaaaccctgtctctggaaaaaaatacaaaaattagccaggcatggtgatgcatgcctgtagtcttagctccttgggaggctgaggaaggaggatcatttgagtccaggaggtcgagcctgcagtgagcactactgcactccagcctgggcaacagagggagaccctgtcaccctatctcaaaaaaaacaacaaaacaaaacaaaaaaatggaatacaggaataggggcaacacagggacagggtaagacaggggaccatggcagggtgagccaaacagacttgagagaaataaatggaggcccctgaaagcttctctccctaaaagcagtcaggagtgctggcccagacagggatgcagggatggagccacagaggaagtgagatcccctaggataaaatgagaacactctatttaaaaagtaagacctgaaaagaagcacaaacatctgacaatgagaaactttcctgccaggaggagtgacatgttactgttcacaagaagtaatggtatggacgataaataatgtgatctcacttagcagcaggggctcagatgcccctatatgacctactaccatccaaggacccgtacaaagggctacccatcctggcaggaaatgacatcactcagcaggtaggaaggggtgggtctaccagcccaaacgcttctgggagggccaatccatagagggttagtcctgaaggtccatgtccctcctcaatcctccatcttggccaagagagaggccaaggcttctagactttgggtgaagtaattatgcccccatctcttcatctgttaactccagggagtcctaaattccttaaatccttacttagctggggggagtagtgagagatactaaataccaaaagccataggtcaatcctttagagtcaatatctctatagaagtatctctaggggctgggcataatcccagcactttgggaggctgaggcgggaggatcccttgagcccaggagtttgagaccagcctgggcaacacagggaaaccctatctctacaaaaaaaaaataaataaataaacaattagctgggcatggtggtgcatgcctgtggtcctaactatgggggaggctgaaataggaggatcgcttgagcccaggaggtcaaggctgcagtgagctgtgatcatgccactgctctctatcttgggtaacagcataagaccctgtctcaaaaaaagaaagaaagaaagaaagagcaagctagctctagggacccaataattgagggataaaggcagagactccctagggactagagaaatgatgagccaggtttccatggtaactgatttcagtgcagcctcttcctagtctcagactgagggagaatcaattttgggggagaccacatctaatggataaaagagccacaggattacaaaagggtggaatagttgttacaagaaggtcacatcatcctggcactgctcccagaaccagtgggcctcgaagcccagcttggcactctcatcctctggtgactcaggtggtccaccttgaagcctctcccct

SEQ ID NO: 1429 - DNA, 2300 bp, Homo sapien
gaaactagaaccagaaatatttatttattatttttgaaatggagtctcgctctgtcgttccggctggagtgcagtggtgcgatctcggctcactgcaacctcccctcctgagttcaagcgactctcctgcctcagcctcatgagtagctgggattacaggcgcctgccaccacgcccgtctaatttttgtgcttttagtagagacggggtttcaccatgttggccaggctgttctcgaactcctgacctaaagtgatccgctggccacagcctcccaaccgattaatacttaattaaaacgatatttctctccagaattctttttttttttttttgggacggagtctcgctctatcgcccaggctggagtgcagtggcacgatcttagctcactgcaagctccgcctcccgggttcacgccattctcctgcctcagcctcccgagtagctgggactacaggcgcccgccaacgctcccggctaattttttgtatttttagtagagacggggtttcacgtgttagccaggatggtctcgatctcctgaccttgtgatccgcccgtctcggcctcccaaagtgctgggattacaggcgtaagccaccgcgcccggcccagaattctttgttttgagatagggtcttgctctgtcgtccaggttggagtgcagtggcgcgatcttggctcactgcagcttgaccttccaggctcaagcgatgcttccaagctcagcgtctgcaatagctaggactacagctgtgcaccaccatgcctggctaatttttttgtagatatggggtttctccgtgttgcccaggctgatctggaagtcctgggctcaagcaatcctcctgcctcggcctcccaaagtgctggaattacaggtgtgagccaccatgcctgacctcagaattcttgataaccctgtgaggatggcttaagctatactcaggtgtgtgaccttgtacaagttactagcctatctaggcctgtttcctcacttacaaaatggggacaaaaataaacctacctcatagtcatgagcattacatgaactgttatatcttagaagctcagaaatgcctggtggtaaatgctataaatacacccttatcattattagtgagtacctaggttgtgcatgccactgttgggtgctttacgcacattaatttacttgtcagaatagccatgggggggaggtactattataatgccactttagatatgaagaaactgacgttttgagagattggatgattaaatctctgactccaaacacaacgcttcctccaacgcggtttggccttggagaggaaggcagcttctttcaagacacccctgagcgagaaagtcgcgtcatccgggggctcccattgcccgagcccgccacgtggcagtctgggccgaatgcctctccccactttctgggtgggcgaggcctgactccaaccccggccctccgctctagacctggtaccactgtagattcaatccaaactcccagaaatgtgccgcctttcataatccccagctgtccactacaggtggtaactcccctgctgctcaatgtggcgtaaatcttcccttccatagctgcgggaccacagctcaccgacctgggacaaacacccgagacgggccgaattccagctcgcaggtagtaattccgcccctcccctccccgctccgtcgcgtccagtccagctcttctagccctgccccgctcctctagcccaaccgctccccactgttggccccgcccctccccgccccgtccagctcttctcgccccgccccgctcttctcgcccaactgctcctcgctgttggccccgcccctcccccgccacccccgcccccgccccgcccctctcttctcgcccaaccgcccacctctgttggccccgccctcccatctaagtcacgcctcctagtaggtcaatttagcttctccagctccagagcccagactcctcattgggcgcagcactattcccgcctcttccttgggtcgcgagcgccgaactcatcgaacgcagccaatgggtgatacgacggcagcgcggcgggaggttcgattgacccggtcttggcgggtcggtgagtcttggcggctgttaacgcgcgctttgggaacaggaaggttgagagagaggtgctggggtctgcgtctatctctgtcgctcttttcagcccctcctggtattcccctcctaacctgggttttttacacgcccgcgtggcttcctgctcgacctccctgagtctgatcctggtttccacctccagccctgggaa

SEQ ID NO: 1430 - DNA, 2300 bp, Homo sapien
atctacattttgcagatgagggaagaggttcagagaagtccagagtatagtgaaagagctgggacctgactttctactgcccctgagatgacttagggatcatcttaaattagaaactttggggtctggtacctgtctttgtcttggtgtgcccttctggatcagcagtaattcctaacctctgatatacatcagaaacatctgggatggttcaaacaataaagatgtcttgaccttacctcagatgtaacatagaatcaccaagtctgggtgtctggtatatgaattttggggaagaaaagctccacagggaattctgatgtgcaccaaaggctgagaatcacttgcattcagagttgtattaaacacatcagaatagtctgatgaatcgcttctcggccttttggctaagatcaagtgcagaatagtctgatgagatttcctatccgtcaaaataaataactgttgccttggaagaaacaaatcaagatttggtttctgctttctaagaatttctaatctggctgggataagacatgtacacaggcaaagggactcaacaccatgagacaacataccagcctcttagtcttgagtagtcagagtgtcagaggagtcccaacaagaatctcaaatgacatgtttctaagttctttcaggaagtctaattcagcaatggagacatttctggtagatgtaggaaaggacataggcaggttcaagtccgtggggtgaccagcttggctagagcaaagcattctcataagcaagatgtgggaaataaagcttctcaggcagagggtggaagggcagtagggagacattagggttttaaagcagtatgatgtaattagtgttttacaacactactttggggacagggaaagcaatcaggaagctagtggtcaggtgtgaggtgataaggggctggtggtggtaagaatcagaagttggaggccaggcgtggtggctcacgcctgtaatcccagcactttgggaggccgaggcgggcggatcatgaggtcaggagatcgagaccatcctggctaacagggtgaaaccccatctctactaaaaatacaaaaaattagcctggcgtggtggcgggtgcctgtagtcccagctactcgggaggctgaggcaggtgaatggtgtgaacccgggcggcagagcttgcagtgtgccgagatcacgccactggactccagcctgggcgacagagtgagactccgtctaaaaaaaaatgaagttgggataaggggctaggtgcggtgactcacacctgtaatcctagcactttgggaggccaaggcggacggaacacttgaggtctagagttcaagaccagcctggtcaatatgatgaaacatacaaaaattagccaggtgtggtggcgggcgcctgtaatcccagcttctctggaggctgaggcacgagaatcacttgaacctgggaggcagaggttgcagtgagctgagatcacaccactgcactccagcctaggctacaaagtgagactctatcttaaaaagaaaaaaaaaattgggataaggttctagaaacaaacatggaagaacttacaggggtgagtgtttcagtggagacactataataaaagcatggtctctggaaccagatttccagggttcaaataatccaaccacttacctgtgtggccacctctttgtgcctcggttttacctgtaaaatagggctaataataatacatacctcagagatgtgaagattaaatgaatttgtagtgttgcctgactcagtaaatagtgtgctattggaagagagggaaatttggacagtttcatggatatatcatggctgtctggcatgttttctgcgtttcagagtgtgacatgttggcgagccaagtttatggaggcctttttttcccatgttctacgtgggaccattgatgtgtcttctgacaggcgtctttgtgatcagcggttctcacctcttctgcacagctcccgccatgtccgacagctcaccatctgtaacatgctgcagggtgcaaccgagctggtggctgagcccaaccgcagggttctggagaccctggccagctccctgcacactctcaagttccgccacctgctgttctctgatgtggctgctcagcagtcacttcggcagctgttgcatcagctcattcaccatggggctgtcagtcaagtgtcgctatactcctggcctgtgcctgagtcagcccttttcatccttattctcaccatgagtgctggcttctggcaaccagggcctggtggcccaccctgccgcct

SEQ ID NO: 1431 - DNA, 2300 bp, Homo sapien
agaggggaaagtgaggctctgccaagcaggcctagccgcgctggggacaggggaggcctcgggcctgagaggctgctggctctgtgagggtggggtcgggaggccggggttggagttgggcgaagaggtggcaggcccggccgaggcctgctggggaggggggcaggagagcaggccccgggcctggaagcggcgcgggggaggttccaccaggaggccttgcgggtggccgtggcgtctttgcaggaggaaggccctggtcaggacaggagtgaggactttgaggactcgaggttgcagggcgcggagtttgagttatgccatgaggagggggtgtggggaaaaggccctggagtttggggggactgaagctccgggataagctggagggtggtcggggaggcccttggctgtgggagtggagcccagtaccatgaggcctgagtgtcctgcatagtggtggtggaagaggcttttagaagtcggccggtgtgcggaggggacagtggaggccccaggccagccagcggctgagaagacaaggggcaggccgacccatggggaacaggaggaaaggctccgtagagctgagcagggagctcagaaaagtcctagggcatggggaagaaggcagagagggtctggcttttccgcctggagcttctgggatgctaagactggctaaaaaggaagatgactgggtgcggaggcccaggttgggaagcagcagcattaaaggtgcaggctagaaagaagcaaggaaaatcccggcttaagaagaatggagaaaggaagagaggagtttgtgggtaactggggatgagaattcctgtggctgcaagaagagatggctaactagaggggagcaggttggagggaaaaggggtaaggctctggaggaacttcttcccgtgtggcctcttccccctaaaacaattgacagtttactgaatctccctttccccttctccctcccctaccactgctgtacataccaccatcccattactggctgagcccccagccaagttgagaggagacaggggaggaagagctcctgtgggcctagaccagaaaaagctgaatcaagtgaggccttttaggagaatagccaaggaagaggcctgctaagcattgctattttagaggaaggtctgtgtgggctaacagccaggaaaggcttcctggaggtagtggactagcatcgctttgtgtaaggagttggggcagcgggtgtatagaggcagcaggaaagggtacaatgaggaaactttaaaataaggtatattataccttgaataccaggatatggagtttggactttatcatgaatgcagcagagagacctccaagggttttgaagagggtagtgtcatcaccaagagcaggatgaagagggactggatggagactgaagtgaaggagagcagttaggctgttgtaatagaccagatgaaaggtgatgtggactacattcgtgtaaaagcatagggaattaacactttcattcagcccgtacatcgaggacctactatgtacaaataattatactagattcttggatgtcaagattcagttattctgtaagtaaagataaaaagagaccctggagcggaagttttggtatactccaagatcttagacttgttctttttctttgagatggggtctcactctgtcacccaggctgcagtgcagtggcatgatatcagctcactgccacctctgtcttctgggctcaagcaattctcccatctcagcctctcgagtagctgggaccacaggcgtgccccacaacacccagctaatttttttttgtatttttggtagagatggggttttgccatgttgcccaggctagtctcaaactcctggacttaagcaatgccccctacctctgacctccaaagattacaggaattacaggtgtgagtttgacttgttcttgattggacagagatgccattgacaggataaaaataaccaccaacatttagcgagcttattatggctgggcattgttttaaacagattataagcatgatcttcacaacaatgtcatgagttaattactgttatctccattttattttattttattttattttatttgtgagacagagtcttgctctgtcgcccaggctgaagtgcagtggcgccatctcggctcactgcagtctctacctcctgagttcaagtgattcttgtgcctcagcctcccaagtagctgggattacaggcgtgcatcattacacctggctaatttttgtatttttagtagagatggggtttcaccatgt

SEQ ID NO: 1432 - DNA, 2300 bp, Homo sapien
gaggcccggtctggagcgaagcaggctgggcccgggcgactgaggctggattgcggctgtgggccgcgcgaactgacactcggctgggccgggcaggagagtctcggatgtcgaaccggtgggcagcgatggcccggctgccctagggcaggggccgaggttaggaggcccggcctaaggcaaggccaggccaggcccggggccaccgaacctgactgatggccccggggctccagcatctgcctgacacgccacgggggtcgagattccggaggccaagccgatgggcggaggggaggacagcagattggagagcgagggaatggggcagggggagaggccgaacgaaagggtcggggcgccgcggcctgtctgacggcccagggctgacgggagcgaaccgacaaccggggtctcgggtgccaaactgactaagcgaccgagcgaccgtgcgacccgcaggacagggagcgccggaggccactcggatcggctcgagcggcgaggagggaccggagagcgagtggaggggggcccggagcggcttaaacaagcgagggaggctcgaatgacggacaggcgggaagggccaaggaggccccaagcggggcgacggcccggggatcccggactgccgggctgccgtggcagggggcgcggcgccgccaagaggccttgggctgaatgggagtgaacgggggccccaggcctgaaggcggccgggaccaaagggccgggcctggatggagggcggcctggggcgccgggatgaacggccggggagggcgaaccggccagttgggctgggaggcggggctgtgggttggggaccgctggccgcggcctggccgctgacgagggaaacttgggtccgacgtggggcaagtgaaagaggggaaagtgaggctctgccaagcaggcctagccgcgctggggacaggggaggcctcgggcctgagaggctgctggctctgtgagggtggggtcgggaggccggggttggagttgggcgaagaggtggcaggcccggccgaggcctgctggggaggggggcaggagagcaggccccgggcctggaagcggcgcgggggaggttccaccaggaggccttgcgggtggccgtggcgtctttgcaggaggaaggccctggtcaggacaggagtgaggactttgaggactcgaggttgcagggcgcggagtttgagttatgccatgaggagggggtgtggggaaaaggccctggagtttggggggactgaagctccgggataagctggagggtggtcggggaggcccttggctgtgggagtggagcccagtaccatgaggcctgagtgtcctgcatagtggtggtggaagaggcttttagaagtcggccggtgtgcggaggggacagtggaggccccaggccagccagcggctgagaagacaaggggcaggccgacccatggggaacaggaggaaaggctccgtagagctgagcagggagctcagaaaagtcctagggcatggggaagaaggcagagagggtctggcttttccgcctggagcttctgggatgctaagactggctaaaaaggaagatgactgggtgcggaggcccaggttgggaagcagcagcattaaaggtgcaggctagaaagaagcaaggaaaatcccggcttaagaagaatggagaaaggaagagaggagtttgtgggtaactggggatgagaattcctgtggctgcaagaagagatggctaactagaggggagcaggttggagggaaaaggggtaaggctctggaggaacttcttcccgtgtggcctcttccccctaaaacaattgacagtttactgaatctccctttccccttctccctcccctaccactgctgtacataccaccatcccattactggctgagcccccagccaagttgagaggagacaggggaggaagagctcctgtgggcctagaccagaaaaagctgaatcaagtgaggccttttaggagaatagccaaggaagaggcctgctaagcattgctattttagaggaaggtctgtgtgggctaacagccaggaaaggcttcctggaggtagtggactagcatcgctttgtgtaaggagttggggcagcgggtgtatagaggcagcaggaaagggtacaatgaggaaactttaaaataaggtatattataccttgaataccaggatatggagtttggactttatcatgaatgcagcagagagacctccaagggttttgaagagggtagtgtcatcaccaagagcaggatgaagagggactggatggag

SEQ ID NO: 1433 - DNA, 2300 bp, Homo sapien
catggtactgggctccactcccacagccaagggcctccccgaccaccctccagcttatcccggagcttcagtccccccaaactccagggccttttccccacaccccctcctcatggcataactcaaactccgcgccctgcaacctcgagtcctcaaagtcctcactcctgtcctgaccagggccttcctcctgcaaagacgccacggccacccgcaaggcctcctggtggaacctcccccgcgccgcttccaggcccggggcctgctctcctgcccccctccccagcaggcctcggccgggcctgccacctcttcgcccaactccaaccccggcctcccgaccccaccctcacagagccagcagcctctcaggcccgaggcctcccctgtccccagcgcggctaggcctgcttggcagagcctcactttcccctctttcacttgccccacgtcggacccaagtttccctcgtcagcggccaggccgcggccagcggtccccaacccacagccccgcctcccagcccaactggccggttcgccctccccggccgttcatcccggcgccccaggccgccctccatccaggcccggccctttggtcccggccgccttcaggcctggggcccccgttcactcccattcagcccaaggcctcttggcggcgccgcgccccctgccacggcagcccggcagtccgggatccccgggccgtcgccccgcttggggcctccttggcccttcccgcctgtccgtcattcgagcctccctcgcttgtttaagccgctccgggcccccctccactcgctctccggtccctcctcgccgctcgagccgatccgagtggcctccggcgctccctgtcctgcgggtcgcacggtcgctcggtcgcttagtcagtttggcacccgagaccccggttgtcggttcgctcccgtcagccctgggccgtcagacaggccgcggcgccccgaccctttcgttcggcctctccccctgccccattccctcgctctccaatctgctgtcctcccctccgcccatcggcttggcctccggaatctcgacccccgtggcgtgtcaggcagatgctggagccccggggccatcagtcaggttcggtggccccgggcctggcctggccttgccttaggccgggcctcctaacctcggcccctgccctagggcagccgggccatcgctgcccaccggttcgacatccgagactctcctgcccggcccagccgagtgtcagttcgcgcggcccacagccgcaatccagcctcagtcgcccgggcccagcctgcttcgctccagaccgggcctcctggcctcgccccccgcgcccccgagccaggccgcggtgcgggtcagcctgcccatttaggtctccgtctttactctgtccagccctgtcagtcacaaaattcattctccgatcctacgagctggctttcagcgccccaggctgggccttgccccgggcctcccggcctcgccccccgcgccccccggccgctgggccgccccttgctcttagccagaggtagcccctcaccccgcgacttaccccacaccccgctctccagaacccccatatgggcgctcaccgcccgcccgcacagctcgaacagggcggggggagcgttggggcccgaggccgagctcttcgctggcgccgcctcccgggacgtggcctccatggtcgttgccgccgctacctcacagaaccagcaactccgggcgcgccaggcctcgggcgccgccatcttggggaggtgcgcgagcccgagagtgtcgcccgcggaccgccatcttgaaaaggtcagcagttaggacggctccataagcgatatggggaagaatgtgaattattctaaagaaatttcgaagaaattagcacactttccaagtctcttaggagctactattttagataaactcctagatcaattatacttgggtgtggtatgactaaggggatgtttcttagcaaagcctcctcgggtgcaaacatcagctacccctaacctctgcctgcggctggtagtacatgccaatctgagcatgtgttcgcgaccacgatgagtgtgccgcacttccggccagatcgccggatttccgctgagtgacccttacaagtccttcttgatcctgaactgggttaggtgccgctgttgctgctcgtgttgaatctagaaccgtagccagacatgggactggaggacgagcaaaagatgcttaccgaatccggagatcctgaggaggtaaggcaaggcgatccactcggccctcttctct

SEQ ID NO: 1434 - DNA, 2300 bp, Homo sapien
ccttggctcactgcaagcttcgcctctcgggttgacgccattctgcctcagcctctcgagtagctgggactacaggcgcccgccgccacgcccggctaattttttgtattttcagtagagaaggggtttcaccatgttagccaggatggtttggatctcctgacctcctgatccacccgcctcggcctcccgatccacccgcctcggcctcccgatccacccgcctcggcctcccaaagtgctgggattacaggcatgagccaccgcgcccggccagaataccctagtttaaaactgactgcttaattacttgctttttctcatctattgcagcggtggatcttgctgacctttctgaggcaggctccatttctttctttagtttttttttttttttttttttttgagacagggtctcactcgggttgcctcggctggagtgcagtgacacgatcacggctcactgcagcctggacttcctgggctcaaactcccgagcagttgagaccacaggcgttcaccaccatgcccggctaatttttatattttttgtagagacggggtttcgccacgttgcccaggctggtccaactcctggactcatgctacctgtctgcctcggccgtcctcctaaagtgttgggattacaggcgtgagccactgcgcccggcctcaggttctatttctttttagaaataataagactagaaaaattaagggataaataagtctccaattattctgaacccacagcccagaatggctgcccccaagtgaccagagaacagacggacaggaaatgagattagaaacaactagtagctgtgtcgcaaaattgataagagtcctggttctagaaccgcgctgcttggccgcaattcctggctgcaccaatttggtagctgcatgaccttagaaaagatatttaacctctatgcttgtttcctcatctgtaaaaatggcactaatagtacccaacacttacttcataggaatagtgtgtagatgaaatgaattagggccgggcgcggtggctcacgcctgtaatcccaggactttgggaggccggggtgggcggatcactaggtcaggagttcgagatcagcctggccaacagagtgaaacccccgtcgctactaaaaacacaaaaattagccaggcgtggtggcggacacctgtagtcccagctacctgggaggctgaggcaggagaatcgcttgaacccaggaggcggaggttgcagcgagccgagaccacgccactgcactccagcctgggcgacagagcgagattccatctcaaaaaaaaaaaaaaaattaattagtgcatataaagcacttggaatagcaagcagtcaataattatagcagcactctttctctgggaaagagctccctcttccatcacagaatcacatcgtacattctttcattgtccccaaagacacacaccttcctcaaagaaaaggaacacaaggccaggtcttccgaacctccatagaagatgtggtagggattcctaacctgagctggggcaaggcggtctgtttgctccccaaatctgtgaaacgcgggcttcagaacatctgactgactgcaaacataggtcatatttttacaagactttagtccacaaaacattttcgctctcaaaccttcactacattcacagaatgcagaagccgaggcccagagaaaaactagtcatctatctgtccaaagtcaccggacgaattctggggaaaggtcgagggaactagagctcccgactatgcaaaccctagagggtaaactgggggctaagagggccccgtgcgtgttttggcgggctaggtcctgggcttcagggcagagaagagggccgagtggatcgccttgccttacctcctcaggatctccggattcggtaagcatcttttgctcgtcctccagtcccatgtctggctacggttctagattcaacacgagcagcaacagcggcacctaacccagttcaggatcaagaaggacttgtaagggtcactcagcggaaatccggcgatctggccggaagtgcggcacactcatcgtggtcgcgaacacatgctcagattggcatgtactaccagccgcaggcagaggttaggggtagctgatgtttgcacccgaggaggctttgctaagaaacatccccttagtcataccacacccaagtataattgatctaggagtttatctaaaatagtagctcctaagagacttggaaagtgtgctaatttcttcgaaatttctttagaataattcacattcttccccatatcg

SEQ ID NO: 1435 - DNA, 2300 bp, Homo sapien
gccgagatggcaccactgcactccagcctggtgacagagcgaaactccgtcaaaaagaaaaaaaaaaaaaaggagtaaaactgtatgatcatcttaacagaaaaaaaaaaaaaacttaaggaaaatcaacaactatcatgattttttaaaatctcagcaaactaggaacagaagggaactttctaaacctaagaaaggacatctatacacatgcaggtacacgcacacacaaaactacagctaacatcatatataatggtgaagtactaaatgctttcttcttaagaatgggaacaaggcaaggatgcctaccatcaccacttacattcaactgtgtactggaagtcctagccagtggaataaagcaaagaaaaaaaaaagggatatagatagaaaagaaagaagttaaagtgtctttatttacaaaagacatgaccatatgcatagaaaacctgaacagatttccaaaaagttaccaaaagtaataattgagtttaggaaggtctcaggatacaaggtcaacagaaaaaatcaattatattttaatatactagaatttttcttttgagacagagtctcactctgttgcccagcctggagtgcagtggcatgatctcagctcactgcaacctctgcctcctggtttcaagttattctcctgcctcggcctcccaagtagctgggattacaggcatgagccaccatgcccaactaatttttgtatttttagtagagactgggtttcaccacgttggcctggctggtctccaactcctgacctcaggtgatccacccacctcggcctcccaagtgctaggattacaggaatgagccacagtgccggccagcctttttcttgaaaaatgaacaaagtgagcctgtcacttcaaggaaaataactgacagtatttgttgccaataagaaaattccaaaattccacattcaaatgccaaataagaaaaagctttcggctgggggcagcgtgagccaccgcgcccggccaagttttgtattatttttcttaactatgtcttctcaaattgcggaagcgttaggccccacaacatttgacatcaccagtagggatccagtggagaggagggacatgatcagaaactgtgtttttaaatgatcattcaacagccaattatcagggtgggtaggagtgaggcagggagatcaaaaggcagggagattggctgggattacaggcattgttaccagaaaggggtcccgatccggaccccaagagaggttcatggatctcgcacaagaaagaattcagggcgagtccgcaatgcaaagtgagagcaagtttattaaagtacaagaataaaagaatggatagtccatagatagagcagctccaagggctgcttgcccatttttatggttatttcttgatggtacgctaaacaaggggtgggttattcacgcctccactttttttttttttttttttttttttgagacggagtctcgctttgtcgcccaggctggagtgcagtggcgcgatctgggctcactgcaagctccgcctcccgggttcacgccatccctcagcttcccgagtagctgggactgcaggcgccagcaacctcgcccggctaattttttgtatttttggtagagacggggtttcaccgtgttagccaggagggtctcgatctcctgacctcgtgatctgctcgcctcggcctcccaaagtgctgggattacaggcgtgagccaccacgcccggccaggtcccgaaacttaagcttcatttgtttcactgcaaatctgcttctgcctacaagcctggtctcattttcctctacctaaggatcttcctccatgcaatttcggcctaggaggcccttcccgccccttttcgcctagctaactctttcggtactcaaccaccaactcctaatcctccctggtcccccaagtgggctaggggcttcttgggagtccctcgcactgctctaagcatccaggcagagtcattattccgggtgccaggttgctctttttccagcagccttcaggggactcctggctgggcggagtctgtagaggcgcgcggagtcctgggagagcgtcagatgtatttcctttcccttttttcgctcgtgtcccgccgggtggcgctcaccacctccccggaacacgcgagtctcctgtcgcggttccggtcggaattaccccgtggagcacgccgatatggctgcgctgacactgaggggtgtccgggagctgctgaagcgtgtggacctcgcgacggtcccgcggagacatcgatataagaagaaat

SEQ ID NO: 1436 - DNA, 2300 bp, Homo sapien
aagttaccaaaagtaataattgagtttaggaaggtctcaggatacaaggtcaacagaaaaaatcaattatattttaatatactagaatttttcttttgagacagagtctcactctgttgcccagcctggagtgcagtggcatgatctcagctcactgcaacctctgcctcctggtttcaagttattctcctgcctcggcctcccaagtagctgggattacaggcatgagccaccatgcccaactaatttttgtatttttagtagagactgggtttcaccacgttggcctggctggtctccaactcctgacctcaggtgatccacccacctcggcctcccaagtgctaggattacaggaatgagccacagtgccggccagcctttttcttgaaaaatgaacaaagtgagcctgtcacttcaaggaaaataactgacagtatttgttgccaataagaaaattccaaaattccacattcaaatgccaaataagaaaaagctttcggctgggggcagcgtgagccaccgcgcccggccaagttttgtattatttttcttaactatgtcttctcaaattgcggaagcgttaggccccacaacatttgacatcaccagtagggatccagtggagaggagggacatgatcagaaactgtgtttttaaatgatcattcaacagccaattatcagggtgggtaggagtgaggcagggagatcaaaaggcagggagattggctgggattacaggcattgttaccagaaaggggtcccgatccggaccccaagagaggttcatggatctcgcacaagaaagaattcagggcgagtccgcaatgcaaagtgagagcaagtttattaaagtacaagaataaaagaatggatagtccatagatagagcagctccaagggctgcttgcccatttttatggttatttcttgatggtacgctaaacaaggggtgggttattcacgcctccactttttttttttttttttttttttttgagacggagtctcgctttgtcgcccaggctggagtgcagtggcgcgatctgggctcactgcaagctccgcctcccgggttcacgccatccctcagcttcccgagtagctgggactgcaggcgccagcaacctcgcccggctaattttttgtatttttggtagagacggggtttcaccgtgttagccaggagggtctcgatctcctgacctcgtgatctgctcgcctcggcctcccaaagtgctgggattacaggcgtgagccaccacgcccggccaggtcccgaaacttaagcttcatttgtttcactgcaaatctgcttctgcctacaagcctggtctcattttcctctacctaaggatcttcctccatgcaatttcggcctaggaggcccttcccgccccttttcgcctagctaactctttcggtactcaaccaccaactcctaatcctccctggtcccccaagtgggctaggggcttcttgggagtccctcgcactgctctaagcatccaggcagagtcattattccgggtgccaggttgctctttttccagcagccttcaggggactcctggctgggcggagtctgtagaggcgcgcggagtcctgggagagcgtcagatgtatttcctttcccttttttcgctcgtgtcccgccgggtggcgctcaccacctccccggaacacgcgagtctcctgtcgcggttccggtcggaattaccccgtggagcacgccgatatggctgcgctgacactgaggggtgtccgggagctgctgaagcgtgtggacctcgcgacggtcccgcggagacatcgatataagaagaaatgggtaaggtccggctgggggcgcaggagggaaaagtgagggtggaaacttctccagtctttccgtttcccggccctctagaacgcctagcgtctttcccaagcactccacggaacgtccttaggcacctccctctctcgtcttttccgtcaccgcctctgtccgcactctatgtcccgagcgttagtgtcttccacttgttacgtctgcagtctcctgactccgcccaagttgcgtcatcaccttcgccttcattcttttagtgatgtcactgtctcttgttccccagctgtgtccacctacctttctgtcccccactcccccttttacttccctccctcccctccccctttcccttgcccattcttcccccacatgacttctcctttcctcattgattttccagcccggtcgccctcacccctcggaaaataccatagcgaccttgcctgcactcctgggtctccgcc

SEQ ID NO: 1437 - DNA, 2300 bp, Homo sapien
tgtgtttttaaatgatcattcaacagccaattatcagggtgggtaggagtgaggcagggagatcaaaaggcagggagattggctgggattacaggcattgttaccagaaaggggtcccgatccggaccccaagagaggttcatggatctcgcacaagaaagaattcagggcgagtccgcaatgcaaagtgagagcaagtttattaaagtacaagaataaaagaatggatagtccatagatagagcagctccaagggctgcttgcccatttttatggttatttcttgatggtacgctaaacaaggggtgggttattcacgcctccactttttttttttttttttttttttttgagacggagtctcgctttgtcgcccaggctggagtgcagtggcgcgatctgggctcactgcaagctccgcctcccgggttcacgccatccctcagcttcccgagtagctgggactgcaggcgccagcaacctcgcccggctaattttttgtatttttggtagagacggggtttcaccgtgttagccaggagggtctcgatctcctgacctcgtgatctgctcgcctcggcctcccaaagtgctgggattacaggcgtgagccaccacgcccggccaggtcccgaaacttaagcttcatttgtttcactgcaaatctgcttctgcctacaagcctggtctcattttcctctacctaaggatcttcctccatgcaatttcggcctaggaggcccttcccgccccttttcgcctagctaactctttcggtactcaaccaccaactcctaatcctccctggtcccccaagtgggctaggggcttcttgggagtccctcgcactgctctaagcatccaggcagagtcattattccgggtgccaggttgctctttttccagcagccttcaggggactcctggctgggcggagtctgtagaggcgcgcggagtcctgggagagcgtcagatgtatttcctttcccttttttcgctcgtgtcccgccgggtggcgctcaccacctccccggaacacgcgagtctcctgtcgcggttccggtcggaattaccccgtggagcacgccgatatggctgcgctgacactgaggggtgtccgggagctgctgaagcgtgtggacctcgcgacggtcccgcggagacatcgatataagaagaaatgggtaaggtccggctgggggcgcaggagggaaaagtgagggtggaaacttctccagtctttccgtttcccggccctctagaacgcctagcgtctttcccaagcactccacggaacgtccttaggcacctccctctctcgtcttttccgtcaccgcctctgtccgcactctatgtcccgagcgttagtgtcttccacttgttacgtctgcagtctcctgactccgcccaagttgcgtcatcaccttcgccttcattcttttagtgatgtcactgtctcttgttccccagctgtgtccacctacctttctgtcccccactcccccttttacttccctccctcccctccccctttcccttgcccattcttcccccacatgacttctcctttcctcattgattttccagcccggtcgccctcacccctcggaaaataccatagcgaccttgcctgcactcctgggtctccgccgccttgcaggaaaggattcagccccttcctcaacctcgagctgcctctggcgaccgggcaaggttacagcgaccaccctgtccatactgccggcccaaaccctggcaaaaggtgcaacgaatcctctcatcctctggactctccttgcttctccagagaccctttttcttgcctcactggaagccctggaatttcttctatgaccggcacgcccccctgcccaccccagccgattccctcgccacctccaccatctcttccacccccacaaccttcctcgcactcagggagatggtcttttgagtcctcttccccactcctggaaaggacctactgccgctagccctgccactcgggttccccactctccagcccttattttgagcagttcagcattccggggtcaccccctctctgtcagcggacaccttattgcagctggatgagtccctccagaatgcggcgtccctgtcttcaaggcacgtactgtgaccagcacactaatctctgttactctagcggatggccttcagcttttggaaccagcccggcaacctcctttccccttgctcatcagtccccgggaacgagcccagtgacctcccctcagctcactcatgtacccttggaaactggacccatgatttcg

SEQ ID NO: 1438 - DNA, 2300 bp, Homo sapien
tgacttctcctttcctcattgattttccagcccggtcgccctcacccctcggaaaataccatagcgaccttgcctgcactcctgggtctccgccgccttgcaggaaaggattcagccccttcctcaacctcgagctgcctctggcgaccgggcaaggttacagcgaccaccctgtccatactgccggcccaaaccctggcaaaaggtgcaacgaatcctctcatcctctggactctccttgcttctccagagaccctttttcttgcctcactggaagccctggaatttcttctatgaccggcacgcccccctgcccaccccagccgattccctcgccacctccaccatctcttccacccccacaaccttcctcgcactcagggagatggtcttttgagtcctcttccccactcctggaaaggacctactgccgctagccctgccactcgggttccccactctccagcccttattttgagcagttcagcattccggggtcaccccctctctgtcagcggacaccttattgcagctggatgagtccctccagaatgcggcgtccctgtcttcaaggcacgtactgtgaccagcacactaatctctgttactctagcggatggccttcagcttttggaaccagcccggcaacctcctttccccttgctcatcagtccccgggaacgagcccagtgacctcccctcagctcactcatgtacccttggaaactggacccatgatttcgcctcctcctacacataggaccccgggaacttgcctcacgatttcacctcctcttgctcgccggccggtggaaactagtcctatggcctccccaaccctttctcacagagttttggaaactgggctgatgatctctctgccctctcactggttctcagggagaagttataatgacccccttctctccccagcatcttccccacctactggcagcttttaccatggcagccttaagcctctagactcttgtgaacccaaaccacagcttgacctgccccttgagaaaaattgttgtggcttcccactctcttctcaggcaggcatgcctggctctcccagctcacctcaggagggctcttatcattactcccatctttcctcagaggcctacatacctacccctgggagtccttgctatgccatctgcctgtgccccgggagtactgattctccttgctcaccccagtcccaggctcccaggaaggcttgcattgagtcccttctctcctgggaggcaactgggaactcttacctcatcctaaccccggacaccacaacttctggtcccccctgttcccaggaaccatctcgtccccatggtcctcattctgtcctttccttcccttcacccctgggcaaccagtttatatctccaccccagtcacttccccgcagaagctataatgaaccccctcttcccactccagtttccccccaaccgaagtcccctaagtccccagagttaagacagtcacatactccccacaaatgtctctccctagtcaacactccccagcacaccccttctggccagcccaagcccgctaaggcccacacctgtcccccacctccctcctgcctctctggtccttcttgtatgcagccatacatcacaactccttcaaattccagccccaaagaacttcccccagggactaccttactgactgtggtccctagagctctcaaaagtgttatccccacttcttttcccctctgccttccttgtgatcctgtctcggccaatagttatgctcagagcagccgccatggaccctccatagggcccccctgcaatacccatatatgctctgtggttccctccaccccccatccctgcccactgtctggctccctcaatcattcgacaggcccccctcccattgtgcccctgtgtgacacctatagcactcccaggggcccaccccaacctcgttgtcagcctgtgatgcctccttgttctacccacatctattcttttatccctttgagaacaccctttgatcctcaaagtttacccattgtcccccgagtccgggcctaccctgatactgtcccctgtggcctccatatctaccctgtggcctctcaaggcccttgcaaagagcctctgcagatcccctacagctgccctttgccttcatccaaggattccagctgtagcaccaatcccagctgtagttcgactattattagcaaatgccagagtagtgacagcgagagcaggagttcccaccaaagccaaagccggagccaaagcaagagtccccatgatggc

SEQ ID NO: 1439 - DNA, 2300 bp, Homo sapien
tctctttttcttttgagacagagtctagctctatcacccaggctggagtgcagtggcgcgatctcggctcactgcaagctccgcctcccaggttcacgccattctcctgcctcagcctcctgagtagctgggactacaggcgcccgccaccacgcctggctaatttttttgtatttttagtagagatggggtttcacggtgttagccaggatggtcttgatctcctgacctcgtgatccaccggccttggcctcccaaagtgctgggattacaggcatgagccaccacgcctggcttctgtctttctgtctctttctctctctgcctctctttctctctctttgcctctctctttctctccaacttcctctcccagtttctctttcctctctgctggtctttccctgcctctgccagctgcttatgctgctgttctcccctctccttccccttcccctagggaagggaccgtcaggagtgcagctactttttcttccccgagaagaaaggaaaggggaattctgaatatttttcttactaccggaggtttgtgtgaggtttttgatcccctgaaatttgtggaaggctcaacacctcaaaccagggggtatcttgccttgcctgacctggaaggctcaacccctcaaaccagggggtgttttgccttgctgccctggaaggctcaatccctcaaactaggaggtgtcttgccttgcttccctggaaggttgacctgtttcctccctttccccctctgaaggtcctttgcacacttcccactcgtgttgtcctctctggctgctcccccaagggagaattaggcccccctcagcattggcattccagtagaaatcccaccgcaggatcctccctaagccatatgaggtagctacggaaacgtggagaggacccactcactccgtccagcagtaggacttgtcatcatccacacgaacaacaccacaggtagggttgtttgtgatcattcacgcacacacacatttagccctccagaatttgaccaccaaggaagtaccttaccggctccctcggcttcttcctttgtctgtgcacagagttgtctctgcagtgtgtgaggatgctttaccctaggttgcctgctggtttcttttcacattgctgagagctcaggttatttcttgcactgggtgagtcctgatttctcacccctgaggccatcacaagagggtggggcatacctcctcaggagagagaaccagagactgcccctgaaggggaatgtaatcacgagcaagcccccaaattgttataaataaagtttccccccagtgccgcaaaagaaatagcactcgaatataaaattttcttttttttcttctcagcaaggcaatttacttctatagaagggtgcgccctcacagacggagcaaaggtgagcgcacacctggacaagggaggggaaggtggttcttatgcctgacccacgtgattcctgatgctgtgtccttcccctgttggctagggttagacctataggctaaactaattccgattggctaatttaaagacagtgagggggtgagtggtttggcgggaaaaatggttaccgcagagcaggaaatcggaatgaaccacggtgaagaatgagtgagggaggagcaggtaatcgaaaaatgttgctttatgaggaagttaagtttaaaagtagaaggcaaagaattgaagatactgacatattgattcttttaagataaatttagaactcatatctaacagctggcatgtctggcatggggctccggctggggcgcagtcttcagcatttggggctctggggtgcagggggcagaggacggccggggctgtggtgcccaaccggtgctaaactcaagcttgggaggtcgcccacgagaaacagtcgcccttccccacccgcctgctcggcttggcggggagcgggatgtcgctgggggcgatgccaggcgggccgcctctgatagcctctaggctctggcgcgcttccccgcccctcccgcgcaggcgggcgtgggatcccggctgatccagtccgggttttgcggcggagcgggcgggctgcgcgtgcggcggcttcaactgtcgcggtaggcagcagcaggctgaagggatcatggtgcagtacgagctgtgggccgcgctgcctggcgcctccggggtcgccctggcctgctgcttcgtggcggcggccgtggccctgcgctggtccgggcgccggacggcgcggggcgcggtggtccgggcgcgacagaggcagcgagcgggcctggagaacatggaca

SEQ ID NO: 1440 - DNA, 2300 bp, Homo sapien
gcatacagctgaggaggtctgagccaggccctagtcctctagcccaggctctggcaatacaggtggcttccagctcttagagaccttaccccctactcccagcaacatggggcctgactgaacagttgtccaagtttccctgactggaaagcaaaagaggttactccctactccacatccctgcccacttctcccgatcagccttccacagggggccccctctcctcccctctctttacttccctctcctgctccatagcactctggaaaactttctttgattaacctctcccagccaagagcattcaaagaggctgtatagtgcagtggttgaaagcaccagctttggggccagaaaagccccaaatcacagctctgccctttggctgggtgatcttgggctcttcatttaatgtctctgagccttatttcctcatcctcatctggcaaatgaagccataaatgcctgggtctaggattgtgtgacgatcacatgaagtcatgaatgcaaagtgactggcatagaggagatgctcagcaaatgccagctgccatctccccccaaccccatgctacatctaactgtgtctcagttttctgctgcacttagaggataaggatgagagctgagggtggggagagaaggaagagcagcagcagtagcagcttcaggaggctcctgatcacttagaagagatgaaggctgagctacagtaggagagactcaggttaaccctgagagggacttcccatactgagaccctggaggaagccacatttcaaaggccccgcgtaagttcagtctgttcccaggaccatatccttatcctagaggcagctccgaggaggcagcagctgccctgtctggggagcagtgggggaggtgaagagttcactgggctccggggctgtgggctgcaggcctcccacccagccctggtgccctggcctggcccactgtggccacataaaaggtgacggatggttaataggggagataacaggattcataagggaaatttatcggtcactctggtggtataaatatgtttatagcggaccaaggggaaatgaagaagccccaataaatcaccatgaagccaccagccactaataggcaagcagcagtgggaaccccagtgttggcgattgcagacaccccctctggctgcccgctaatggcatggcggggctggagactcatcaagctggacagacgcccaccccacgccatggcaggaacaagaccccaggggccacctctgctggacctgagctgccctgcctgctgtgcagcccccacttcccccagtctggactcagccaggctggaagggctgagggaacagggcagggggtatatggaccaggtctaggaggcttcatggtgcacaggttaaagagactctggagtaagaactggcttcaaaactttatctgccatttcccaatccctgcctgtcttagaatttccttgtttgcaaaatgacttagcaatcttagaaagaagctgttgtgaagagtagagagataatccattatcatagtgcttggtattttgtagcctcaaaaatggcacctcagcctcctgagtagctgggaccacaggcatgaaccaccacgcccagctagttttttttatagagacaaagtctgttgctcctgagctcaaaagtgccaggattacaggcgtgaggcacctcccctggccagcaacatttcatagatgaggaacctgaggctcagaagttgaggcttgcctgggatcccacagctagaagagaaaggctctgtttgattcccaagatgagaatcttctcactgccccagtgtaggccccattccttcctcaaagtcactgggggttccctgaacctcttcccccagaagagacctaggatttcaggggccgtgaagcattcaaatcaaagccccggggctcttgcggtgacttgctggtgctgatgacaactctccatctaccccttccctccctgcccctgctacttcctgtacccgtctccccaagcaagggctggactcagcttctgtgacctcaccccagtactgtggttgcctaaagccttccatctgatctgtatgggaggcccatatctgggctcaccagccctgccatctttgtcacagcctctgtccaggccaatgtgtcctccagctcagcttactccttcattcattttttcaggaaacattcaaggaccttcttccaagggcacaatactgagcaacatggacaaggtctggccctatggtaaagtcaggtctggatcatggaattg

SEQ ID NO: 1441 - DNA, 2300 bp, Homo sapien
agtggtttgtagttctccttgaagaggtccttcacatcccttgtaagttgaacagacacttctcaaaagaagacatttatgcagccaaaaaacacatgaaaaaatgctcgtcatcactggccatcagagaaatgcaaatcaaaaccacaatgagataccatctcacaccagttagaatggcaatcattaaaaagtcaggaaacaacaggtgctggagaggatgtggagaaataggaacacttttacactgttggtgggactgtaaactagttcaaccattgtggaagtcagtgtggcgattcctcagggatctagaactagaaataccatttgacccagccatcccattactgggtatatacccaaaggactataaatcatgctgctataaagacacatgcacacatatgtttactgcggcattattcacaatagcaaagacttggaaccaacccaaatgtccaacaatgatagactggattaagaaaatgtggcacatatacaccatggaatactatgcagccataaaaaatgatgagttcatgtcctttgtagggacatggatgaaattggaaatcatcattctcagtaaactatcgcaagaacaaaaaaccaaacaccgcatattctcactcataggtgggaattgaacaatgagatcacatggacacaggaaggggaatatcacactctggggactgttgtggggttgggggacgggggagggatagcattgggagatatacctaatgctagatgacgagttagtgggtgtagcacaccagcatggcacatgtatacatatgtaactaacctgcacaatgtgcacatgtaccctaaaacttaaagtataataataataaaaaaaaataaaacattaacttctacttaaaaaaaaaaaaaagaaagaataagcctgcaggaatgtggagtggggcaggccctggactggctgtgtggcctcaacttgtcactgttctttctctgagcctcagtagactcaactgcaagtggggcttgtcattcttggcctgcttgcttcttggagatatggtgagaataaagggaggtaatggcggtgaatgtatgacagtcataacaacagtattcttatcagtattcttatgtttgtgcaggaccttagggtttatctcatttcttttttttatttttatttttggagacagggtctcgctctgtcgcccaggctggagtgcagtggtgcaatctcggctcactgcaacctccgcctcccaggttcaagcaattatcctgcctcagcctcccaagtagctggaattacaggcatgcgccaccatgcccagctaatttttgtatttttagtagaaacgaggtttcactatgttggccaggctggtctcaaactcctgacctcaggtgatccgcctgccttggcctcccaaagtgctgggattacaggcatgagccactgtgcccagccctgggtttatctcatttcaaagcaaatgcctcagtgggcagtctagctctgatcttggctccaagtgggcctcaatggatattggttgaataagtaataagtgtgtgagtgaatcaatgaaggtaaaaatgagtaagtgcctgagtaattgaacgaagagatgattgcataaagcagcaaatgaatttgtaaatcacaatgactaacacttttgagcacatactatgatccagtcctttgtaaaggcttctcttaatccttgcagcaaccctatgagataggtactatcatgaaccccatgttgcagatagagaaactatgggtcagataagttaaagccacaaagctcctgagtggtggacttgaggtttcagcctgccctgggcagtctgactctagagcccagagccctaaacccacactggccctgccgagtgaatcgatgaatgagtgggtgaatgaaggagtgaatgcaggaacccccacacggtaagccacgggcaagacaggctcccttccgatggagggagcttctgacccatcagaaggtgggcatccagggtctggactgggggtgggtctccctgagggcagagtctgataggcctgcctcatggcccctctcccttttccgtctgtaggcggatgccgccatgcagcactacggggtgaacggctactcactgcacgccatgaactcactcagcgccatgtacaacctgcaccagcaggcagcccagcaggcccagcatgcccccgactaccggccttcagtgcatgcgcttacattggctgagcgcctggctggtaagggccctggggatgggaccatggggac

SEQ ID NO: 1442 - DNA, 2300 bp, Homo sapien
ttctttgtagatatttgctttgtatgtatccttcctggtgcttctacaatctgtggctgcatcatatcaccccacagttcaggaaacatgtcagctcttatcttttccccattctctttctcctctccttctgggaccttcattgcttgtatgttcagccatttgctattgccccacatgtctcttttacactttattctatattttctaggcttttccttccttccttctgtttcagtctggatatttttctactgaaatatttttctactatctagtttactaatcctattttcacatgtgtcttttctgctgctaaatccatcaacggagttattgatttcatttgttataacttttcagttctggaatttccactagattctttttcatagattccagttttctattgaaagattcccttgttgttaattttcttgaacatattaaaccttctagagtccatatctgaaaactccaacatctggatctccagtgggcttgtttctattgtctgttttattgctcttgtctgttttattgcttttgttcatttggtcttatctcctgaaatgccagataattttttattgaatgtccaacattgtgtataaaaacttacagagctagcatgaggctctgaatgatgccatctttctccagaggggatttacttttgcttctgacaggcacttaaaggaggacaggccactttaacccaatcgaggattatactgattggaaactttgttccagtcttcctgagtctagtctatatctggttagccattattcctagagtgtttctttggtcttcccaataaaaactgttccctttttagtccccaaattcaaatttgactccccagtctcatgaccactgcctcctacaaactggaaaatgcctttagggaaaaatcaaaatctagtattacttctctccacaatcttggccccctcaagtcctcagtgccttcgtagctctcccatgcctttaaacagatttcttaaatgcttaatccagcttttaaagttatcctcagcaggtaaattggtctgatagaagctagtctactttagccagaaacagaagtctagatgataatctgaaattagcacaattagatctacaactaagttatgctatgctaagcacttataataatatccaatttaatttttacaacataagattaagtattacttttacatctccattttacagatgaggaaactgagacagaaaaagattaagtaaactcatcccaaaccgctcaattgcagtgtggtgccaggatttgaaatctggtgtactgatccaaagcctgagctctcaacctagcacagtgctagatttgctaaatgtttgttgaatgactgaggcacagggcacaggctcttctgaggccctgtagataagctcctgtaattagaacttacactgctcaaacgtcaaccacagaggaagacaggttttctctggttcaaggaaggtaaaaatcactttgcttcttccttggtttagcaaactaggttcaacagaaaataattccagcccaggggctgagcttctaagtgctaattgctaatgaatgattgattcttatctgctcctgggaggcagagtgactataagacaaaaggacctctgccctgggcacaaaaaggactaagaacatgtgggtgttgggcttattcccgaggttgccctccgccctggttaattgggatctgggagtgtgcaggggtgaggtgttgaggctgctcagctgttgtaattcaatttgcaccaccatttcatctggtggactgtggcctcctgtggctgctgttgcagtgttggttctattttgttgtgggtgttctggctagctctgttgtggggtgtccttggcactgttcactaaatctttctggttttccactctactgagcacaggttaagattgtactttctggctaatttgtgattaggtggcactgtgtgacgttctggccagggaattgtgacacgtgccacttccaggctggcctattggattatggaagcaggactctgagttgatgctattgctctccccagtcctctaagccccttctatttcattccaagtccagccttcaaccccagtgcctgagcaggagggagggacattgctctgactcttgagttgcgaggactggaagaccttcactttagtgagtactccaagctgctgagcccatggagatcatctagttcaatccctaaatcttcagaagtgggaaactgaagcttggagtagaggagggctagggcc

SEQ ID NO: 1443 - DNA, 2300 bp, Homo sapien
aggtggacaggatggggatgggatgggcaggggtagggagcagacttggagggatgcctctccctgtccgctttccataccaggtgcagttcctgtctcttgagcctcctgctgtgtgtctatctcagactccaagcagagaccccaggtgcacctccaggccaaagggcagagcacattacagcgggccctgagcatgtgatcaggagtctcctcacatccctggcttctgaacgacatgcaaagccaccagctcgttcttcctcctcaggaaccagcagtggaacctgggctgactgcccgctgggccctgggacccagacagccactcacattgcaacctcatgaataactcagcacctccctgctgcctacatctctgaggagcctgtggccgctggaccaactcccccctcaccctgcctctcattgctttaaattttcataggctgaggttcagtggcaagtaagtggctctaggaagctggggcaggatgtcctgggcaggggagcttgaactctcctgggtggaggctggcagggaaggatcctatggaacaggcccagctccctagaactctggcagccaaagcagaaatgtagccagacaggagtcccaagggtgggcttcagcttcagagggctttgagagaggaagagtaagctgggtgacctcgtacagatccctggtcaaggtgggactggggggcccgtagtggagcagtggaataggactgcagataaatcccagggttccccacctatcatcttactgcccagaaactcctaccctgaagttggagcgccaacaaggagacatccaagagcccagaaacttccaggacttttctggggccagactgcaccggctggaggcagtgccccgggtgggcctgcatggacatccccatcagcagcagagacttccgcggcctgcagctggcctgcgtggctctcgggctggtggctggcagcatcattatcggcatctccgtatccaaggctgcagctgccatgggcggtgtctttattggcgctgctgttctgggtgagcaggggctgggctgggatagggaagggagattctggaggtgggggcaggggcatcgtcaggtgaacaaggaacagggaagggctgggtcagcaggaatcagctggggagaacggaagctagaggtgtgagcaaggccgccatcaggggcacaggcgggagaggagcgacgcgctggggctccttccagccacagggaggagaaaagaaggagagctggccgtcacactcttttctggctactcccactggctctccagccccaagctctaggctcctggatttgtggtgggattcatcagcctatctgggcggaacagggggttgatggcggcaggtaaaaggacagagctcctgaggactctctgagccaagacaggctccagctcagaaaaagggtttcgtcttctttccctgtttgcctccacagcagctgtgtccatctatctgtgtggggccacgcccactgattgccccgcagtgacgctgaatgccatccctcacctcacctcacctcaccccaccccccgcccccgcccaggccaaaggcaggaccagaagcatcaggctagggggctttaggtatctacacctgcgggttctggcacagatgctcatcgggggatggagcgggggcgggcaaggcaggactggctccactgctcctgctccccaggtctgggtggggaggaacatgctgaggacaagcacccagtccggccctgggggccctggggaagcgtggggacagcagagacgcagtggtggtgtcagccaggctcattccagcaacctgctcttcacttaggaacggtggagccaggcaggtggggccttcacagtctgtagcctcttccccaaacaggcactgcccccaccaacccagatgcacacacccacaggctcacatttacacactcacagtcccaagtctgcacactgtgctcctcccatgcacacccatatctcacaaaccacccctcaggctcccagcccacccacagcctcaacactcaccaggctcctccccatcacagaaccccctgtgtctcttctcagggctcctcatcttggcctaccccttcctgaaggctcggttcaacctggaccacatcctgcctaccataggtgaggcctctccctgaccccagcagacccctctgccaaggactgttccagaccctttgtgtgctcgtctgtgacccactgtgtggctgggatgagcccatgtgtgagaccgcgctagctg

SEQ ID NO: 1444 - DNA, 2300 bp, Homo sapien
atttacatattgtctactgctttctctctacaaatgcaaaattgagtcataacaaagatcatgtgacacacaaagcttaaaatatttaccatctggcactttacagaaaaaaaattgccaactcctaccataggtaacaagaagggaccaggtgggggtctaaacctatgacaagactaaagacagaatggaagctcaaggccaggcgtggtggctcacgcccataatcccagcactttgggaggctgagacaggcaaatcacgtgagctcaggagctcaataccagcctgggcaacatggtgagaccctgtgtctacaaaaaatacaaaaattaggcgtggtggctcgtgcctgtagtttcagctacttgggaggctgaggtgggaggatcacttgagcctggcaggtggaggctgcagtgagccaagatcatgccactgcactccagcctggctaatggagccagatcctgtcgttggatggtgttcaaggctgtccctggaagtgtggtagtagaagtgaagaaagagagcataccctgagtttccttaggccctggaaacagttttactgggtttcagatttgtttgggaataaagagcatagtaggaaggactgtccaatgtgctaacatctttattggatgttaaagagatatttcgtgtattaagtaattcattcagattcactagagcccatttttgccagatactatgttagatgctggtaatgcaaagatgaaaaaggtaagtgcttgcctttgaggaataactggcaggatgacgtgatctgatagggaagaagagaagtcagaggaaggaggcagtgggtgggggttgggcacaagtcccacttggggcatgtggtttgaggtcatggtgaaacacacccaacttccagttagaaagcctttttagaaattttggctcagaattcagagttaaactgcattttcagggcttttccaccgagaaaaggggaaatgcatatttatttcatagggaagttgacaaagcaactttgacttgtatagctagagccatggtattaaaataacagtgaacatagagaaaatgaagtcatcagattgaaaactagcaataattatgtattcgacacaaaaccttgttcccattcatgccacctcctgctctcagcatctactttatctttcgggctctgtttcctcttgcctgtgagacttggacttggccactaagagagagagcccagctcatttctctaaaaacgtggatagcagaggagtgcctcgctctgtcacccaggttggagtgcagtggcatgatcttgggtcattgcagcctcgacctcctgggctcaagcaatcctcccacctcagcctcccaagcagctacaggtgtgtgccaccatgcctggctaattttagtatttttgtagggatgggtttcaccatgttgcccaggctggtcttgaacttctgagctcagtcaatccacctgcctcagcctcccaaagtgctgagattacaggcatgagccaccacacctggcctgtcaacttttatcttttgcctgagactcctcagagcagaggtgtcttatctctatcatccaggtccagttacatctttttgggtctggaatcccataatggaaacagaatctgaaaaatttcactcagacctttgttaaatcttccagtgcttaatggcagtggggatagagaggaattagaagccaccccttcccaaataatcattgctaataatttggccagcctgggcaacataacaagactctatctctacaaaaaatttaattcaaatgtctgattttaaagatgggaaacctgtgattgctgcgtgtatatctacttagtggggtaactcataggtttggggcacgttcagattgatctttctcttttctggtccttttaaagaagtcagcattttgatttcctttctatttctgctttttcaaggtttccatgtcagaggccaatggagaactgaagattgccacctacgcacaaaggccattgagacacttcgtgtagctggaagacaccaacttcctgacaggagctttatttcatttgggatttcaagtttacagatggtatcttctcaaaagttggaaaaacctataggtaagattgggtgtacattttagttatccttttagattacttcaaattgaaatgatctgatacatccagaggaaagggcgggtaagagaccgtggttttcagcacttagttagttagctaggaatagcggagctgccctggtacgactcagataacgcttagtagg

SEQ ID NO: 1445 - DNA, 2300 bp, Homo sapien
attctaaaagggtgctatttgcacacctcctataacagatcgctcactacctcctctgtcattggacagctcagactgttacaagtcccatgctttgggttcatggtcattttgaaatatgaccatggcagtgagagtagatttatcttagaactgtgtgacccaagacctgcaccttacatgagaatatctgtaaatacattaggaagctgacacaaaattgctttgagagattcacagagggatgcttaaagaagaatagacagaaaggaagagaaggggaaaagaaagagatagggcctcaatgatgcagataaaagagcacactcccatggggcaaaacctagtaacaaagggtcctgggaggtagagtggcagcttggttgagaagtcaggctgggctttattttcctgttggctcaaggtccataacaaagctgggcatagtggctcttccctgtaatcccagcactttgggaggccaaggtgggaggatcattgagctcaggagttcgagaccagcctgggcaacatggcaaaaccctgcctctaaaaaaattcaaaaattagccagtcatggtagtgcatgcctgtaatcccagctactcaggaggctgaagcaggaggatcacttgagcccaagcagaggttgcagtgagcaaagctggtgccactgcactccagcctggggaacacagtgagaccttgtctcagaaaaaaaaaaagaaaaaaaattccaaaacaatatttggagcagggacctaggtagtaagccatcctctccagcctggggcagagcatccacctattgagtaaaggatgccgcatcaccctcggctcccataaacactgcagcctctgaggtttcctgttgcctctcctccctaccccacagcaagctgtggaatatgtggtgaaataagccacagtcatgactagagctccacctgctttgggggagccctccttcctctgagcacccccagagccctcaaagatgttaactgaatttgattgccatgtgagggacatagcaactttgagaacctggaacataggtcctgaatctcttgggctattgccacaggcaacagggaagggaacaggccagcagggcctctgaagacttgaagcttggatcggcctccacggaaggtaatgagtgggagaagtcaggatacatcggggccctcaggttggaccgcaggattccagaagggaatgaacacagaagcttgatcttccgcctctccggccttcacccagattgggaaatctagcaaagtcctgaatgttcactaatattcccaatctccttccatcatacagatgaaaagacagccccgacaagacagggaacaaatgtttgtcaggtggatgatgggaagcaagtccctggggctctttaactagcttggcttaccaaatcctcacgataatcctgagacaggcagggaagggatgttcacctccatcactcggagtcagcgcctgaattaaatcccagtccacactctcatcctttctcatcgcagctgcagacttgggaaggggatgtggggagactggttgaggcattaacctatttacagttgtttttccccaagaaatgaacttttaaaagttttaaaaattttgaaatactggggataatgttgtactcaaggagaaactcttatggtgaaattctaggcactcagacttttaaagaaattgtacagaattggcccccgttttagaaaagactagcagcatttccccacatataaaaggcattttaaaattccttcctggcctgcagaagctctcagtacatgttaattacacctgtcgcgcccggcctcctaccttcccgggcttctccaccctccattcggaaaagaaagcgccggaggagctaagccccacccgcttgccagcaatctcccctctccccgcctcttccctgtcacgcctgcgcagttcgctcagctcgagccccctgccctcaggcggccctgggtagccatcagggcgcaggcgcagctccgccccctcaccctcctctctgatcgggcccaccccctggatctagcaccgcctcttccgcgttctcggaggagcgatctgcaggtaggggtgcgcgcgaccgctccccggcgggagccagcgaaggtaaaagcgagacctgcgaggtattcctccgagctaaatggggccggggtctgtgagtgagctcgtgtgcccggaagggggcagtcagggccttcacggctgcccgaggtcacgacgcgattcagctgcggagggacagcctaagg

SEQ ID NO: 1446 - DNA, 2300 bp, Homo sapien
gaggaggtagcagccaatctgaggatgtgtggtcaggcaggtggagggataagaaaacatgcagaggcaaaagagtgggggcgtgttcaggaatcaggaagaagcccagggtggttggtgtggggaggtgggaagtggggcaggaaaggtaggacaaggtgctgaatgccagggtgggggcctatttctaactgtcataaagggggccatgcaatgtggggagcccaggagccccgcctaattgcagtgtgagggattttggaagcacttgccccaagcagagtttaaaatggagatggcaaatgaagcgcagaaatctctttgctctggaaactggggtcccaccctggggacttctttgggtgagaagtcgaagagtcgggatggatgagatgacctttcacatctgtgagtttttttcaagagaacaagttcctgctgaatggcctgtttctactctccaagctgctctcattttaccagactgcccccatcctggcctgcctttgtgggttcaaggaaggacctttgtctcaaacagctccccagctagtttgacttcttgccagaagtaatacccctccccgaaatatgtgccatccctttgcttttacccaggtgtcacctggttcccaccctcccttccccaatcctgtcccagggttaccagagatgtgagaaaggacagtgctccagcgtcagaggtcaagcccaggctttggccataagcaagcctcagggtagggctaaaggctagagtcagggctcacacttgccagagcccaggtcagaggtcagccaggaaccagaatgcaattcttagcttatactcagccttagtgctcagtctaggggcaggggcagtgtgcttagtgggtggctaaattctagttttggtaggtacatgggtctgcatttcccagtagctcacacactcacagttgagatgagatgactcaggtcttagaaacctagctatagcagagtgacccaggacctggatgggctaaatccatggtgatacaggggtcacccagtaagccagtggtagagctgggactagaacccaggactcctgcctctgagcctagggccctgatcactgtctcccaaaatttgttctgaatctgggatccttaaattctaggaggcaaagtaaatttgcctgagctctagatgggccctcctgggtgcatctgactatactcttctacctcccagtgccaggcacatagtagttgctagaggaatgtctactgagtgtcaggtgcaacgggaggagccagtggcttgttcagatttggggctggaggaggctggcttgaggggaaggatctccagctgttgtcagaggaagcgacgccctcattggcctgccgccctccccctcctccagtgcttgcagccacactcagaagccgcccagctggcagcgggagggccctttcctctttcagggtgaaaaaaaaggaaaggacatttttggtagaaaagttccctgctgctccctgggaatccccggtggccggatggactacgggatatcccagaggaagccgaaagccacccccgacccccctccaccctgcccccagcacaatgctgcgaggctctcccacgttgcaccagctggccaagggggctcccagaggtcatctcgtccaagcccctgtctgctggtgggcctgcagggagcctctgcgacctctctcgtgaccaacagcaagtctgaggggcacctgtttagagcccaggcccagctctgcaatgaaagcagaaaagagacaaagcaagatgggaggactgtgggggcttagcaagggggactaacatagcctggaaagagggcggggcactggacctaggggctgaggacttagattccaggcagaggatgcagaggttgagcaaaggctgagaggtgacagggaaatgatgaattgggaagtcagagcccagatgataaggccttgaccgccagctcccctatgcccttgtccctggcagggtatcctcaggtccgagcccctggacagcagccccaggcccagctggccatggccctgtgcctgaagcaggtgttcgccaaggacaagacgttccggccgcggaagcgctttgagccgggcacacagcgctttgagctgtacaagaaggcacaggcctctctcaagtcgggcctggacctgcgcagtgtggtgaggctaccacccggggagaacatcgacgactggatcgccgtgcacgtggtggacttcttcaaccgcatcaacctcatctacggcactatggcggagcgc

SEQ ID NO: 1447 - DNA, 2300 bp, Homo sapien
aggagctgaggatatgggagtggataggacggtcccgatcccttattgggtcccgggacaagtgtgacgcagacgattctaggagggcaaagaaaccacccttatctagcagctcttgtttctgctccagaagaagccgagcgttttcccattttactgtctgggaacttgaggctgcctccttggtggaggtccaaggaagcaccgagagggcgggcagctcagttagtcctttgtccaaggggaagctgggagccccatatggactttccgggaaggtgggggcgagtgcgtctgtgtactggagtggaggggagtcccctttctccgcccctccccgccccgtggccgcggcgtggcggggccggggcggagctggcgtcgcccggggcaggagggcagccgcggccggcaggacaggcagacggacaggctgacaggagagagaacaggcactgcgggacctgcaggagaaaggcgatcctgtggctgggaatgtgaccccacggccagaagaggacccgtgagtgtgcgccgtgcccctgcggcctcgccgcgcaccccgcccgcctggcttccactttcatttcttcggccgtcctggcgtggcacagtccggaggagagtcccgcccgaaggcaggctggccgctgtcctgaggctggcgtccgaggctcagagcttcgaaagttgcgggggggattgtcggggtgggggagtacggggcagaggggaggggttggggggcgtgttttcggggagcggaaatgtcaggcgggctcctctgggtcctacgaccttcctggccctgggagctggtttgaggttgcagggaagccgggggtgggcgtgggtggctgcgcgccgcgaggagagcgtggagtcttcgcctctactttttctcttcgacctctgtcctagagagagtcccaggatggattctgggttcaaactggggccatcctctggcccagatcctgggccaggcccaaggagtggtagatgtagcctagcagggggctaaatatcagaaacaggtagggtcagcctgctgtcttcatttgagaagcccagatccgcacccagggaacgagcaaggcactgccactccaggagtgaaaggatagccatcactgggaaatgggggctaggacggggaacggcagtggttcagggagagacagaggttctgtgacagatagaaactcagtgagggcatgggggtggggagtgaagggagttaaccctgtggctagaagagcacctgccctgcacccaccccctgagcttacattttcctggaaagagacccaggccttgaagttccacaggagtaaggtggaactctagctcactggtcaggacaccccagttgctgtgcggagtcagtgtgttggggacaggaagcaggttgggctgtttggtggagaagatgcttccactgtccctccactcccctcctcttctctgtctccaccagaccattgatgagccagtgcaggaaaatggtcttttactcttggtcatgagctgagccccaccttatcccagttcccagttctgcttgtaacttgctatgtggacacaggctcctcaagtcctctttttaggcctcagtttcctcatctgggcctcagtttccccatctgtacaagtgagttgggccagctgatctatcagggctattttaactctaagattctagtctaagctttccttaaagcctgaacactgactttgtgccaggccttgtcctaagctgggggtgggttggggatggagtggagactgcaatgaccaaaagcagcctctacccaaggagaaggagatctgagttcaggagaggaggctgtgggaggaggtagcagccaatctgaggatgtgtggtcaggcaggtggagggataagaaaacatgcagaggcaaaagagtgggggcgtgttcaggaatcaggaagaagcccagggtggttggtgtggggaggtgggaagtggggcaggaaaggtaggacaaggtgctgaatgccagggtgggggcctatttctaactgtcataaagggggccatgcaatgtggggagcccaggagccccgcctaattgcagtgtgagggattttggaagcacttgccccaagcagagtttaaaatggagatggcaaatgaagcgcagaaatctctttgctctggaaactggggtcccaccctggggacttctttgggtgagaagtcgaagagtcgggatggatgagatgacctttcacatctgtgagtttttttcaagagaacaagttcctgctgaatg

SEQ ID NO: 1448 - DNA, 2300 bp, Homo sapien
cagcaacaggttcccttgttcttagcttctgggaggattcagctagtgggggaaacctggccagagatcagacggagggagagagggaggagagtgaggcctcttacttgccccctgtccttccctgtatgattgctgtgagctgggtatgcccctccaccttaggccacagcagcgccctcctcatagctcccactttcaccattccttccccacactcctgcagcctggggttgacagcctctgctcttgtgagccctttggtgatacactgtgtggtttccctacaccttgaccatacctgtaaataatgtcttcattaaacatacccattctgggtgttccatgtgcttcctgcaaataccccgactcttacaaagtccgtcagtccacaaccacattctcacttctgggtgactgagctgtgaccttgtgtatctctgtgtgttgtcccctttactgacctgtcagcacctgaggtcggcaaccaggtcagctttatcacccagtcccctgatctgatatgagtggagagttatactcaataaaagatattgattaggatatcaaataaataaagaagcatagtttaatttgctccataagcaagtgtttgtttataggggattcagggcagagagttaagagtcagacataaaaatacagagaactttagactggggcaaaaattggtgctcaacaaaagaacatacccacagttctatgagctgggattctttctttacttttattttaggttcaagggtacatgtgtaggtttgttatataagtaaactctgtgtcatggggatttggtgtacagataatttcatcaccgaggtaagcagcatagtacctgatgggtatttttgtctcatcctccctcctcccgccctccactcccaagcaggccccagtgtctgctgttcccctcctagtatctatgtattctcattgtttagctcctacttgtaagtgagaatatgcagtatttggttttctattcctgtgttagtctgcttaggataatggcctccagctccagcccatgttgctgcaaaggatatgatctgggttaaggatctagcgtgttctcatgtcatccagcaacagaaggtccagacacaagggaggtccagtgtgccatggtaaatgcccacctctggcctccagctctcccctacccgcatctactcacctcccacccctccagagtggcttctatggctaagctctctgctttgggcttcctaccctagaaagcctccaatcttccctcccatcccagacagagcagccaactggtccctgggcctgggggccacggtgtgcattgaatgctggtgggatatctgtctgtcctcgaaggaacccaggtggtagggagagcagatcagatcttgagtggtttggatttgtcagaaggaaggagggagagaaggtattctaaaatggaacagctgggataagggtctggagataagaaatggggtgactctgggtaaggagcaaggagaatcagcccaacctgagccaggccccctccctggtgaggagatgaagtttgtgatttgagcgctcttctggggcttgtccctcaggggtgaaggactcagctcatgattcccaaggcgttcatttattccttcactcacccattcattcattcatcaagtgggttttgagttcctgctatgtgccaggagctgaggatatgggagtggataggacggtcccgatcccttattgggtcccgggacaagtgtgacgcagacgattctaggagggcaaagaaaccacccttatctagcagctcttgtttctgctccagaagaagccgagcgttttcccattttactgtctgggaacttgaggctgcctccttggtggaggtccaaggaagcaccgagagggcgggcagctcagttagtcctttgtccaaggggaagctgggagccccatatggactttccgggaaggtgggggcgagtgcgtctgtgtactggagtggaggggagtcccctttctccgcccctccccgccccgtggccgcggcgtggcggggccggggcggagctggcgtcgcccggggcaggagggcagccgcggccggcaggacaggcagacggacaggctgacaggagagagaacaggcactgcgggacctgcaggagaaaggcgatcctgtggctgggaatgtgaccccacggccagaagaggacccgtgagtgtgcgccgtgcccctgcggcctcgccgcgcaccccgcccgcctggcttccactttcatttcttcggccgt

SEQ ID NO: 1449 - DNA, 2300 bp, Homo sapien
tgccagtctgttaaattatcccaaaccaacatgtccaaaaccaaactctgattatccatcctccaaagtctaccctacctacagccttcctcctcttcataagtagtatctctgtccttcgggttgttcaggccaaaaacctgcaagtcatccttgactcctttcattctatcacacccacactgactccatcagcaagatctttaggcttttatttcaaaatataaccaaaatctggccacttttttttatcactatcactttagtccaagtaccaccatctctcacttggattactgttccctgtagggtgaccaacatcctggtttgcccaggacttggggtgggttctcaggacatggggctttcaatgctagagccaagaaagtcctaggcaaactggaataaattagtcacccttgggagagtttccatccttgcctccacatatcctaaatcccaccagcagccagcatgatccttttaaaaagtagatcatgttactccactgcttaaaacatatagtaacttccgatctcattcgatttaaaatcaaagtccttaaccaaggcctaagcaatctaactagccctccctataccttcttggtctcatttctgctgctgtgccctcactcattcagactcaataacctcctcatcagggcctttgcacttgctgtttcccctacctggaaggctcttcccccagcattcccacattaccttcaggtctctgctcaagtgtccccttatctctatctctcttggcctgctgtttttctgcataccatgtagcatcacctaacattatatatttactgtctgtttcactccactagaatgtaagctcaatgaattaatataaacaaggatctaagaacttcagataatgataactgctataaagagaatgcaatagagtgatgggataaagactataaagagatggaggggttgtcatttaggtcccttggaggtgcttacatgtgaactgagcccttagatgatgaggaggcagccacatgcagatccacagagaaaacagcaagtgttaggagtgtgagccaggtatgggctggcatacttgaaggacttattcatcttccattacactgttcctcgcacagggcagggctcagggctgatctccatgagcataggttggattgagcagagttgaaggctctgcccctgtcccaggaggggcttcaatcagacaaaacccagacaagaaggacctgatgatgagtactgtcccagagagcccactccaggactggccctgttctgtgagcaggtgggacacagagatgttaatgtcactgtccctgaccctaggagctcacacctggttcagacggtaaggaagattgtggcatttgggttgagagaatggaaggagagaggattccaggggtcaaaaagggcctgaataaggactcttcaaggagtaatcctggtgtttctttgggagagaataggtcactgtggctggagttcaaggaggatgtcaggaagcagaggaaaaggaggcttgggaggcagctgccatcttgaaaagagctcagctgtcgggtagaacttgaacaagtcacataattactctcggcctcagtttccttatttgttagatgaggataatactgccacacagagtatgaagccgctcagtgtcctgcacatagcaacctcagtaaagagaagcttgctgctgtgattatagttgatgaaaagaccttcgatgctgaaggacggactactacatcgagtgcctggcactacagcgagtgccaggggcaagcaccgcgaggacatggagatccgctggctttagagaacggacttggcgcgcagaggctgctggtcccagagggaggaagggcgttgaatttgggcagcctccctggaggaggcgggccgtggcatacacagggcggcgagagcgcgcagtgccggggccagagcggcgcgccccctcctccccgccccgcctcgccgctatcccgcgcccggaaccttgggcgcgcggaacctcggtgccggagcgcgggcgcggcgcactcggagcgggatggagcgggcgcgcgggccgcgggccgaggccgacgcgcctgaggaggaggaggaggcgggggcggccatggctgctgtggtggtggcggctgcgggtggcgcgggaccggcggtcctgcaggtggccggtctctaccggggcctgtgcgcggtgcgcagccgcgccctgggcctggggctcgtgtcacccgcgcagctgcgcgtcttcccagtgcgccccggctc

SEQ ID NO: 1450 - DNA, 2300 bp, Homo sapien
agagacctgaaggtaatgtgggaatgctgggggaagagccttccaggtaggggaaacagcaagtgcaaaggccctgatgaggaggttattgagtctgaatgagtgagggcacagcagcagaaatgagaccaagaaggtatagggagggctagttagattgcttaggccttggttaaggactttgattttaaatcgaatgagatcggaagttactatatgttttaagcagtggagtaacatgatctactttttaaaaggatcatgctggctgctggtgggatttaggatatgtggaggcaaggatggaaactctcccaagggtgactaatttattccagtttgcctaggactttcttggctctagcattgaaagccccatgtcctgagaacccaccccaagtcctgggcaaaccaggatgttggtcaccctacagggaacagtaatccaagtgagagatggtggtacttggactaaagtgatagtgataaaaaaaagtggccagattttggttatattttgaaataaaagcctaaagatcttgctgatggagtcagtgtgggtgtgatagaatgaaaggagtcaaggatgacttgcaggtttttggcctgaacaacccgaaggacagagatactacttatgaagaggaggaaggctgtaggtagggtagactttggaggatggataatcagagtttggttttggacatgttggtttgggataatttaacagactggcaaggagggatgtcaaccaggtatttgggtatgagtctaaagttctgaggagcattccaggctggagagatacagttgcgtactgtcagtgtatagtgatatttaaagccaggggtctgggtgagataactgatggaatgaatgtagatagagcactaagaactgagccctagacatgcctacatttagagatcaggggaaaagggagaaaccagcaaaggagactggaaagtaggggccagtgatatacgaggagaacaagggtaagtggaccctggagagaattctgtgctaaatagttccctaagtcacacattggaggactataaagaggggagtcattaaaatggtgctaagaagctgagctacaagcagtggtgcaacatactgggaaggctgacttaagcttaattagggaagggctttctaactgagctgcccataaatgcatcaagctgcctcaggaggtggtgagcaagttcctgactcaagtgagtcttgagtccagggagattagttgctgtgtggggaaaaatctacccccaggagtcaagcatggccctgatggtgggatcagatggtggagatgaactagacaactctcaaagtttcttcaaattggcgatgatatgattctgggcagtctgtcacagagtaggggggctgagctgagtcttgaaggatgagcaggtgttcagtggtggaaaagtgggcaggggcactcctgggtgaaggagcagcatgggcacacctccagagatgtgaatgagcagggtctgttcaggagtacggactaggcaaaagggaaaagtgtgtggaggacgaggagggaagtaaggctggaagtagatgcaggccagatggtgggaagccccacagggcctggggcctgggaaacacttgtcagcacttgaaggaaggtaattaaataaaagacagattgttggagccaaagaaggaggtattgaccacttggttcccttgagcaggtttcttcctgccaacttggttagatactttttgagaacagggctgcccaatgctgtgtgttccttgttacattcctcactggggacaggtatcccatcaaccgttccctaaagaccagcaacatccgtaagtacctgagggacaatggcccttttctggggtctgctctgtgggttcaccataaggggtaggtacagacaattcaataggtgaaccagtctctgatggaagtagtagtgacattccacccaaaaaatgccactggatgaagtcccctccttccattaacccaggaccacttcacaagcactgcccctagaatgcccaattctcagaacccagtgacctctcctttagagaacaaagggcctgggcattctggagactctgattggctgggcagatgggctgactggctgggcagatgggtgggtgagttccctctccccagagccatcggccaggtaccaaagctcagctgtatggattcccaacaggaggacctgcgcttccctgggagtaagtgctcctccagtccctgtcactggacttgtgccttagggcttggggacaaa

SEQ ID NO: 1451 - DNA, 2300 bp, Homo sapien
gagatcctgccacctaaacttctgttctctgaatatgccaagctctttcctgtactgggacttttggtctagcagttccctcttccctgaaataggcttcatccaatcttcatatgattaattctttcttactattcagatctcagtttaaattttatctccttacagaggcctcctcagaccgatcagtctaaaagttgctacccagtcactcctgtcaagttactttattttaatttttttctagtgcttcccactatctgatatttttctatataaaagtgtctgtctgcttgcactaaaatgtaaacaccacaggatccctgacatctgtgttgttcaccagtggtgaataatagggtccagtagtatttgttttattagtgagtggctgaaaattcatcttaagcctctgaacttttgccttctaaaagaaaagagggaaaagagaacttgagttcccgagttcccaggctccttaccagactccctgtctcagaccaagctactactacttactcagggagctttgtttaaattaaattctttgcatagccggacatggtggctcatgcctgtaatcccagcactttgggagaccaaggcaggtggatcacttaaggccaggagttcaagaccagcctggccaacatggcgaaacccctatctttactaaaaatgcaaaaatttgccaggtgtaggggcatgcacctgtaatcccggctactcaggaggctgaggcacgagaatcacttgaacccaggaggcagaggctgcggtgagccaagatcactgcactgtactccagcctgggcaacagagcaagactgtctcaaaaaaaaaaaaaaaaagagagagagagaaaggaaaaaattcttagcacagtacttattacaatctgatttcttttctttgtttttctgtcaccttttactaggatgtatgctccatgagagcagagcttcatggtcttgtttgcctctctgctgtctccacaatgactgcagcagtgtctggcacagagatgccaaacatttgctaaaggaatgagtagggaatcaggttctgttttgtcttacaccccccagtgcctaccactgtgcttggcccataacaagtgcccagaaactggtgggtactctgaggccactctgaatataattgctattggtagatctgtgttctcatcctagaatttagaatgggaaagcggtttagaactaagagtctttcaagtgtttcgagccaaactgcaaagcttttagaatattgtctctgcagcctgaaactgactattacacaggttcccccagttcccattcaagagcgaagtctagatgtttagaattctatgcctaaatagcagaacggaagcctcattttattttgattaaattcctattttaatacatacattgcatcagtcagtgagtcagtgagtatttattgagccccttcaggatacaaagtagtgctctggtagagctattgagtttgaaatattagtcacatttttaaaccaaaaccaaatccccaagtagttgaaagtgctgttcaaattgtcagagtgcagttcctgtagactgtattttgtgagatgggcttttactttatatgttcccacttgggcaggaacaaaagtttggtaaattactgaggtattacattttaccaaaatgaaattttgaagtgatccttcatcattagctttcttcctgtccaattgttgagggagtgtgtgataattacagcatcttttgagtaatttaagattttgggatcttgtgctgccaggacagggtaaagaataacacttgccttcactctttgacactagtgttcaaattgggcagggaaagaaggggtattattgttgcctcccagatcccaactctatccaaagtactgtctcctttacttctgtgagctgacagggttgcagaaacacataaaatcctagactatcttgacatcaccaaccgtagagtttgtgaaggtaacgtgtcctctacaaattctcatttgttttcattgtttgttactcttttttgttcagatttctctgttgacttctgcagtgaaccacctcaaagccaatgttaagtcagctgcagacttgattagcctgcctaccactgtagagggacttcagaaggtaggtgccatgtgtgggtacagagacttcagaaggtaggtgccatgtgtgggtactatttgccataattctagcttcttataagttttcattgaaagcctagcatttgaaatcagctgctccaagagggcagtaatggagtgta

SEQ ID NO: 1452 - DNA, 2300 bp, Homo sapien
accatattggccaggatggtctccatctcctgaccttgtgatccgcccacctcagcctcccaaaatgctgggattacaggcgtgagccatcgcgctggcccagagtgaatttttttttttttttttttttttacggaaaagccagagtatgctacctctcagcttaaagcccccagtgctttcccaaagtcctttcagtgatccataaggccctaaagccctggcctctgatgcttctctgacctcatttcctatcactctgctccttgctcttctggtccagccacaacaggtcttcctggtcactccttcctgcagccactgcacagctcattccctcacctctcctccgataagctgactaaatgttcccttttcacagaggcactccccatcacctgaccgtgtttcaattttcatcataacacttatcacctcctgacatttaatatgtttgcctattgttgctctcctccctctagagtataaataaactgcaggaatagattggcagataagatacacgatgctcagttaaacttgcatttcacatacacaatgaataattttttagtgtgaggatgtcccagatgttgcatgggatgtcttaatgctaaaaaattgtttgctgtttctctgaaattcaaactttactgggtgtcctacatttttatttgctaaatctggcaacactatacaggaagacaaggaccctggttattttgttcatggctgtatccccagcgctagaacagctcctgacacgtagtaagtaagctctcaataaatatttattgactgaatgaatgtgttaattaatctgaaacgcgcctaaacttttaacagcctgtgtgagagtcagagaggcggagccttcagacttggttagtccagggggcgtgggcggctgatgaactttcgaagtaggtcgagcagccgggcgctttgcctgccccgcccgcgctccgcaggatgcaggactccacccggctcaggttcgcagcaggtcccggaagccctcctgggggcggggccaccctaatcggcaggtgggacccagccccagccggggcagggcccctttaacgccccacctctccgccacgactttcgccccggcgtgacgtcaccccagcgggcgaccaatgggagtgcggcttactggcaggcggcgcaggcggccgctgccaaaggggaagtgatctggggctggagcgatggcccggggctggagctcgcggccgccgccgccgcagccgccgccaccaacgccaacaacaacgtgtcgggagcagccgcggccgaagccggagcaggggccggagtcgcggctggagtggggcctgcgcgtgtgagtggccgagagttgcccgtgccggagacctcaaactccgggcgggagcgctttcggtcggccgagccgccgtcgcccgcggcaccgtgtccccaaggcccagacagcggggcgggggtctatcaggcgcgggactggcttctctcaggccgacccttctagccgggctccggatcttcctcggcctcgggcccccttcacgttcaggacggaggccggagaacggtgatcatcacacaccccagccggcttcctggccagggcattttctctgcggccaagcagtgttgggattgtagctgctgggagccccctcctgccgccacctctcctgcaaggaagggactgacgcgttcccactttcttactctgcacctccccactctcttcccattcaagaacgagtttctcttccctctccattggaaatcttgctccggaggtccgaaacacgtattttaagcgtgcccttcctcacctcctggagcacccttagaagtattgcctacttatccgggctgagaatccttcatttttgacctggcttttttttcgccctttgggagataaaggtccctctccaccctctactaacactctgcacccaaggccttatcctttggggtcaccagctccttggccatttctatgtgatttcccccacccatctgagttccagtttcctctgggctccaatctccagtccctggcggatctggtcagtcccacccctaggtgggagtgaccagggggctctggcccaggattcccaaccctggaaggcagctccaaggcaggaagagaattgggcatcgggtacgaacctggcagctcaggagtcggggctccactcaccccacacaaaaagatgaaaaagcgcaaagagctcaatgcattgattggtttggctggggacagccggagaaagaagcccaagaaaggccca

SEQ ID NO: 1453 - DNA, 2300 bp, Homo sapien
ctgcccacttatgtagtcatcacatatttattgggtcatcgttatttaggagtacacttctgggctagacacttaaaaacaaatcagatacaggcccaggctttgcgagaatccttggacaaaagcagcgtaattgccacagtaagaatatgggcataaaaattactttaagtgactttcttccaagtagctcaaagcactttgctttaaattccatttatatctgatgacttcccaattgatatttcaggccccaacctgtgcccagagaactctcaatgggtataccaaacagcctccatttgaatattgaattggcttgtcaaacttgtcccaaacttgctctaccccatctcaataaataacaattccttgcttccagtgtttccaccgccaaaccctctcttctcttcacacctttcatctaatctatcagcaaaaattgtcagctctgtcttcaagaaacatccagaatgctctccatctctgctactgcctctctaatctatcagcatcatctctagctggactgtaacaaactgctctcctgtgttcctcactctccccccacttttttctacaaagtagccagagtaattttttcctttattttattttattttatttatttatttatttatttatttatttatttatttatttatttatttatttttgagacggagtctcgctctgttgccagactgaagtgcagtggtgcaatctcggcttgttgcaacctccgcctcccggtttcaagccattctcttgcctcagcctcccaagtagctgggattacaagcgcgcaccaccacgcccaggtaatttttgtatttttaatagagacaaggtttcaccatattggccaggatggtctccatctcctgaccttgtgatccgcccacctcagcctcccaaaatgctgggattacaggcgtgagccatcgcgctggcccagagtgaatttttttttttttttttttttttacggaaaagccagagtatgctacctctcagcttaaagcccccagtgctttcccaaagtcctttcagtgatccataaggccctaaagccctggcctctgatgcttctctgacctcatttcctatcactctgctccttgctcttctggtccagccacaacaggtcttcctggtcactccttcctgcagccactgcacagctcattccctcacctctcctccgataagctgactaaatgttcccttttcacagaggcactccccatcacctgaccgtgtttcaattttcatcataacacttatcacctcctgacatttaatatgtttgcctattgttgctctcctccctctagagtataaataaactgcaggaatagattggcagataagatacacgatgctcagttaaacttgcatttcacatacacaatgaataattttttagtgtgaggatgtcccagatgttgcatgggatgtcttaatgctaaaaaattgtttgctgtttctctgaaattcaaactttactgggtgtcctacatttttatttgctaaatctggcaacactatacaggaagacaaggaccctggttattttgttcatggctgtatccccagcgctagaacagctcctgacacgtagtaagtaagctctcaataaatatttattgactgaatgaatgtgttaattaatctgaaacgcgcctaaacttttaacagcctgtgtgagagtcagagaggcggagccttcagacttggttagtccagggggcgtgggcggctgatgaactttcgaagtaggtcgagcagccgggcgctttgcctgccccgcccgcgctccgcaggatgcaggactccacccggctcaggttcgcagcaggtcccggaagccctcctgggggcggggccaccctaatcggcaggtgggacccagccccagccggggcagggcccctttaacgccccacctctccgccacgactttcgccccggcgtgacgtcaccccagcgggcgaccaatgggagtgcggcttactggcaggcggcgcaggcggccgctgccaaaggggaagtgatctggggctggagcgatggcccggggctggagctcgcggccgccgccgccgcagccgccgccaccaacgccaacaacaacgtgtcgggagcagccgcggccgaagccggagcaggggccggagtcgcggctggagtggggcctgcgcgtgtgagtggccgagagttgcccgtgccggagacctcaaactccgggcgggagcgctttcggtcggccgagccgccgtcgcccgcggcaccgtgtc

SEQ ID NO: 1454 - DNA, 2300 bp, Homo sapien
tcagaagagacaaagaaggccattacataatggtaaagggatcaattcattaagaagagctaagtatcctaaatatatatgcacccaatacaggagcacccacattcataaaacaagtccttagagacctacaaagagacttagacttccacacaataataatgggagactttaacaccccactgtcaacattagacagatcaacaagacagaaagttaaacaaggatatccaggaattgaactcagctctgcaccaagcggacctaatagacatctacagaactcttcaccccaaatcaacagaatatacattcttctcagcaccacatcgcacttatgccaaaattgaccacatagttggaagtaaagcactcctcagcaaatgtaaaagaacagaaattataacaaactgtctctcagaccacagtgcaatcaaactagaactcaggattaatgaactcactcaaaaccgctcaactacatggaaactgaacaacctgctcctgaatgactactgggtacataatgaaatgaaggcagaaataaagatgttgtttgaaaccaataagaacaaagatacaacatgacttgctttttaaatggtgcactcaatgtctcgatcctataaaatgaagcacaaatgtgaaatttcaggaagtgtgacagaccaatggagaagacacttttggagttctttcattgtactctcttcttgctttctctgcctatgggtaagattggacattatgtctccccagcagaggaggaggcttggtctcttgtgccagaggggataaggcagccatgttgatggcttatcattctctgaattagaacctgtgatctgagttctgagatttgagatccaagtccacctgattgctggtttttttcctgccacctccctgccagactgtccttgctcttatcttgctgggaggctgacttctgcagactgactccccaggctccttgccatttcacttctgattggcttggctgattggagacactagtaggagatgggagatggcagatgaaagagtttaggacatttttgctctgttcttccactgttccagcatcacttctctcgcactagctgtgttccccataaatacaacccccaccaagctacaggatcatgattttcttcccttcttcctttagtcctggggtattgatgcatttcttgttgtttcaagtctctgcatgccacatcatatcttgtttgatttctttaatctgcctgcctctgcaaataacataccctccccaggcaaggcagtggtctgagccaaacttgttcttccacagaagcctgggctgtggcactgggagctgccaatttcttgctgtgcaactttggatatttccctacctctcttgagcttaagtggctccatccagccaggagggattgaatttgatgacctctcatcaccctgaaagttctatgttcctaagtgtcaaaatggcactattgttttaggggtggagttggcccctttctgacctggtatttcccttttggggctagaaccttgtctctgaaggtgcctcacaaaaaagaactcaaagcattgcgagcctagcataaatgccagctctcttaagggttcacattgaaggggacactggaagctttcttgagagaaagcataggcaagctgagcctcagcttcattatctgggaaatgggtataaaatgtgagtgcctctgacctccttgctgtttgggttaaatgagatagtatgtaaaaagtgcctgaaacattcacagtgcttgtatgagaagacagtggttattatgctgatgattacaccaagaattgccatctgtttgttctaaggaatcaaggtgggatacccattgcctgttttttttggagtccactattaggtttctctttagctgaattttgggagaaggccactaggctctctcctctgttgtttgcagttttggaggttgctgtctccgccttatggcactcagcccagccttggctgctgctggctgcagggagtggctagggctggacgctgacaagatgcatgggtccagagtataaaggaacccaggagcagctgaaggcaggtcagatgaaggctaggtggctggaactgcaaccatggtgcccagcttcctctccctgagcttctcctccttgggcctgtgggcttctgggctgatcttggtcttaggctttctcaagctcatccacctgctgctgcggaggcagacgttggctaaggctatggacaaattcccagggcctcccacccactggctttt

SEQ ID NO: 1455 - DNA, 2300 bp, Homo sapien
gaagcatatgggggagggcctgcagaattataggtaaactttagtttggttccagagccattaggttgctctggagacaaaggctgcaaagttttgaagagggaagaattagcatatatatggtcccaggctgtctgagttggggccacgggagctacaagtaccagctcttcatgaaaaaaaataagatcatcagggagtgaccttaagccaaagtcactggagttagatattgaattctcaacatcatcaggtggggaaggagtaggcaaagggagaggctgatcagataacgaaggccatgcaggagaggaaggctgaggaacagatagagagtcacaagattcagaaaattgtggtaactgcagggggtaatgggataggtatgtcattaggacagcacatgccaaggcccattcaccccacacagggatgagaacataaccccctgtggggatcagttcctggaatgttgcaccaacatgatcccatagttgtacatctaagattcctttttcaggaaaccaaggacagtgttcttccactgccctgaatggagtgaccatattttccatggacacttgaaccccctcctgttttaacaggagtttaatatagcagagataagcataatgtttagactccgtgtgacccatagttaacccagacaatacacagacagactcatcaatcatcacggagccgaacaagtgtttctgtggactgaaccaacgaacgtttctctgcacctaccaaagggaatcgggttcccacatgcacttaggaaaaagaaaaaccatgttggcacactagatatcaggggaaccagcccccagtatttcaatgtaggttctttctattttccctaagtgttggccagtctgagaaataaagagaaagagtacaaagagagaaattttacagctgggcctccggcagcgtcatcacatattggtaggaccatgatggtgaccccaagccacaaaaccagcaagttttcattagggattttaaaaggggagggggtgtaccaacagggagtaagtcacaaagatcacatgcttcaaagggcaataaaggtcacaaggcaaggcaaaattagaattactgatgagggcctatgtcccactgtgcacacattgtcttgataaacatcttaacaagaaacaagattcgagagcagacaaccagtctgactagaatttaccaggctggaattccccaatcctataagcctgagggtactgcaggagaccagggcatatttcagtccttatctcaactgcataaggcagaccctcccagagtggtcgtttatagacctacccccaggaatgcattccttccccagggttatcaattattaatattccttgctgggaaaagaattcagtgatatttctcctactcacatgtccatctataggctctctgcaagaagaaaaatatggctctattctgcccaaccccacaggcagtcagaccttagggctatcttcccttgttccctgaaaatcgccattattctgttctttttcaggatgcactgatttcatattgttcaaacacacatgttgtacaatttgtacagttaacacaatcatcagagggtcctgaggtgatgtacattctcagcttatgaagataacaggattaagaggttaaagacaagcataagaaattataagagtattaattggggaagtgataaatgtccatgaaatcttcacaatttatgttcagagactgcagtaaagacaggcataagaaattataaaagtattaattttgggaactgataaatatccatgaaatctccacaatttatgttcttctgcctcagctccagccagtccctctgttcagggtccctgacttcccgcaacaggtatgagctgtcatgcacatggctcctatctgaaaatctagttcttctggaatctggaactgctgggcaacatctcagcagttttcaccctgcagacttaattagcttcctcttccttatgtaccctctcttaatatggtattttgaaagcccagtgttgcccagggggcatctcctttgggtttatgagagacctgcattctccctggcccagttctctcaggctttccagagctcaggacctctgagaagaatggagccctcctggcttcaggaactcatggctcaccccttcttgctgctgatcctcctctgcatgtctctgctgctgtttcaggtaatcaggttgtaccagaggaggagatggacgatcagagccatgcacctgtttcctgcaccccctgcgcactgg

SEQ ID NO: 1456 - DNA, 2300 bp, Homo sapien
catatgaaatttaaagtagttttttctaattctgtgaagaaagtcaatggtagcttgatgggaatagcattgaatctataaattactttgggcagtacggccatttttactatattgtttcttcctatccatgagcatggaatttttttccatttctttgtgtcctctttcattttgttgagcagtggcttgtagttctccttgtagaggtccttcacatcccttgtaagcagtattcctaggtattttattttctttgtagcaattgtgaatgggagttcactcatgatttggctttctgtttctctattattggtgtgtaggaatgcttgtgatttttgcacattgattttgtatcctgagactttgctgaagttgcttatcagcttagggagattttggactgagatgatggggttttctaaatatacagtcatgtcatctgcaaacagagacaatttgacttcctctcttcctatttgaataccctttacttctttctcttacctggccagaacttccaatacaagcgaaaaacaaacaaccccattaaagacacagacacttctctaaagaagacatatgagcagccaaaaaatatttttaaaaatgctcaacatcactaatgagaaatgtgaatcaaaaccacatctcacacaagtcagaatggctattattaaaaagtttcaaagcaacatatgctggctaagctgcagaaaaaaaacataatgtgtatacattgtttgtggaaatgtaaattagttccgccactgtggaaagcagtttggagatttctcaaagaacttaaaatagaactactatttgacccagcaatcccaatattagctatatatcaaaaagaaaataagttgctctaccaaaaagacacctctactcatacattcatcacagcactattcgcaatagcaaagacatggcatcaaccttggtgcccatcaatggtggactggataaagaaaatgtgatacatatacacagtggaatactagacagctataaaaaaataaagaaatcatgttctttgcagcaacatggatgaattgggaggcaataatcctaagcaaattaacacagcaacagaaaaccaaataccgcatgttctcacttataagtgggaactacattttggatacttatggacataaatatgggaacaatagacactggggactactaaaggggtaggtacagatatgagtaagcattggaaatttgactaatatataccatactcactacctgagtggcagaatcatttgtatccaaaccctcagcatcacacaatacaccagtgtaaaaaacctgcatacgtacctgaatctaaaataaaagttgaaattataaaaagaggaaaaaaagaatgctcatgcacagatatgcatgtaaaaatgccagggagggttaattcatagcaacagttgctatttaacctactttacttgaggttggcaaagcaatcattttttaaatattaatttctgtttagtacagattgtccttggtcaggactcctaaacagagtgcaaagttctgattgtgtaattacatactattgtagggtgaaagagaattggtaaacaggctcctgctgtgactatagtactagactgaagtaggactaaaattgctctaggacttactctggtagaaaaggtagacctatcaataggggaaaaagtcatacctaacatgatgtagaatttttttaaattgtcatgtatatgaattgagaaaaaaaatcatgctatgcatattatgagaccagtttccccaatggaataaaataaagtacttgaacagctgctatattagcatctgtttgtccatatcatcatccagttactagaaagacataattcccactcttcactcaatatatagatggaagtggtttttatggtaaataaaattagatttgcaataagacaaaagtaatgattcagggcttggttaatgttaagtttaaatgtacatatcatgttgagaattttctttgaacacataacaaaaaaaaagtgctactgaatgaacattattgcaatgtagtaaagcagaatgcaaattccttgaggtcagcattcaagtctgttttcctcgcagcggtgcccacacacctagcatactgcctggcacacagtaaatgctcattaaatatttgtgaggtacatggacaggggaatgtggtagacagctgatgaagcttttctcccactgttgccctaggtggatcatccatagtcaattgattctgaactctgaggtccaagttctgccctcct

SEQ ID NO: 1457 - DNA, 2300 bp, Homo sapien
aataagcatactgcacaaagcaatatacagggtcaatacaatccttatcaaaataccagcgacattcttcacagaaatagaaaaaaattcaaacattcatagagaaccacaaaagaccccaatagtcaaagcaatgctgagaaaaagaataaaactggaggcatcacgctaccagacttcaaaatatatacaaagctataataaccaaaacagaatagtcctgggataaaaaagacgtagaacaatgcaagagaatagagaacacagaaattaatttacatatccattgtcagctgatttttgacaaaggtgccaagaatagtcattgggaaagtacagtctctttaataaacagtgctgggaaaactggatatccataagtagctgaatgaaactagacccctatttctcacccctatttctcatgcaagaaccaactcaaaatggattaatgacataaatttaagaccctgaaaccataaaactactagaataaaatggggggaaaatgcttcaggacattggtctgggaaaaaattttatgaataacacctcaaaagcaatggcaaccaaaggaaaaatgaacaaatgagattatatcaaactaagaagtttctgcatatcaaggaaaataatcaataaagtgaaaagatagccaggagaaaagatttgcaaactactaatcagacagcagattaatatccacagtatacaagaaactcaaacatctcaactcagaaaaaaatctgattaaaaatgagcaaatgatctgaacagatatttctcaaaagaggacatacaaatggtcaacaggtgtatgaacataatgctcaacatcactaatcatcaaggaaatgtaaatcaaaagcacaatgatatatcatatcccagttaggatgattgttatcaaaaagacaaaatggcaacaacaacaaaaacaacactaggaagaatgccaaaaaaggaaactcatatacactgttggtgggaatgtacagtagtacaaccactggagaatgacatggaggtttctcaaaaacctacaaagagaactcacacgtgatccagcaattttcctgctgggtatttatcaaaaggaaagaaaaggaaggaacatcagtgtactgaaaggatatctgtaccttcatgtttattgcagcatgattcacaagaatcaacatgtgaaatcaacccagtgttcaacaacagatgactggatgaagaaaatgtaatatatacacacaatggactactgtttagccataaaaaaataaaatgctgtcattgatggcaacatggaaagaactggatgacattatattaattgaaataagtcaggaaaagaaactgcatgttgtcacccttatgcagaggctaaaaatagttgatgtcatagttgtaaaaggttagtagagtctgcagaggttagtagagtctgggaagggaggtgtagtgagagatttttttaaaggacacaaaattatagctagataggaggaataagttttcatgggtatagcactgtaggatgactatagctaacaacaatatatgttttcaaatagaagagagcatattgagtgttcctaacacaaagaaatgacaaatgtttgagatgatggctatgctaattgccaatggtcgctatacactgtatgtatgaaaacatcaaaaaatacctctaaatatgtacaatgattatgtgtcaatttgaaaaatattttttaaatgtgttgaatgatacaagggtggaatagagataatttctctattgcacaacaagcaactattacttttataaagaaaatgctttaatgtggacaagaaagtgctttctggctgcagtgcagtagagagttggtggcaggtgtgaggtggaagcaagttggctagtttggaggttgttgagctaaccccagtgtaagaagagggtggcttggacttagaacagtgggtgtgaggctggagtgggcactgaaaccagagatgtttaggagagggaggtacaggagtgggagggaagctcccacagactgcctgggcagtctcctcccctgccctcccagagacttcgggctttagtggtgatactggattcctaagtggccttggccttctgttatttcagatccagcagatggggagactgaacaaagtggtatcctgggcccaccagtttttctacactcacccactctggtttgaaccgttcactggcttccagaacatttgagcccaactatgtcaaagctgtgtgtagccacaggggtgaggtgttcttgggagagctgctcttcctg

SEQ ID NO: 1458 - DNA, 2300 bp, Homo sapien
gtgtctggagcataggatgtatttctgtacaacacatttttgtccttgactatgaactcttcaaggcagggtcagtacctgttatctctcttttcccatcacactgcacaggacttgacccacagaggtaggcttaataaacacttttatatttgaatgaagttgcttaggttttgaaaaatgaataaaatcgaatggaatacagtgagaataattcttagttctgagctagaaattgagcttagggatgctctcctgtcctctagtggcagtgacatgattggcagccaatgcttaggaggaagttctcatcctgggataaaccaatgcctaaaaattactgtctgtaagaacaatttgcttgaagcctgtcctgtgaaattggagtcatcattagggaatttacagaattacttatttagaaaaaccttgtttctactgtttacatccttttttgcatttgtacttcaaaggaccattcctgcagcctttgagaatttctaaagcatccattttggagtgtatgtgtccagctgaatagctcattcaaatgtgttttatgttttacacaacaggatccttcaaatgctatgtgttatatgctaaaaagggagttttcctcaaacacggtttattgtcctcattttggtgtttctgccaatattgtgatatgtggactattggactatgctatagagatcccactgcatctaaacaattttgtcaaattaaaaagtagttataaatatgtgaatattataatgcagtggacatttgtttggcaagacagatccagaggcatgtacacaagagggaagagctgctacagctggagtgtggtttctctctcacttgatctccctagaatcacctccatcttgtcagggtcatataataggaagtgaactttgcgccccccacagcaagtgagaacaggatcacagaaatctctctttgggtagattcagaaatctacccatttctgaaattgttttagctcctggtctgttggtttctctgtcaccaagagaaacacagatcaatgaaaactttcatttagttctcatcattggattggagtaaagggcaattgatcacagggagatcattctgaatcaatcagcagaagttagaaatttggaactgtttctgtggacctggaaagtgatccaggctcctgctgtctcccggcacttaacttgagccagaaattgtccccatattgggtgaactgtatggctcagaggagctaccggtgtcagaaaccacaggtccctgcaatttccatctcctcttaattgttggattaggccattcttgaattaccataaatacctgaggctaagagtaatttatttttaaaaaatatttaattggctcatgattctgcaggctgtacaagcatgatgccggcaactgctcagcttctggaaagacctaagggggtttttactcatgtcataaggcaaagtgggagcaggcacatcacagggcaaagccaggagcaagagagagagtagggtggggaggtgccacactttacaacaaccaggtctcacaagaacttactcactattgtgaggacagcaccaagccgtgaaggatctgcccccataacccaaacacctcccgccaggacccacctccaacaataggatatttcaacatgagatttgagcagagataaatatccaaactatatcattctacccttccctctccaccgtccccgccaaaaaatctcagatccttctcacgttacaaaatacaatcatgccttcacaacaggtagctaacagtctcaacttgagccaagaaaatggggtctggagacagagaacataaggctaattcatgctggcttcctagaactaaatcaaatggaaacacttcagctatgctaggaaatatcttctccatttacatagggtgtacacctagtaaatgtctttgtaactttatcctcttcatttacatagggtgtataccaagcaaccaatggaaacctgtaaagggtatttaaaccccagaaaattctgtaacggggctcttgagcccctgtgctcggggccgctcccatcttgtggagcgtactttcattttcaatagagctttgcttttgttgcttcattctttccttgctttgtgtgttttgtccaattctttgttcaagacaccaagaacctagacaccctccaccagtaacatattctagtgagccagccaggaggtaagcccaaagtttgggatttatttttcaccttttcctttctgcttcatacaaaggaatctctccctct

SEQ ID NO: 1459 - DNA, 2300 bp, Homo sapien
atattgttatgtgtgaatttgatcctgtcattatgatgttagctgtttattttgctcattagttgatgcagttttttcctgcccttgatggtctttacaatgtggcatgtttttgcagtggctggtactggttgttcctttccatgtttagtgcttccttcaggagctcttgtaaggcaggcctgctggtgacaaaatctctcagcatttgcttgtctgtaaagtattttatttctccttcacttatgaagtttagtttggctggatatgaaattctgggttgaaaattcttttctttaagaatgttgaatattggcccccactctcttctggcttgtagagtttgtgccgagagatcagctgttagtctgatgggcttccctttgtgggtaacccgacctttctctctggctgcccttaaccttttttccttcattgcaactttggtgaatctgacaattatgtgtcttggagttgctcttctcgaggagtatctttgtggcattctctgtatttcctgaatctgaatgttggcctgccttgctagattggggaagttctcctggataatatcctgaagagtgttttccaacttggttcccttctccccatcactttcaggtacaccaatcatacatagattcagtcttttcacatagtcccatatttcttggaggctttgttcatttctttttattcttttttctctaaacttctcacttcatttcattcatttgatgttccatcactgataccctttcttccagttgatcgaattggctactgaggcttgtgcattcatcacgtagttctcgtgccatggttttcggctccgtcaggtcctttaaggacttccctgcattgggttattctagttagccattcgtctaattttttttcaaggtttttaacttctttgccatgggtttgaacttcctcctttagcttggagtagtttgatcatctgaagccttcttctctcaactcgtcaaagtcattctccgtccagctttgttccattgctggtgaggagctgtgttcctttggaagaggagaggcactctgatttttagagtttccagttttgctgctttgttttttccccatctttgtggttttatctacctttggtctttgatcatggtgacgtacagatggggttttgatgtggatgtcctttctgtttgttggttttccttctaacagtcaggaccctcagctgcaggtctgttggtgtttgctggaggtccactccagaccctgtttgcctgggtatcagcagcggtggctgcagaacagcggatgttggtgaacagcaaatgttgctgccggatcgtttgcctggaaattttgtctcagaggagtacctggccgtgtgaggtgtcagtctgcccctactggagggtgcctcccagttaggctactcggggtttagggacccacctgaggaggcagtctgtctgttctcagatctccagctgcgtgctgggagaactactactctcttcaaagctgtcagacagggacatttaagtctgcagaggtttctgctgccttttgtttggctatgccctgccccagtggtggagtctacagaggcaggcaggtctccttgagctgtggtgggctccacccagtttgagcttcccagccgctttgtttacctactcaagcctcggcagttttgggtgccctcccccagcctcgctgccgccttgcagtttgatctgactgctgtgctagcaatgagcgaggctccgtgagcataggaccctccaagccagtcgcaggatataatctcctggtgtgccgtttgctaagaccattggaaaagcacagtattagggtgtgtgtgacccaattttccaggtgccgtctgtcacccctttctttgactatgaaagggaattccctgaccccttgcacttcctgggtgacgcgatgactcaccctgctttggctcatgctcagtgtgttgcatccactgtcctgaacccactctctgacactccccagtgagatgaacccggtacctcagttgaaaatgcagaaatcacccatcttctgcatcactcacactgggagctgtagactggagctgttcctattcggccatcttggctccacctctcttagataacttctgaatcagacaaagttattctttttctcactaataacataacgctttctgggacattttgtatacagaattatgtgtctactagaattcttatgcttggtaacctaaaactttagtgaaatcccaaaaagcaagaaatcctgaactatcagatgtg

SEQ ID NO: 1460 - DNA, 2300 bp, Homo sapien
attatccccctctaggctaaaatcctgggattggggtttagatagagtgaaaggaaagttgagagcacaggggattttaccttgcatctttttttggagaaaccagagtgaaaatggcagtgaagcagagaaggcctgaacttcaagcctcttcaacaccttccagcctctcttaggctcctaaatatagtgcaaaaagttccagagttcctttgttacccatgaaagcacatggaacggtgctggacaggggcaactggccctggagcagaggagtaactgcatagaactgtccaagcctcagagggagtcacaccaccagcaagaacctgggtgggagtaggtgagccaaggggttcccaggctctgaccctgccaagagaactcattagaaggtcaccaaccacacatactattcctcggtctcatgaagaacccagggaccggaccaggcaagatatcacaaagctgaagtttcagctctggggcagagcatggatctgaggtctttggccctaccaccatgcgatcatatgagggccatcatacaaccatcatgatttgggggaggaatagggcatagaggaatcatatgaaaagctgaaatgccatgagttacccagaagaagctgtgtaagccagaggattctgagaccctgtcaaataacaacatctagttgaaggttggagttaggtaggaggtagggaagtctgggaaagaaggagctgaaacacttgctgtgtgtggcttaatggaacatgcaaggggccaggacgaacttggtccagatgaagtcaccacccctggggcctgtcttttttttttttttttttttttttttgagacggagtctcactctgtcaccaggctggagtgcagtggcgcgatctcggctcactgcaatctttgcctctcgggttcaagcgattctcctgcctcagcctcctgagtagctgggattacaggcgcgcgccaccacgcccagctaattttagtactgttagtagagatggggtttcaccatcttggccaggatggtcttgatcccttgacctcgtgatccgcccgcctcggcctcccaaattgctgggattacaggcgtgagccaccgcgcccggccccctggagcctgtcttaatcacttacccgccaaataaaatctggctccagagagtggagcgtaggcttaaggaattgggggcggaagggcggggaaggtgggggagggacagtgatagggagaacagggaattgtagcagaaattgggtttattgttcagagctgtcaatgaacacttaacatatgcctgtcttagcctaaatcaatgaataaatgaatgaataaataaatgaatgaaatgtgggcaatgcctataaagattgctgggacagggaggtggggggagacaccagcttgggaagtcaggcttgttagatcctagttcaccacctgatacgttacaaatactaaaaccatcactttcaaattatttttactacattttcctgttatctgtactcgagtttatttatgtttctggcatctagagtcagcccttcatgggcatgagacccaagcagccacacgaggctctgaacccagaagagcatatgctcggtttaatggtctgtcatcttagaattgttaataaagtttttatcccgcattttcattttgcactgagattcataaattatatagcaggccctgactgtacctgtatagtggaattactatatgatggtacgctactgtgcatatcttccccgttcagtgttcagtgccctcgtatcggcagcttgaactagctcatggtacacgctgggaatcagggtgggaatcagttgtaaaccatttaccggaacaccactaggcaggccacaggataaaggaataatgatggtacacctccccctacctctaccacctgggaattttggtagaatgccagaatggaaaagaaaatctcttgcatagccatttataatttgtgataaggaagaaaaacaatgacctcagctttagcattattttacaatataaattcagatcccgtgactgaaaactgttggacttaaaagaggacgctccaggagcgcaaaagcagttgggccgaacgaagcgtgcgcgctttggtaaccggctagaaatcccgcacgcgcgcctgcctcctctccccaggcctgagctgcccctcccactgcctttccttcttcccgcgagtcagaagcttcgcgagggcccagagaggcggtggggtgggcgaccctacgccagctccgggcgggagaaagccca

SEQ ID NO: 1461 - DNA, 2300 bp, Homo sapien
ataggccacaaaacaagtctcagtaaatttaagaaaatcaaaattatatcaagtactctctcaaaccacaatggaaaaaaaattggaagtcaactccaaaaggaaccctcaaaatcatgaaaatacatggaaaataaataacctactcctgaataattttggggtcaacaatgaaatcaagatggaaatttaaaaattctttaaactgaacaataatagtgacacaacctatcaaaaaccctaagatacagcaaaagcagtgctaggaggaaagtttatagcatcaaatgcctatatcaaaaagtctgaaagagcaaaaatagacaatctaaggtcacacctcacagaactggagaaagaacaatcaaaactcaaacccagcagaagaaaagaaataacaaagatcagggcagaactaaatgaaattgaaacaaaaaaaatacaaaaaataaatgaaatgaaaaacctggttctttgaagagataaataaaattgatgaaccattagtgagattaacgaagtaaacaagagagaagatccaaataaactcaattagaaatgaaacaggagctattacaaactgataccagagaaatacaaaagattattcaagacttccatgaatgcctttatatgcataaactagaaaacctagaggagatggataaattcctgaaaatataccaccctcctaggttaaaccaggaagatatagaatcgccgaacagaccaataacaagcagtgagattgaaattgtaattttttttaataccaacaaaaaaaaagtccaggaccagatggatttacagttgaattctatcacacattcaaagaagaagtggtaccaattctatagacactattccacaagatagagaaagagagcatcctccctaaatcactctgtgaagccagtatcatcctaataccgaaaccagggaatgacataacaaaaaaagaaaactacagaccaacatctttgatgaacatagatgcaaaaatcctcaatcaaatactagtgaactgaatccaacagcatatcaaaaagataatccaccataatcaagtgggatgcagggatgatttaacatacccaagtcaataaatgtgatacaccacataaacagaattaaaaacaaaaccacatgatcatctcaatagctgcagaaaaagcatttaacaaaatccagcatccctttatgattaaaactctcatcaacaaaactggcacaccttaaggtaataaaagccacataacaataaacccacagccaacattatactgaaaggggaaaagtagaaagcattctccttgagaactggaacaagagaaggatgcccactttcaccacttctattcaacatagtactggaagtcctagccagagcaatcagacaaaaggaagaaataaagggcattcaaattggtaaaaaggaggtcaaactgtcactgtttgctgatgatatgatcgtatacctagaaaagcctaaagactcatccaaaaagctcctacaggatgcaaaattaatatacacaaataagtagctctgctgtacaccagcagcaaccaagctgagaatcaaatcaagaactcaacccctttcaaaatagaaaaaaaaaaaacttaggtatatacctaagattttgggtgacgataatgtgtcattgtaggttcattaaatgtaacaagtgttatactctggtggaggattttgataatcagggaagctggaagggaggggtgatatatgggaactccctgaactttctgcttaatttttctgtgaacttgaaacttctctagaaagataaattctatcagaaacataaacaaaaaagaacagagaatgagagtgggggagattttttacaagaatgtatagaggtgtgacaaaggatgactagatgggaacttttagattctggaaggggacagcagtgcagcaaagctttcatatgggtgtgagctgtcatgcacatggctcctatctgaaaatcttgttcttctagaatccaggtctgctggccaacatctcagcagttttcaccctgcagacttaattaggcttcctcttccttatgtcccctccctgaatatggcattttgaaagcccagtgttgcccagggggcatctcctttgtgtttatgagagacctgcattctccctggctcagttctctcaggctctccagagctcaggacctctgagaagaatggagccctcctggcttcaggaactcatggctcaccccttcttgctgctgatcctcctctgcatgtctctgctgctgtttcag

SEQ ID NO: 1462 - DNA, 2300 bp, Homo sapien
attgtgagtgggagttcactcatgatttggcttctgtttgtctcttattggtgtgtaggaatgcttgtaatttttgcatgttgattttgtatcatgagactttgctgaagttgcttatcagcttaaggagattttggactgagacgatggggttttctaaatatacaatcatgtcatctgcaaacagggacaatttgacttctgttttcctatttgaataccctttatttctttctcttacctgtccagaacttccaatacaagcaaaaaacaaacaaccccattaaagacacagacacttctctaaagaagacatatgagcagccaacaaatattgaaaaaaatgctcgacatcactaatcaacagaaatgtgaatgaaaaccacatctcacacaagtcagaatggctattattaaaaagtttcaaagcaacgtatgctggctaagctgcagaaaaaaaaaaatcatgtgtatacattgtttgtggaaatgtaaattagttccgccactgtggaaagcagtttggagatttctcaaagaacttaaaatagaagtactatttgacccagcaatcccaatgttagctatctatccaaaagaaaataagttgctctaccaaaaagacacctctactcatacattcatcacagcactattcgcaatagcaaagacatggcatcaaccttggtgcccatcaatggtggactggataaagaaaatgtgatacatatacacagtggaatactaggcagctgtaaaaaaaaaataatgaaatcatgttctttgcagcaaatggatgaattgggaggcaataatcctaagcaaattaacacagcaacagaaaaccaaataccacatgttctcacttataagtgggaactacatgttggatacttatggacataaatatgggaatgatagacactggggactactagaggggtaggtacagatatgagtaaccattggaaatttgactaatatataccatactcactacctgagtggcagaatcatttgtatccaaaccttcagcatcacacaatataccagtgtaaaaaacctgcatacgtacctgaatctaaaataaaagttgaaattataaaaagaggaacaaaaacaatgctcatgcacagatatgcatgtaaaaatgccagggagggttaattcatagcaatagttactatttaacctactttacttgaggttgacaaagaaatcattttttaaatattaatttctgtttagtacagattgtccttagtcagggctcctaaacagactgcaaagttctgattgtataattacatactattgtaggatgaaagagaattggtaaacaggctcctgctgtggctatagtactagactgaagtaggactaaaattgctctaggactttctctggtagagaaggtagacctatcaatgggggaaaaagtcataactaacatgatgtagaatttttttaaattgtcatgtatatgaattgagaaaaaaatcatgctatggatattatgagaccagtctccccaatggaataaaataaagtacttgaacagctgccatgttagcatctgtttgtccatatcatcatccagttaatagaaagacataattcccactcctcactcaatatatagatggaagtggtttttatggtaaataaaattagattgcaataagacaaaagtaatgattcagggcttggttaatgttaagtttaaatatacatatcatgttgagaattttctttgaacacataacaaaaaaaaagtgctactgaatgaacattattgcaatgtagtaaagcagaatgcaaattccttgaggtcagcattcaagtctgttttcctcgcagcggtgcccacacccctagcatactgcctggcacacagtaaatgctcattaaatatttgtgaggtacatggacaggggaatgtggtagacagctgatgaagctgttctcccactgttcccctaggtggatcatccaaagtcaatcgattctgaactctgaggtccaagttctgccctcccccttcactctccccacaagtgggcgggacaatcctcccatgacttaagcacaggtggacaggggtggtcagagagaggaaggggcactcagagatccagcaggtgctgcaccatgagtgtctctgtcctgagccccagcagacgcctgggtggtgtctccgggatcctccaagtgacctccctgctcattctgcttctgctgctgatcaaggcagctcagctctacctgcataggcagtggctgctcaaagccctccagca

SEQ ID NO: 1463 - DNA, 2300 bp, Homo sapien
tgcagacggctcccagatgttccactccagatgcagggattttgcagccttccagatgtctccctctggaaagtccacaggcactgcaagcataatacctcaaaatctatagctcattaatcctccaaccccccaaacttgctctggcccctactgaggcactagcatctacccagctgcctacgccagaaacctgggagtcacctgaagccctgcctcctgcctgtacccattctcccagcttggcactgtgttccagcagccacaccccggcttctctacctcctcaacagggctcagatctgttcccatgggcacttcctgcccaggtccaggcactggtgttgtggccactgtagcagatccctggatttctcttctccagcctttgcatgcccctttcactctccacactgcatggagaggtgttttcccaaacgcaaaactaaccatgtgactctcctccctaaaattcttggagaaggcaccagtagatgtttgttaaattcagccccattccttacattccaatcagtgattctctggctgttcattaacatgcacagtgcttactccagtctgtgttagaagattctgaggacaccaagttgggtgtgggagggaggccaggatatacatgtttgggaggcatcactcaactccaagcaaagttctcccagatcaccttgagacactccatctttggatggcaatgggcccgactgcacacgcatgtgaacacacacacacacacccacacacaccacacacacacacacacacacacacacacacacacacacacacacacacaggaagcaggcctgaggcatgatgtctgagtgctcccgctggagcaggaaggcagaatcaacctgccataggaagggttgcccaggaggcctgatgaataggagtttggtggcttcagggaagagaggctgtggaggtgccttcagctcaggtgctggctcctggggaccttccatctctgatgagactttgttccagttggcccgctcctttctagggagtcagcatctcagcttcccatacttctggggtggggggtggggcaaggagaccagcatgacccttggtcaggggcttgcacaggaactctggccattctcattccctgagctggagggccaggtggacaccacgtgatcctggggaggcttttgcctcttccgagggctctggctccagggcctccctgttccaggggctaggtgtgccttcctcaatgctgcttttggctatgagggtgacgggcccagggcttcagggccccagatcgcaccttgccatctggggtgtccgtcctttgtcccccacagcaggctgtgtttgcccattttctcctctgccatgggtggagatggatctgaagttgggtgttgaagcctctgaccaaggctgtatcttgttttgaggccctgcccggtttccagggaccacatctggggccaagaggaagaaccgaactgggactaggttagctgtgctgggtcagggcctgggcatgggctgtgaaagctggggactgggaccttcaggccctctattgagatctttgcagaagggggtggatttaggaagctactgggctgggccagggcgtggaaggcactgaagccgtagtgtgtcccagcattagagtcccagagtttagcttggcggggcaggggcaggtggtggggagaacaggaaataggccaggctctcggcggagtctggcagctttgagccttctctgggcttctggggttttccccaggctcctgagccagccaggacatttcttaatcccactgtcagccttccaagaagccccgcccactgggctcagtcaaggcaggagcgactgtgtgtcacccctttccctagaatccagccccactgccaggaaaagggagctcagggcatggaggtgaggctgggactctcccacatctgcttgttcctcatacccacctccttagctggcccctggaagatgacctcgaatgccagcccaagtgagctgggcaccagccaggggaggccaggtctggcagctcattaccatgggagggagggcacgttctctccgacgcccgtcttcgtgtctcctccctccctcgccttcctccttcctagctcctctcctccagggccagactgagcccaggttgatttcaggcggacaccaatagactccacagcagctccaggagcccagacaccggcggccagaagcaaggctaggagctgctgcagccatgtcggccctcagcctcctcattctgggcctg

SEQ ID NO: 1464 - DNA, 2300 bp, Homo sapien
ggactggggactggaactaactccaaaggtttgggaactaactccagaggtttgggctaagcgccattatgtgtctctctcccatgcctcctctttgcaggactgtgagtgtggtcctgctagccccatccaggactttacttagccctagctcagctgcagggtgaagggcttcggcagtttgggtttggaaagtggcccgcccatctttgtgagatacctacggagtagtcccagatgttccctcctccagagggctctaaccagcgtgaggggcaggtacaacggtggggtggggcagactcaccatcagtaatctccatctcatagggggaaggtctcctcttcactcgattgttggtggtgaacatagggaaggcatccggctccccaaagaacccgctgtgggagggaacgggcagatcacaagatcccatgttgaggggaggggagaaagagcttccttagggatcctccccacatgtcttgagccccccacctctgggcaaccctggtcccttcacacttgagctgggaataggcacacacagacacacacacacacatacacacggaatgccctcactctgtctgtcataaaacaagcaaagggaggaaaagacacctaaccacacatccctccacacaaacacaggcacatatgcagaagcagaggtgaataacacatggaataaacacaaaaatgaacacacacacacacacacacacacacttcacagatagaaacactctccattctcccgccccagaaacaagcacataatccacacacacctccactcccaaacacatgcccactcaggcaaatgtaaccttcacacctgatggtgtgcatcttggtcaccacaaaggggcacactgtcccctctccccacctcaccccacccataaggggctgtagatacacaacagacaggaaaccctgactcccctcagctgaaatgctccgcctagctctctgccctcacccaccctaagctccccatagctctgtctcgggtgcccgccaggttcattgactgccccacactctatccctgccccatctgccggtttctattccaaccctatggcttctctccctcatcatcacagtagcgccagcagggaaacggatgccctgacaccaaccggagtacaggctggggccagagaccacggctaggagcagaggggctgggagtggagggacaggtcagtcctcaggcgggccctccagcagagattcgggggagggtgcctctgccaccaccctcagatccttatctcttgcctgtccagctagcgctgagtttccgaatgaatttcacaccacaaacatctacctctgctcacagcaaagcacatgcaggcacactctttcctggtacccacgctcaggggactccttcctctccgtcccccacgacaccaccaccaagcacaccagccacatgcctgcacccgcgaaggtgtccacgtcctcctctcggcttccacacagccatgcaccccgcagccacacgcacactctctctcacagaaggcccctccctcactggcactcactcgggggctccagcttgaggctctagagccactgggtttaaaacgacctcctctccctgcgctccacccgctcggcccccagggcaggccgccgccgatgtgtagaaggaaaccccggtgggggtggtcgccctgcccacccgcccagcccctggcccctggcccctggcccctgacctgccgagagaggccagcggctggctgaggctgtagagcagcgcgcggccgggggcggcgggggcagccagcgcgggaggactcagctgcaccatgcggccgtcgccgggcagctccgctgtaaccgaggcgggcgcgggggccggggcgggcccgggaggtctgcacagctcggtggtgggcacccgatggcgcgcttcggccgtcgccgcgtcgcggccctttaagtctctcgcggcgccgcccccaccggcagggccgccccccgggcctccgcgcgcgcccagttcgatgactgggggctccgctgcggccgcgcggctcgtctccttggcgacgccgttcagcaggaccaggtgcgggggggccatgctggcctcggccgcgtcccgtccctctagctgggggtcactgcgagccgcctcgctcggcggccgctcggtcatcctgtgggcagacagacagacaagcggatgcccgctctgacgaccgcccctgacccaccgacgtgggctggggtaaaggggagaagggcagagagaggaactcacgca

SEQ ID NO: 1465 - DNA, 2300 bp, Homo sapien
tgtgcatgcggtgggattgtgagagtgcgttcatgagaactgtgggcggcgttggctgcttctaagtgtggtcttcttggcgacaggctctgtgtccgagtgtggtgtgcctgcgcggttggggtgtgtagatgtggacccttcgaggcccttctgcgttttcttcgttgcgtacgattgtgctccgttggtgttctcagcagggatctgattctgtgtgtgggggtgtgtggcccctgcgactgtgtttgggtggtgtcgtcgttatgtcgggcgtgtgtgatcccgactgtgctggattgtgtgtccgtgagccgctgcgtttgactgatttcgttgtgtcctgttgggcagtgtgcggggctgaccaagtcggcttctggggcagtgctaggtggtgtttgtttgctgcccttctgtggggctggaccctgtgtggtcctgtccgcactgagttgtatgcctgtgtgcctgtgtcctttagaggtgcgtttgcaaatcgctgggggcgggagtggggggagggcgagcgagagatcgaggcgctggtgggggcggcggcatgggggcggggagcgggatttcacattttattccaaattatgatgtattcgggagccagttgttggcttgggtgggcggacagcgcccggtcggcggctgctctgcccggaggcccgcctgtgcctaggtgtttgaggggttcgttggtgagtgggaggctcctccaggcttgaagctgagcagcgctcgccgaggccggcgccttcgagccggtagctgcgggcttcggttcccgctgcactccggcttcatccatttctggtcagtttcgtgggtgcggccgccgggctccaagggagaggccccgaaaggacaatgggcacattcaccaggcctcgagcctcgggtggggacattcgggatcacctcctgggaagattttcccgccccctcttcgggtgagcgacgttgccgcttgggtctgatacccgtcgcatccgagaccgaggccgaatccgggctctgggagggaccgggttagtggggccctagctcgggttgaaagaattttgttttgtcaattattgtaattgctaatgccatcaccatcacaatcgtcatcattaacatctattttaattaaaataatcatcccagagcgcagcagtttgtcccttttggctcctttggcgggagaacaaagcagcgggtttttttccgctacagccgttttctaagttgctgggtttgaggtaggaagagaaaatggagagaggcacggacacagagacttggtcataaggcaaacattaacccccagcgaacacgcaacattaaccccccgcgaacacgccgggaatggatggattcccctcttctttcctcccctcccctcttttggattagaagaggagaaagaaaatcttccgcattgtattgcaatccagggaagaattattcctatatgtccaccaaagccgcggcaaatagaaggaggccttcgcagttaatccaagacttcgatgtgtgatcataagcctgacgatttaggcaaaacaaattaaacaaaatccactaggaaaaaataaaagcaagctcaatcctgctacatccttgaaagtagtgtcgggtttgtttttacctcctttccttttaccttgtttattgctgtaacaaatcattagaattctcccttactctgtctaaaccccgaaaaatcgaaaatcatttcgtaggggtggtggaggggaaggtgggggacttttcccctttgtttctttctttccccctttgttggtctttatttccttttctttttctgtctctctcttcctctctctttcttctttctcttaatcagtagggagacgagaaaggacctgaacagatcagatatctctctccaagcccccttcccaactccatttctgtaggaaagtacagcccctggaattgggttctggtttcgctttgggctggaggtgggtggatgggggtcagagagagaatgaggtgggggggacttcaaggttctgtcccaccgaccagagtctgaagactattcgcctttcccaacacggacctccgcccatccaggcccgggactatcccttcgcggtgtagcggcagccggagacctggctgaggaggcaaccgcgtagacacctccctgcttagaaaacaaacactgaaccagaccgatcccagttggagggttcgaaaatgttccagacagcctgtcgggaggggttgttgttgctgttggactaaatagctattcctgattggtcatgtat

SEQ ID NO: 1466 - DNA, 2300 bp, Homo sapien
agagcacaggaggaacagaggggacaggcggcactgaattaactgtatcttctcagagggtcaacctgatgaccaaggagaagccagatcccagactggggccatgctctctgctcagtctttgactgggactcagtttgttaccagagtaggggttttcccccagttctcaggctccaaaaaaagctcaaaagcagagacactagaaggacaaatcagcctggcatggaaagtagagttgtggactgggaattggacaccaaagtttgggtcctggcttttcctttgggttactgtaagttttggctaagtcacatctctctgtgtcttaatttctttctctatgatgataaccagaactcccatgcaagtgcatatgatgttttcctgggctgtggactgagtgacgttccatacattattatcctcaccaccaccttttaaaggtcatataagttagttctcataactttgtgacgtcgacattatctccccattttacaaatgagaaaactgaggttcagagatcagtgactaaaattcgaacatgtgttctttccactccaccatgaaagaatgaacccagagaccctccgtgggctgagcgcatcatccagctggcactgaactcagatttctaccccacagtaaagaccctggtctctgcaatgagttgagcccaggtccctttccctggctaggttttggctgcccctcttcatcagctgagccgcagagaagactccgtgtcaaatttccttccaaggcagactccaccaagcactagctatgtatcattcgaaaagttactttgactttctgtgcctcagttttctcttctgtaaattaaggatccagcttctcaggactgtttgtgaagagtagattagtatttgcagaatgcctagaatagtgttacagtcgctagattaaactttttttttttttttaaataccatgtggggagcagtgttcctgggctctgggctcagcctgaaacctagcagaataggcattttatgtccctattgacaggggttctgccaggccgccgtagagcccatggatttgagttaccggctctattttagaagggggtgaagaggtagggaagggctggggagctttctgggatagggagactgcccattgaaatctgggtgtctgggacactggaggaagaataagaaagaagccctgggaggtgacgattttggtatcatggtggtcttcagaggtagggacagagtgctggggtgagagtcgctgaagaaaggtgtctgaaaggttaagggactgaggttgtgggaagctggggttcctgagaggccttgggattagagatgggggctggatctgctgggtcctagacagcgcgtccaacgctccccgcagcgcgttccggagccggtcctagcgccgctcaaccagtccccactccctccggtgaaattgccaaattaaaatgaatcatttggcccataatggccgaggcgcttatcgggggcgggcggacccgcggcagtgccttatctctgcggcgcacacggccccggcgcgcctcggcccatgctaacgaggcctggaacgtgagtgggattacagcgcgtcggtggaggggccgggcgggcgcggggcgggcgggggagcgggggccgcgggaggggccgggccgccgccgctcaggaccgggcctcaaaatggccacacgcgtacccccgtagcggaaaaacgtgagcattctggcctttttctaggggaaaagcaacccgcggcctcccaccgaattcttcatcaatttcctcctctttttccccacgtccgcaaaagaggtcttcgctccctttccctcggttcctttcgatggccggggggggcggtgggggggcattttccacggacgcccccgccccggctgccgccgcccctcccgcctcggagactctcttccttccttcccccttttccttacgcaatatacagaaatgcgcgaggctgtggttggttttcatttcttcttcgtggttgtgtgcatgcggtgggattgtgagagtgcgttcatgagaactgtgggcggcgttggctgcttctaagtgtggtcttcttggcgacaggctctgtgtccgagtgtggtgtgcctgcgcggttggggtgtgtagatgtggacccttcgaggcccttctgcgttttcttcgttgcgtacgattgtgctccgttggtgttctcagcagggatctgattctgtgtgtgggggtgtgtggcccctgcgactgtgtttgggtggtgtcgtcgttatgtcg

SEQ ID NO: 1467 - DNA, 2300 bp, Homo sapien
tttcacgaacctaccacccttctgttctagcccttggtccagctgtttcctcagcccacctggaaggttctggatactgatgcttctccccaccccccttcttcgcacccccaaatttcactcttagatctcagtccaggcctcattttctcagagaagcagtccccacctgggctctcccatatgggaatggctagcctgtttttacagtggctcagagacatgaaatcacttctctaagggtcccacagcccaggaatggcagagttgtgtttcagactcagaattatatgactctcattttctaataagtgatggagccaagcaaaggccttatggtaggggggaactagactttttcttaggatgtgggattctgtgagagttatctgtatccccatgacagcctgacttccttcagagagcacaggaggaacagaggggacaggcggcactgaattaactgtatcttctcagagggtcaacctgatgaccaaggagaagccagatcccagactggggccatgctctctgctcagtctttgactgggactcagtttgttaccagagtaggggttttcccccagttctcaggctccaaaaaaagctcaaaagcagagacactagaaggacaaatcagcctggcatggaaagtagagttgtggactgggaattggacaccaaagtttgggtcctggcttttcctttgggttactgtaagttttggctaagtcacatctctctgtgtcttaatttctttctctatgatgataaccagaactcccatgcaagtgcatatgatgttttcctgggctgtggactgagtgacgttccatacattattatcctcaccaccaccttttaaaggtcatataagttagttctcataactttgtgacgtcgacattatctccccattttacaaatgagaaaactgaggttcagagatcagtgactaaaattcgaacatgtgttctttccactccaccatgaaagaatgaacccagagaccctccgtgggctgagcgcatcatccagctggcactgaactcagatttctaccccacagtaaagaccctggtctctgcaatgagttgagcccaggtccctttccctggctaggttttggctgcccctcttcatcagctgagccgcagagaagactccgtgtcaaatttccttccaaggcagactccaccaagcactagctatgtatcattcgaaaagttactttgactttctgtgcctcagttttctcttctgtaaattaaggatccagcttctcaggactgtttgtgaagagtagattagtatttgcagaatgcctagaatagtgttacagtcgctagattaaactttttttttttttttaaataccatgtggggagcagtgttcctgggctctgggctcagcctgaaacctagcagaataggcattttatgtccctattgacaggggttctgccaggccgccgtagagcccatggatttgagttaccggctctattttagaagggggtgaagaggtagggaagggctggggagctttctgggatagggagactgcccattgaaatctgggtgtctgggacactggaggaagaataagaaagaagccctgggaggtgacgattttggtatcatggtggtcttcagaggtagggacagagtgctggggtgagagtcgctgaagaaaggtgtctgaaaggttaagggactgaggttgtgggaagctggggttcctgagaggccttgggattagagatgggggctggatctgctgggtcctagacagcgcgtccaacgctccccgcagcgcgttccggagccggtcctagcgccgctcaaccagtccccactccctccggtgaaattgccaaattaaaatgaatcatttggcccataatggccgaggcgcttatcgggggcgggcggacccgcggcagtgccttatctctgcggcgcacacggccccggcgcgcctcggcccatgctaacgaggcctggaacgtgagtgggattacagcgcgtcggtggaggggccgggcgggcgcggggcgggcgggggagcgggggccgcgggaggggccgggccgccgccgctcaggaccgggcctcaaaatggccacacgcgtacccccgtagcggaaaaacgtgagcattctggcctttttctaggggaaaagcaacccgcggcctcccaccgaattcttcatcaatttcctcctctttttccccacgtccgcaaaagaggtcttcgctccctttccctcggttcctttcgatggccggggggggcg

SEQ ID NO: 1468 - DNA, 2300 bp, Homo sapien
gctgggtgcagtggctcacgcctgtaatcctagcactttgggaggctgaggcgggcggatcagttgaggtcaggagtttgagaccagcctggccaacatggtgaaaccccgtctcaactaaaaatacaaaaattagccggacgcactggagcgtgcctgtaatcccagctactcggtacgctgaagtgggagaatcgcttgaacccgggaggcagaggttgcagtgagctgagattgcgccactgcacttcagcctgggcaacagagtaagaccctgtctcaaaacaaactcctacctaaaaaaaaaaaattgttttaaaacttctaaaacacacttgaagaatattaattaaataaagtcttgtgacttcttgggtcagcatattctaccttttgtggtaaagaagatattctcggccaggcccggtggctcacgcctgtaatcccagcactttgggaggcagaagcaggcagatcacctgagtctcgggacttggagaccagcctggccaacgtggtgaaaccccgtctttactaaaaatacaagaattagccgggcctggtggtgcatgcctgtaatcccagctactcaggaggctgaagcaagagaatcacttgaacccaagaggcacaggttgtagtgagccgagatcatgccactacactccatcctgggtgatacagtgagactccatctcaaaaaaaataaaaaagatattatcttgtattagggttctccagattaacagaaacaacaagatgtgtgtatgtagagatatttgttttaaggaattggcttctgtgtttgtgaaggtttggcaaatccaaagtctacaggtagaggctgagcacagtggctcatccctttaattccagtactttggaaggctgaggcgggaggattgcttgagctcaggagttcgagaccagcctgggcaatgtggcgaaaccctgcctctacaaaaacagaaaagaagtacagaatttagctggttgtggtggcacatgcctatagtcccagctacttgcagggctgaggtgggaggatcacttgcccaggaggtcaaggcttcagtgagccatgttcgtggcactgcactgcagcctgggtgataaaatgagaccctgtctcaaagaaaaaaaaaaaaaaaaagacaaaaaatgtctacaggtaggctggtaggctggacacccagggaagaattgcaatttgagtccaaaggcagcctgctggcagaattccttttccctccaggaagtcagtctttatctttttttttttttgagatagggtctcactctgtcacccaggctggagtacagtggtgtgatctcagctcactgcaacctccacttcgcaggttcaaggaattctcctgcttcagcctcccaagtagctgggattacaggtgtgcatcaccacgcccggctaatttttgtatttttagtagagatggggtttcaccatgttggccaggctggcctcgaactcctgacctcaaatgatccacccaccttggcctcccaaagtgctgggattacaggcttgtgtcacctcacccagccaggaacatctttactgtcttaaattttaagaccttattcaacattttattgaatatttatggaagaaatagccaaactaaggagacaatagcaatttctttaagattgttattaaaagctactcagaaggctgaggtaggaggatcacttgggcccaagaagtcgagttggggagccatgatcatgctatgccaactgcactctagcctaagtaatagagtgaaacccggcttcaaaaaaagtgatgttaaaaaaccttgtttattttccattctggcctaagctttaatgaggaacagtcattttaaatgttatcaaaatgtttgtctctcctaaagtactgttgttataactatacaacctgaagtttttccttttttcccttgggtactaaaaaagctaagaaatgaggccaggcacagtggctcacacttgtaatcccagtgcttcgggaggcagaggtgggtggatcacctgaggtcaggagttcaagaccagcctgaccaacatggtgaaaccctgtgtctactaaaaatataaaaattagctgggcgtgctggcacatgcctgtagtctgagctcctcggacgctgaggctcaagaatcacttgaaccttggaggcggaggttgctgtgaactgaagtcatgctactgtactccagcctgggcgacagagggagactctatccaccccccacccccccgcaaaaaaaaaagctaagaaatgggtttt

SEQ ID NO: 1469 - DNA, 2300 bp, Homo sapien
tgtagagacagggtgctgctatattgcccaggctggtcttgaactcttggcctcaagcgatcctcccatctcggccttgcaaagtgttgggattacaggcaggagctaccgcacccaacatgtgtgtcttatttgtattattatttttgaggcagggtcttgatctgtcacccagtctggagtgcaatggcacaatctcagttcactgcaacctctgcctccccggctcaagccgtcctcccacctcagcctcccaagtagtaggactacaggcacatgacaccatgcctggcaatttttttgtattttttgtagagatggggttttgccatgttgcccagactggatttgtattatttttattgttgttattttgtttttttcccctccgaatatttccatttgcggttggctgaatctgtgaatatggaacccactgatagagggctgactgtatataaatacataaaatatcaatactatatataatatcaatgctagttgtagagataggcatatatggtttataaatttaagtcacattcttttcttctactcaacaggaatttaaaatttttatgttactttgctgggggcggtggctcacttctgtaatcccagcagtttcggaggccgaggtgggcagatcacttgaggtcaggagttccagatcagcccagtgcccaacatggtgaaacctggtctctactaaaaatacaaaaactagccggccgtggtggtgcttgtctgtaaccccagctactccggaggctgaggcaggagaattgcttgaacctggaaggcagtgtgcagtgagttgcagtgagccgagatagcgtcacagcactccagcctgggcgacagagcaagaccctgtctcaatcaatcaatcaatcaatcaattaataaatacaaattttggcccagagtggtggctcacgcctgtaatcccagcactttgggaggccgaggcgggtagatcacctgaggtcaagagttcgagaccagcctagccaacgtggtgaaaccccgtctctactaaaaaatacaaaaattaggccgggcgcagtggctcacgcctgtaatcccagcactttgggaggccgaggtggacggatcacgaggtcaggagatcgagaccatcctggctaacacggtgaaaccccgtctctactaaaaatacaaaaaattagccgggcgtggtgggcgcctgtagttccagctactcgggaggctgaggcaggagactggcatgaacccaggaggcggagcttgcagtgagccgagatcgcgccactgcactccagcctgggcgacagagcgagactccgtttcaaaaaaaaaaaaaattagccgggcgtggtggtgggtggtggacgcctgtaataccagctaattgggaagctgagacaggagaatcgcttgaactcgggaggcgaggttgcggtgagccgatatcgcgtcatcgcactccagcttgggcgacggagtgagattccacctcaaaaaaaaaaaaaattatgtcactaaaacagatggcttcctaggaaagaaactggaagaaatctagaagttgaggataagtgatcacaaaaaggaaaaattaaaaatgtacattttagaataaaaattaaaaagtaagaaactggaataactctaactttcttgtcttttgtgctttcaggtaaagagtttggaaactgttcttcgggtgtccgcttccagtcgccgaccaatgatcatcttatagagcacttccggcttcatctgccactcgctcctccgtctacctagctgggctttccattgcgcttgcggaaagcctaccccgccccggaacttaaccgttgacgaaatgaaaggtttaaatcctcggatccttgatcctggagcgccggtggcgcccgcagttctccaagaagacttgggattggtcgagcgcggaaccagtgcggggcgctgattggtcggcacaccaatacgtaacggcgaccgtgcgcggctctctagcaccacccccgctccctgactggcgaggtttctgaccagtcagcaggcgtggcgcggccttcagtttcgcgagcttgtgtttgccgcctcagttcccgcgaccccaacgtcccagaggcggggccggagtcggcggtggcgctccttggagccggctcccgctcctaccctgcaaacagacctcagctccgcggaagttgcggtaagtggagctttgtgctcctggtttccccttgagaggcggcagcggggccctgggaaggttggtgggtaacattcaaagccctgta

SEQ ID NO: 1470 - DNA, 2300 bp, Homo sapien
attccagcgtgggtgacagagtgagactctatcccccccaaaaaaatttttttccagctgtgataataaaaaatatcccattctcctttctatggtgggaaggaaaaggtagaagttgtggagaggaaagaggtagaaattaaagggagaatggaaaagaagggcaaacaaaggcaagtaggtgaggagaaggacaggaaaagagacagggagaagggagggacttataaatgggaaaagaagggtaggaaggatgggaataagtaaaaacaacaacaacaaaaagaaagcaaggagagagagtagagatggggaagagccagaaaatgctgagtgagctaagaaaggaccaccaaaagaaaaaggagaatgggggtggtcagacagagggctataccactatcttcctctcctgtttgctttcgtttactaacgtcctggtcactctgccctaaacagcttagttcctttcccatagtctttgttcactccagcactatctgacttgaacttgtacctgtacgacaaatctaacaccctggactcttagttctaaaaacaggacatgcattctgcctcagtcttccattcccatggtctcaccctggaccttggcatcatcagaaactcagaagctgggacatttcaattccaaatatcccactcagaccagcagcatccatactgccagagcacttgctcatataccccactgcaatctttcttgggccaatgctctaagacattggtccctttccccaccaccctccaacccctccactaccaggcttcatgtgccattatttgctttcctgtatggttttgattctacacacagcatcatgaacattctcttccaaacactctcatcacttggccccctctctctgttgtacttgccaggcaaaatcccaaccctcagtaaatgcaacaagctgccttctctgcctgtgcctgaatggccaaacatcttcaattattttgaatccgttacctcaaatatcaaatgagctcttaacgttggccagaaggccttttaaaggcctgtatgcaccaaggctcagttcttgaacgtctccttttcttctcccttaagattcttccctaatgaagggggcaggcgaacggagttaaagggcttccattgctgttagaatacagcccaaattcctttccataatcaaaagtcctgatctgccaccgacctcactttctcaacttttcaccttccattctcccctcatttgactcagccctggtctcactgtcactggccttttttccttttttttttttgaagcagtctcattgtcacctaggcaggagtgcagtggtgctattacggctcctaggctcaagtgaacatcccagtagctgggatcacaggcacgggtcacggtgcccggcttttaaatttttggtcgagacggggtctcgtcatgttgtccaggctggtctcgaactcctgggctcaagccatcctcctgcctcagcctcccaaaatgctgggattacaggcgtgagccaccgcgcccagccaggccttccttcaattgctttaacatgccaaaccaacttagattttttgcacatgcttttctctgtgggacactctatcctggtgtttgcctggtttcgctcttttctatccttttgtcttggcttgaatgtcacctcttctgaagccttctctggcgaccctggccatcttatgtcctacttgttatttcttcaaaatcgtactgccttttgtatgtactggtgtttactcattcacactggctacctccccatacctcactggctggaatggaaactcattgcgagcagagacaataggttttgctctcccgcggatcacgtcccagcctccagctcagcaccagacacttgagggcgcaggataaaatatctgcagtcagaaagcactaataaccacccaagggttggaggaaagctggcgcggaccgcacgagtgtcgccgagacgccgccgccgtgcgaagctcctccccttccgacagggccgcggacgcccgggcagccacggcggcggggccgcggcgggcgccggctcagcccgcccctttctcccgccgcctccccgccccgccccgcgccgcgccggccgctgtcagctccctcagcgtccggccgaggcgcggtgtatgctgagccgctgccgcagcgggctgctccacgtcctgggccttagcttcctgctgcagacccgccggccgattctcctctgctctccacgtctcatgaagccgctggtcgtgttcgtcctcggcggccccg

SEQ ID NO: 1471 - DNA, 2300 bp, Homo sapien
taaatgaggtgatacatagtaaaagcttagcatgaggtctgacatataagtgatctgcaaatgtcatttatcattattttatcacgttattaattgagatgaggaagaggagtccaatgaggtcattgttggaatattgaggggaggtgtcaggaaagcactttgtgagggacacagcaaccccagctcccatttatggggctacaggcagagctgggggaccggtgagggaggctgtagaagggcttctgccctgggagaagctggactgtcctttacagctcagtgatggggaagaggtgggagtgagtctataatttgggggtggggcagaggggtctagttgggaccctggcaagttagcttagagcagccaacaaggccccaaacctttctctatggaaaccagcctgaagttgaagggagggaaaggccagcagagaagccctctgcaggtaggttgaccaactcatccccatatgcctacaactttctgggtttagcattgaagatcttatgttctgggaaacccctcagtcctgcgcaaaccaggctggttggttaggttctgtcggctggagatcctctaggtagggacctctaggaggcctggtgtcccagtcttggggatatcacataggcccatgggtctgccccatggagctatctccagggcaaccaggctttacatctcataggtcaggggccgcaaaagcccctcagtgaccacagactgcatgtcagggtctggggacagagtgtagtgctgagtaaaacagcttctctccagaaactgtctcagccctttgggagagtcagtcttgtgttatcaccagcaagtaacatggtaccaatttagaggctcaaaacatataagaactgcattcatgcctgagatctgtcttcaccaaaccaagcctagtactgaaatcgcaccgttcacacttcatttgttaggtttgaaccaattcggactgtgttcccagaagctttcacctgtcatgcatcctcagggtaaaggagtccacagtgctttcctgaggaggagagaaccttggaaaccccctaaccctggggttaagggtggagggagccataatgagaggcctgagacactttgaggacctcacaactgggtcagtgtggtactgactgggggcaagagtgagcttgagttggcatgtcatgaccagaggtgataaactgatcacttgttttatacccttgtctcttaagggccttctaaaatgactgttaaggaataaaaagaatataaacccacaacaataaagataatgggtgaggtaacctcagtagacaagatatttcaacaaatttcaggacaataaaaagcaaatgggccaggtgcagtggctcacacctgtaatcccaacactttgggaggctgaggtgggaggatcgcttgagcctaggagttcaagaccagcctgggcaatatggtgagacctcatctctaccaaaaaataaaaatacaaaatacaaaaattagcctggcatggtggtgcacaccggtagtcctcggtactcaggaggctgaggtgggaggatcgcttgagtccagaaggcagaggctgcagtgagccaagactgtgccactaaaccccagccagaccctatctcaaaaaaaaaaaaagaaaaaaaaagcaaatggaggagggatggtaactgatgcagcagggcagagaaagcctcagtagagtgtgtgcagagaggatgatacaggccaggaaggaggcagcacctgggcagaaccagcaagacagagcttaaagaggggattgattggaagtctgtacattggacagtctctccccacccctgtgcacaaagcactgggaaagctggcatctatgctccaggtgggagatcagggggtttttggagaaatctaatgtccccagaagacatgctctggcattggggcgggagtggagagaggaagtcctctgctctagtgattgactgactggttgccactggcaacctaagacataccagctagtcaatgggctttttatttcttcattcctaaatatgaatggacaatcaaagataaccacacatttgaggaaagcctccaaactcagagaaagatgaacaaataaaatggcctcaggggaaataggaataacgcaagaaacaaaaaagaacgaaaaaatagttttttatactctatttataccttcccagggattcaagggggcattggatgcatcaaatacaactggatggtatgaggaaaaaagaaacagagacccagagagagctcttgaaaattc

SEQ ID NO: 1472 - DNA, 2300 bp, Homo sapien
aaactgagctgactcttcattgttgtgggttagggattgtctgtagatctccaagtgtcatctccttcctctctgcttctgtagcccctctggccacctctatcataactggcagttgtctgtctctccaccagatttcgagtcttcatttctgtcttgcctggagcacttgctaagggactggcccagaagtactcggtgagcaatgaagcctgaactgaggccaggagaactgaaggagggatggatctgggacccatgtggaattgacgggacttggcacttgcctgaatgtggagagtgagtggggaggaaggagcccaagatgatgataaccacactttcatctggtggtggtgggaaggaaaggggagaggtccatttgctgagatatggaatgctgcaaggagagccggccaaggctggaggatgtaccgggtagaggaagagatgcatttcatttaggacatttgggtttgagataccttgaaatatccatgtggttatgcccaatgggcacctagatatgctgaccaggaggtgaggagagaagctaagaatctactttggcagctgaagttgtgggagctggaaatactctgattatttctaatgtctcagctcagccttaaaggatggcattcttagaagagtggggtgctagagctttgaacttcacatttaattccagctctaccacttactactagctgtgtgaagtcagggaaaccacttaacctctcagaaccttagtttcctcatttgcaaaacaggaataataacagtactcacttcacggggtgcccaaacttaagtgcaataatgtacataaagtgtttaccaaatacaaaatgctcagtaatggtggctgtgatgtcatcagctgagactggagctgagagaggggcccttgagctccatgctttgagtttggattttgaactggattttgagtttggagtttacaggcctgctgtaactagctttggtcacctatacctagggacactctatagcatggctgggggactaggatggggcaagtgagatgccccaaatgtaaggaggccctggctctcaagtgctgactgcacttgcaaggccctgagactgagctccccttaaactcagcacctcaggcacctcagtgggctcactgtccttccagccctgctccatgtccaagtcccttgatctgcctgtccccaggacaacccactttaagacaaggctccttcaccctgtagttcccttggagctggggatgggtctcctgtctcttgggagaagaagtttcccaaaataggctgggtgctgcatccccctggatgccagttgtgggtggaacttctcagactgagtttttaacaaacactgccaaagaccccccatccccagtgagatgtgagtgtggtgtttctgggtcagaaggcggctttttcagacccccagtctgtggaagcctacattttgtactgtgtgtgtgggtgtatgtgtgtgtgtgtgtatgtgaagaaaagctgttttctttaacaggggggtgtggagaggaggcagccagaaaggcagctccaagttgtggatttcctgggggctcttcatttaaagcggccgcaccactttccacaattctgttttttcagagaatgctctcaaggcctggagggagggcatgacaggggtatgggggaggggggtggcagagaggcaagatggtgaccctgatctggagcagtcaaacattctcccagagacaaaaccggcctggctctgccctgccccgctgcttcattaccttggcccaggttccctaatgtctgtgagtgggcctgacacctccccatcaggatactgagggctggcaaggcggccttcatctctgttccagctggggatggaaggccaggagaaggatggggggaccgactactgggaggagcaaaatggggaggagcaaaatggggagggggctgggagagtgaatgggtggatttgtgattgggaatgatccaaaggagagggggtagaaggaggggtggaaagggaaggggactgaccaaatacagtgggatggggccaggggctgatataaccgagatggggaaggggtgagtctgggtctgggaaaaactgatccaaaggcagaaagggaggggcgaaatggaggagggtaccgtgaacagagtaagggggctgggagaggaaattagaggggaggcgctggccagcaggcaaggcctgagccctctcccccggcggtggttgggggggggccgtgtccatataaagcgggtcggcgg

SEQ ID NO: 1473 - DNA, 2300 bp, Homo sapien
gagctgtaccggctgaggctagacagctatctcgctttggagctgcagctaggtccagagtgggaaggaggctcgcgccggctttgccgctttccctgagggtgtccagttttgtgaataaaattagagaaatctgcgggcgtagttccccaagcccagctcaggcttccgtttgcagcccggcgctggccgagctcgaaccgctgaaaagggccgcgtgcaatcgttccgctgtgcctcaggacaaactccgcttcaagccagtgccgctctccggcagtttcctgattgacttaattagatccgcataatcgctggagggcttttctttcccagagccgagaacagctcatttatggggaccaaaaggaagagagggagagacgacccggacgccactgatagcaacgtactcttcgcaaaaaacactcagtaactagtggaaaagcccaacaggcatccccctccgcccgccaacgcttcctcccaattgttctgggctgcacgagggagatggccgggccgtggaacagatgcagaaggaggcccggcacgaccagagacgctgtaaccaagacccgcagagcctgtggcttcccgctctttggcggctgcagcaggcatggtgctggagcccaaggcttctgggaaagagtccaggttttcgcggagggagcgacggactcacgcgggatcgcaggcactgctgcaagacgccgaacaggctgagccggtaggcgaaagaagtaagggtcacagaagaagcaaagaaaacgaaataaattccgaatcccgcggtggcccttctcccagtccccagtgcacttactcctgacactgttgaaaacaaactggcccagaaccttggaagggaggagaggctactagaaatccctctatacagagaggagctcggttagagaaacagctatttggataaacagaggggttctgggctaggaacccggacacgtaggtccaacccagcttagcgcccctcaaaagcctgacaagtaacatgatctcctggacctcagtttccgctcctgtaaaaagtatgtatgtgaagggtctggattctccctccccaaccctgcagagcagaagctggggattctgtactccccttccccagtgtaggtctcagtagcagtgaacgtgcagcaaggccaggcagaggcaagggctggctgctgtagctgcttggtagaacttctctgaagcaggaaatttgggcagcaagtgccctggctagtctcaccctgaccaaagcctggggagccaggggagtgctggcaaggaaggaagctactggttcccatttgctgttttagaaacgaggacattcaggccgggcagggtggctcacgcctgtagtcccagcactttgggaggccgaggcgggtggatcacctgaggtagggagtttgagaccagcctgaccaacatggagaaacctcctctctactaaaaacacaaaattagccgggcatgttggtgcctgcctgtaatcccagctatttgggaggctgaggcaggagaatcatttgaacctgggaggctgaggttgtggtgagctgctgagatcaggccattttactccagcaggggggcaacaagagcgaaactcagtcaaaaaaaaaaaaaaaaaaaaaaaagaaaagaaaaaaaagaaatgaggacattcagaaggtgaaatggagtaggatgacgccaacactgtttttctctccacttgtttagatactagcagagttgagctgggttggagttggtgtgtggtccatggtgtggggtatctgtgagtggggttctgggagtgtgagacagatatccatgtagtcaagagcaagcttgaggtatgtgtagggttgccagataaaataaatctgctaaatctagcaaccctaggtatgtgagtttccttggactcatgcaagaagcttctctccaagacctttttccccggacagtctgtcacccaggaaattccaattccagggctactagtccctgtccaatttgctgtccatggtttgaggacgagatttctcttttttccaatgacagtttatgctggaacagcacattaaatggatccccttggtcagaggtcccagagggggcccaggcgacttcctctcaaaggacatgagtagtcagacctgccttccatttttttctgcccttaccttggggggatgaagaactctattttgaggattctgtgaaaagggttgcaacccaactctgttctatttctttgcaggagcctgggtgagttctttctccctatcctg

SEQ ID NO: 1474 - DNA, 2300 bp, Homo sapien
cagcttcaacacagattgggcccatttcagcctctggggcacggaaggggagatgggcgctggacgtgagcaggaactgagcggatgcctgggctgctgccccgacagcgccgcacagtggctaaagctcgggcgtgcgaggccggaatcccagctgcctccgctgtagcaaggctgtgtgaccctcattaggtgacttccccgcttcggagcctcagtttcctggtctgcatagtagttaagagcagcgaccttaagtcaggctcctggggttccaatcctgccttcactacttaccctatctgtcaccttgggcaaggttctttgcgctttgtttctgcctttgtaaaaatgaggctagtaacacctacctcagaactgatgtataagtgtagccatattctaggccatttaggaaagggtactgagaacactttgcagtttcatctaacagcagcctccaatctacgggatagcctggtgttaatccaactctcccattccacagatggagctacagaggcccaggatagggagaaagaactcacccaggctcctgcaaagaaatagaacagagttgggttgcaacccttttcacagaatcctcaaaatagagttcttcatccccccaaggtaagggcagaaaaaaatggaaggcaggtctgactactcatgtcctttgagaggaagtcgcctgggccccctctgggacctctgaccaaggggatccatttaatgtgctgttccagcataaactgtcattggaaaaaagagaaatctcgtcctcaaaccatggacagcaaattggacagggactagtagccctggaattggaatttcctgggtgacagactgtccggggaaaaaggtcttggagagaagcttcttgcatgagtccaaggaaactcacatacctagggttgctagatttagcagatttattttatctggcaaccctacacatacctcaagcttgctcttgactacatggatatctgtctcacactcccagaaccccactcacagataccccacaccatggaccacacaccaactccaacccagctcaactctgctagtatctaaacaagtggagagaaaaacagtgttggcgtcatcctactccatttcaccttctgaatgtcctcatttcttttttttcttttcttttttttttttttttttttttttgactgagtttcgctcttgttgcccccctgctggagtaaaatggcctgatctcagcagctcaccacaacctcagcctcccaggttcaaatgattctcctgcctcagcctcccaaatagctgggattacaggcaggcaccaacatgcccggctaattttgtgtttttagtagagaggaggtttctccatgttggtcaggctggtctcaaactccctacctcaggtgatccacccgcctcggcctcccaaagtgctgggactacaggcgtgagccaccctgcccggcctgaatgtcctcgtttctaaaacagcaaatgggaaccagtagcttccttccttgccagcactcccctggctccccaggctttggtcagggtgagactagccagggcacttgctgcccaaatttcctgcttcagagaagttctaccaagcagctacagcagccagcccttgcctctgcctggccttgctgcacgttcactgctactgagacctacactggggaaggggagtacagaatccccagcttctgctctgcagggttggggagggagaatccagacccttcacatacatactttttacaggagcggaaactgaggtccaggagatcatgttacttgtcaggcttttgaggggcgctaagctgggttggacctacgtgtccgggttcctagcccagaacccctctgtttatccaaatagctgtttctctaaccgagctcctctctgtatagagggatttctagtagcctctcctcccttccaaggttctgggccagtttgttttcaacagtgtcaggagtaagtgcactggggactgggagaagggccaccgcgggattcggaatttatttcgttttctttgcttcttctgtgacccttacttctttcgcctaccggctcagcctgttcggcgtcttgcagcagtgcctgcgatcccgcgtgagtccgtcgctccctccgcgaaaacctggactctttcccagaagccttgggctccagcaccatgcctgctgcagccgccaaagagcgggaagccacaggctctgcgggtcttggttacagcgtctctggtcgtgccgggcctccttctgcatctgttcca

SEQ ID NO: 1475 - DNA, 2300 bp, Homo sapien
gctgtgcgggggtcctggggagactgagattaatgggacttggttccctccttcctgacaccaaggagccccatcaatcattctccatggtctggtcttagactgacttgccaggccctttgtgatctggtctggctgtttttgtgtcttcagcctcacccccttcccctctctctcttttacttttacttcttgctgctggagggcatgcacacagtgatctcaggccctggggcccggggtctgggctgcatcttgaatcctgagcagccctgacctgaggtagggcccactggtcttggcctaatggggaaagggcatgctgtgtgtgggtgagaccacggcactctcccaggctcaaattccccatggctcccctctgccctgggaataaccatgaacttcttcaacatggactctcagaagtacttggcagggacctgtctgtctctctggactcctcctgctccctaacctccttgctttgggtttttactgccttcatgtgccgcccatatagtttttttgaatgtgcaatttgtttcctgcttcaggacctttgcacatgctggtccttctgcccggtatgccattcccatcatctctcccctttgcctccttaacttgtaatatttcagacagttgctcaagtaccacctcctgcacactccttccctgatcccccagatccactcaggggcccctgtttgaagctctcctacaccctggactctttattcagagtacttataatggtttgtctttatatacttatgaggttaatcatttgttccatgacagggagtatgtgaagtttgtcacaagtatttcattcaaatcctgccaactctgtgaggtggttctcaattttatccctattttactggtgagacaaaggaggcacagagaggttaagtgactttcctgaggtcacacagcaagtaagtggtggatgaatgaaaatagtctagcaattttagccatgtgccaaacagtcatctaccgacttctctgcagatgtaacgagagtgggggctatgtcagctttactcattctcgtatcccagtacctagtccaggacctgccatttgtagccactcactaaagggaaaaagggaatggaggaaggaagtgggaaggaaggaaggaggggaggagtggctggtgtgccagctgttagagagatatccttgagcagcctttcctagaggggcggcctccagaggccatgttttccatcccccccaacacccctgccccagctcctggatccaggagagccagtgttcaaaaccagtcagtgtgctttctcaaaagaggatggaaggagcacactgggaacccagatgtgaaccagagcactcccatctgggttcccagtgtgaagccagggcaaaagcaacagaacctcgggattgggggccctgaaacggtgcgtccaggggtcctcagctgtggaacctcccttttcaaaatacctccccttccctctacctccaactcccacctcatctccttggggaacatgcctcagctacagggagagacatgtcagtgtagtgacagggagctcatcacctgcctggctgctccatgccctctcggggcacggatgtcggctgtgaagaggaccttccgtctctggtcctgaaatctgtccccaggaggcttcatctctgctgggggagcccaactccacccagcctgctcccaggactgatatctgctcctctagggatgagggcccagtcccttcacgggctcctcgcaggacatgcaaggaggcctcactgctctctcttgtggccagactcccaccatccccagccacacccagaccgaagctgtccagagccgctctcaggggccgtgggcccaggagcaggcctgggaggtcagcaagcctgggaggcttccaccccagctcctccacccccgtttgaaggggatcaggttcccccacaaacataattgaacgaaaatatgagagagaaaaggtctttgttctcccatttacagcgtcagaaaatatgtaacaaattagccgtttatgaggtaagagagcagggctgtgtgccgccgcggagaggcagggctgcgcataagggggcctttcagccggcttcagggggcggccaggcgggcaggcgttgcgggggaccggctctgccccaggcctgccagtatggcctggcacccatgggatggagggctgggaggccctggttgacctctggcttggactctgggtgaggcttggcaaatggggacgtgatgcccaccagctcatgatgcacac

SEQ ID NO: 1476 - DNA, 2300 bp, Homo sapien
caatgtatagccaatcaatagcttatgttattttaagaacatcttgataaacaacatagaaacttcctccttttttcctttaaaacttgacctgtggccaggcgcagtggctcacacctataatcccagtaatttgggaggtcgaggcaggtggattgcttgcgcccaggtgtttgagaccaatcagggcaacatggtgagactctgtctctaccaaaaatttaaaaattagccagatgtcgtggtgcttacctgttgtcccagctacttgggaggttgagttgggaggattacttgagcctgggaggtcaagtctgcagtgagccatgactgcgccactgcactccagcctgggtgacagagtgagacctggtctgaaaaaacaaaacaaaagaaaacaaccaacttgagtctgggtgcagtggctcatgcctataatcccagcactttgggaggctgaggtgggtggatcacttgaggtcaggagtttaagaccagcctggccaacatggtgtaaccccatctctactaaaaacaaaaatacaaaatttacccgggagtggtggcgggtgcctgtaaacccagctactagggaggctgaggcaggagaattacttgaatctgggagatggaggttgcatagagccaagattgtgctattgcactccggcctgggtgacagagagagactccatctcaaaaaacaaaagaaaacaaaacaaaaaaataacttgtaactgttgccaatcagagtgtatattcagggcaacttgaatctatggtcctgggtttcagtcctcaaatgtggccccagtaaactctctacttatattaattttgcctcagtctttttttttttccttttaggttaacaaaaagcatgtagtatccatttttcattgctctttccttaacttctgtgtgggttggggtaacatctttacttcctgatgggaaggctttgatgttgataaaaggccaatgagtaggtagggaaggtttctggggcatgtgactgggggagaaagaaattttcccaggctgtcttaggaaccacgtgctttgccaatcgccacgtttgttctgcccggcccaatctgagttgcaggaatttaatcttaataattggatgataaagaacacatccacccatagagccctaaaggagctggggtttcatcagcttgaggagcagtattctattcaaacctatgcatatgtgggagaggaaaaaattttctatcctcttagagtttctagctaggcccaaaaatgaaaccgacataaaacagattaacagaagaacagcatgcaaactttattcctttttttttctttttttttttagatagactcttgctcccaaacccaggctggatgcagtggtgtgatcttggctcatagcaacctccacctcctgggttcaagcaattctcctgcctcagtctcctaagtagctgggattgcaggtgcccaccactacgcccagctaatttttttttttttttttttgtatttttagtagagatgggattttgccatgttggccagccttgtctcaaactcctgacctcaggtgatctgcctgcctcccaaagtgctgggattacaggcatgagccactgcatatatggggatctttataagaggacaaagacctgaaggagtgactggaacagaaagcttttatatcatttaaataaagaaatgatactgtagggaaagctcactgaaaaatcaccgacatgagacagcttaataggataaaatgcacacaaatttaagaagtgaactgccttcatgcaacatgcacagaaagtgcacatggagggaattacagggtgactactcacttgcaatggggttaagaagcttatgtaacatcctgacaacaggttatgggagtggtgagaagaggaattccattgaggggcaataaaggattatgaaggagaatgaatggattctggaactgagagtaacttgtaaatagttctctttgacagtgaaagggcctgttctggtgtggtcacatttgtggtcttacaggaaggggaagtaggtatggataaaggaaattcctctatctttagactgtatggggccgggcgcggtggctcacgcctgtaatcccagctctcagggaggctaagaggcgggaggatagcttgagcccaggagttcgagacctgcctgggcaatatagcgagaccccgttctccagaaaaaggaaaaaaaaaaacaaaaaaaaaaaacaatagactgtatggataaaggaacttcaccttccttgggagaga

SEQ ID NO: 1477 - DNA, 2300 bp, Homo sapien
agatcaaagccccagcaggtttggtgtctggtgagggcccagtctatgcctccaagacggcaccttgtggctgtgtcctcacatggcagaaggtaaaaaggcaaaagggcctggctagttcccttagcccttttataaggtactgatcccacccatgagggagaagccctcacgggctaatcactcctaaaggccctacctcttagtactgttgcattggggattcagtttcaacatgaattttggaagcaacacaagcatccaaactatagcaaaccccaagggctgggtgagggggctccttgtggggagcatagaaagaagtacaagactcagctgtcttctccctgcgacattccttttcccatctctggaagagtcatccggatccagagccctcactatggtgtgctcagaggcctaagctcagaccactccttccctgctccctgattaacacccagagatctgccagcctcattccccactgtccctgtatccagctcacccccagggaccactgggcacctggtccatcacattttcctgatgtttctaatgctgcccctcctgcatccctgttcgtctgataaacttgcctttaaacgtgtatatgaaggactcttcctctggtatctaatcctaacaggtgctagatcccacagagccctgtccagctggggactatgctgacctctctcccagatcaatatccctctcctcggggctcagcctggccagtgcctgatgttctgggataggagaactggggagagaaggcctaggaccctgcctctcacttttctttccaccaaaaggggaaaaaagaggatctggtcctcacacccagccttgggatacttataagatgctggggatagggtgtgggacagggccagtgagagctggggatggggtgtgggacagggccagtgagatctgttttcctgctgctccagtctgggccctacagcagatgcatgcagagtaatatttgtaagactgaaatattccaaatgcagctactttggaaggaccatgtgagcagatatctaagtgcgtggcatctgggccccttggctagatggtggtcgatgttggtttctttgtgttaaccccaagaacattcagtagctcagggtttgcagaggttctcaggagcacatcttagcctcattggtggtgtgaggcaggcagggcacaggtcacactgatgaggacacccgggcccagagacatttagcaacctgcccaagggcatctgtagttcagtgagaggtggagctgggactgaaatctaggctgcctgagtcccagagatggtcttccctggacccagggagcactgtatctttttcagggaaggcctcctgaccacaaccatttcatctgtcacagtacagaataggaagtatgggtcaggcatcagaagatgtgaattctggctctgccttttcagagatggccctgcctagttccttggaataaatgatgatgtcttccccagcctcagtttcctacactatataaaaagagaaagcaacatctaggtaggttggaatgggagtacatgaggtggtggccactttgctagggtcacagtagactcctcacctccttccccttgtcttcctctcactaggtaaaagacaattgtattgaactcttaagaaaattggactccagtcccggctccacctttacttccctgggccttggttttcccaccacacaggagtttgaacactttgatttctgaagtccttcccacctctggggttccaatattctgctccttttctcctcttcctcctccccctcctttctcctcctgctcatctggggttagggagattgcgtgtatgtgtgtgcctgtgtgtacacatgcatgtatgtgtgtgcacgtagtggcagcaaggaagaggaaggaaggagtcctgcaggggttggtggtggcagttgggagaaaaggaggcaggactgtatgtgccagcagggctcagagttttctcaccaactaatggtgcttggggcagtttaatcattaaaggaaaggaatgaagccaggagcgcctcaaagtccagcctgctgttgaccaacactaacagatgagcaaggagctggcagcaatggggcctggagcttcaggggacggggtcaggactgagacagctccacacatagcactggactccagagttggtctgcacgcctacgacatcagcgtggtggtcatctactttgtcttcgtcattgctgtggggatctgggtaagtgggccctgaggctggggctagca

SEQ ID NO: 1478 - DNA, 2300 bp, Homo sapien
gtgcaagagagactgtaagatctctagggtctgttccatgtctaacaatataaggttctatgtgtaagcaaaataacagcaatgacaatgatgatgacaaagtgtgaccttacaagggctcctgcacttgcattattcatgcagtgccactgaaacctgacagaatctgggaggaagctagcggtaccccagggctggagccttggttactccccaggatagcctagaagagacaggctggctgtaccttgagaagctgagggatatcatggacaccactccacaaaaataatgtgagagctcaaggtcattgaaaatgaggtcatggaaccccctcccttgatggtgcacctaagcaagtgtctactgtctgcacaggtctcatctcactgacaaccatgccgcacagcagtacctggctgaactctgggtgtttctgctcattccaaagtttttgaaatcaggatcagtatctcccatactcttacatgctgggaacaggtacaggttagggccaaatggagctataaagaagaaagacatgagaagtaccagagcttttcttaaaaacaacagcaactaaaggaaagtctctattctgatttctgatttatcatgacagaagtttgggaaggggatcctggtattccctgattattacaaaagtttattccattttagttgaatattaaccatctgttaattaacttagtactgatttaattttatgaatttttaaattactgcccccaataagaaaactctgagtcagcacggccgagtcattggttcagtcagttcacaatggagccaggattcaaatcttagtctacctgactctagagcccctattccactgtgcctttaagtcaagacgaagtctcagtattaatggagaactcattttcccattagtagatggatttgcccaacatggcaataaaccagtgggagagagatttggggagagagtagttttaccttcctagggtctcccacctggatctcacctcagctcttgtctgccctctctcacagggagctttctggggcctcgtgtttggcctgggagtggggcttctgcgtatgatcctggagttctcatacccagcgccagcctgtggggaggtggaccggaggccagcagtgctgaaggacttccactacctgtactttgcaatcctcctctgcgggctcactgccatcgtcattgtcattgtcagcctctgtacaactcccatccctgaggaacaggcaagtgttgtgctcatactgaggccctccagaaatgctctcccttcccccatagcctagaattccactgctgacttttactctgttgggttatggtctcccctgtggccacacagatgtccttgggagggaaagtgccttgggctatgaattccccattgaaaagtaattcattcaactcgaaaattactcagtgagtacttactatgtgctaggcactgtgctgggcttacaaagatgaatggtccctgccagagactatcctcagggagaaacagacgctgacacaagctatcactatacaaagagaaagtgcagaaggaccaagctcaaccagaggggccaagaacagagggagaggcagtcacctcctgggggcccagggagggcacactgatgaggacactttgaattagaccctgaagaatgaatagagaatttttgagtgggcaagaaacaaatacaagagaaaagaaacagagagcttactaggtgaagaactcaaattgaaatcctcccctgtcacaagcaacggcccttgaacacttacagcctagagctagggctgctgaaataaaagaccaccgattgggtgacttaagcaacagaatgtatgatttcacagttccagaagtgagaagtctgagatcaaggtgtctgcagcattggtttcttccaaggtttttctctgtggcttgtaaaagactgtcttctcctctttgtctttacacggtcttcccctatgcctgcctgtgactgaatctcctcttcttttaagtcataatggattggtgacctcatttaaccttaattttctgtaaagaccccatctccaaatatagtcacattctgaggtactggcggttaggacttcgacacagaaattttgggaggacacaattcagcccataacagagcccatgctggaagacagtccctgaaacactgagtggacatcatggataatactcttttgatggatggtgctttagagtttgcaagatgactttatacccttggtttcactgattcctacaaaaaagcag

SEQ ID NO: 1479 - DNA, 2300 bp, Homo sapien
tcattcacagagcaccctcataatctttgcagtatttgcatatatcttatgctcttttccttaaagccactttctcttctttatttatttatcatggtgacataataaatgaaaatccagtatcatacgctttacatgcatgatagcctttaaaaatacaatggaaataaaactcaccatgataaatgaaattgcagtatcatatgctttacgtgtatgatagccttaaaaaattgtgaaaataaaactcaccacaacaaataagtatgtgaagtaatagatacattaagtagcttaatttaatcattccacaacatatacatatatgaaaacatcatgttgtaccataagtacataaaacttttgtcaattataccttaataaagctggagaaaaaagaaaaagtgagaatctcgggaaagaattctcttgcctatgcaaagtacattcattcaaagaactcatgcaaggtcctacttttctagaaaatgttctgtgagcactcctggcttcatggctcttttccatatagaagtcctaaagtgttctattacttgaatatttattaactaactactatgtacctacatgaaaataatccttttttattttcatgttcaatgctgcagatatatttatatgacaatctacctcttgaatacaaaaataatcctgtgaacttaccacctactatcccctaagggaagccctgatattaaggaatccagcgatgagagtggaaaggaattaaaggggttgaaatgcagtttttggtggaattcatttggaaaagagggctcttaatacctgactttaaatggaccagccaacttatagcaggattatagccaccttaggataaagattagtacttgctcttcattctatatttgtatagatttggtttacttgttttcccttaatagtccactcacataatatgcatatgttaggaattcctactatatgtcagataatatgctaggtactaccaattattatcaataagcaagatcaataggtccttgccatactgtgtacatttgtgtgtagaacaaataccaatgtgcatgtgtatgtgtttgcataaattttaaatgttaggatgagactggactaagttaattattccaggcctcctctcctctagtgagggccttaaaaaaggaacaactctatatataaacactatacagcagcagtccccaaccttttcagtaccaggaaccagttttgtggaagacaatttttccacgaactggtggggggcggggaggatgtctggtttcagaatgaaactgttccacctcagatcatcaggcattagttagattctcacaaggagcacacaacctagatccctcatatgcacagcacagtagggttcgtgctcctatgagaatctaatgctgccactgatctgacaggaggtggagctcaggccataatgctcactcacctgccactcacctcctgtggtgtggcccagttcctaacaggccacagacaactactcgtctgtggcctgggttggggactcctgctatacaggaagagccctatctatataagtgttatattcatagtctatactagtggctctcagttatgaatccttagatagatggcaaaagagatgcataagaatcacccagaaacttggtaaaaatagaaaattccagtctccatactcagcaatttcaatttagtaggcttagaataaatatttataaagcttcacctagatgattctgtcactggtagatctgtgtccctaaacagtgccttgattgattatttaattgtgctatacttcttttatcatagttaaagtatggcaaagtattgtggtattcagtaccagtagcacaaaatagtttaatagtagcacaaaatcgtttaagaaaataaatagtttaagtaagtacataaacaatgatattttaagaaaagctatggtttttctttttttttttttttatatgaatagttaaattttttttctttttttttttaattaatttatttattttttattgatcattcttgggtgtttctcgcagagggggatttagcagggtcataggacaatagtggagggaaggtcagcagataaacaagtgaacaaaggtctctggttttcctaggcagaggaccctgcggccttggccttccgcagtgtttgtgtccctgggtacttaagattagggagtggtgatgactcttaacgagcatgctgccttcaagcatctgtttaacaaagcacatcttgcaccgcccttaatccatttaaccctgag

SEQ ID NO: 1480 - DNA, 2300 bp, Homo sapien
tcttagaattaatttattaactaaccagaatacacaaaattcctaaaaaaaagacaaaaatcctgatagaatatggggtaaagcattatgagcagatgatttttagtaaagatagaaaatcttataagcatatacagacatgctcagactcatcagtaatctgaaaaattcaatagtgagataacactttacatctgttatgttgggggaaaacaagaacccttgataatgccaagcctgggaagaatgtggggccatagtaaccttcgaatattgggagcatagactggtatggcattctggatagcaacttggaattatatggtcaaactgagaatactcatactccatgacaacaatttatcttctgttcatcacagactatatgtaaaattaaaatacaaacacaaagtggaaaggatatttgcaacatatagagtagacatataattattatccagagtatataaagaactgagagagagaccaacagaaaagggggcaagataactacttggcagttcaataagagataatggaaaggctaacaaaaccaaaggtactcaacctcaacagtacccagagattcaagataaaaccacaatgaaatacctaaaatacacacatccaaatatacaaaagttaaaaatccaaacacaaatgttgctgatgatgtggaaaaataagaactcttatacataagcaccagaaacataaataggtacactactttggaaaatggtgtggtcttactttttaaagacccacatgtgcaaaaccctaatacccagctaacccactcctacgctagtacatgtgcattaatagacacagacttgtactacaatgttcacaacattgttaataatagctaaaaatgaaaacagtgtaagtgatcattgatagtaggaaggataaatcaatctatattggaatactgtccagcaatggaaaaaacttcagctacacagcatcaccggtggcataatattaagtgggagaagcaaatcacagaagaatacatacagtattaataccatttatatactatcaataccggaaaacattaaacaatatcttgtttagaaatgcatacatgaatggcaaaaggaagagaattattgtacaaaagtcagggtagtggttactccagggcgagaaaggcaatgtaatcgttgggggcatttttcaggtgctggtaatgttttatttcttaaccgggtgctagttgtacaggtactgttcacattattattaagataaacgtgttttatacacttctgcatgtataatgtattttgcaatacaaatgatttttaacatgattggattgggcaatctcttaggttctttttatctttgatggtctattgtcaggcccttcacagctggacttattgttggcacctcattgacagttccacttaagcaatatgcattaagacgcatacatgggtgaattagacaggaaaatttgaagggaaaagggaacgcgctaacaaagggaatcacagaataggagactaggagtatggaccatctgatgcaagcccctctcctcagggaggcaactggggtttaacttgagagctcctgggttccagtcctggttccgactttgatttgggcaagtctcttccctaattcccagtatccttatgctggctttgtaaaccgtgccgtgaaatttaaataggaggactaacaataattattattcttttacaattgggaaaactgaggccacagtgggtcgccactagcccaaggtgccatcaccacgttgtaactcaggggttccctccgacggccttacaggaactccaactccctgaacagagcaccgtcccattatacaaacagcagctccctttcgtccggctttgggcgcagtttgacgtcacagaagagctgccttgcctcaccccgccccttcggaagccccgccccctgcccgactccgcctcgctcggcgttcgtcaagctccgcctccagcgctcgtcccagcgcgggtagccctggagtgccccgcgcggcctctcttccggccccgcccctcctggctgccatgacaacgagtctgcgccccgcgctcagctgcttctccggcggaacccaggctggaccgcgggccccggcctgggggccactgctgccaccgccgccgccacctcgtctcctccccgtccccgcccagccccaggtctccccgcctcactcgggcccgtggccggggtcactccccgccgcccctccccgcacggatgccgaaggtgaaggcgctgcagtgcgccctggc

SEQ ID NO: 1481 - DNA, 2300 bp, Homo sapien
acagtaaatgtgctggaacaactcagagtggctccttttttttccacaagcttgtggggcaagataagaccaacagctgcatcaggacaagtggtggtcatttttggctgtaccacataaccagtgggttggtttaaaaaaatttgtactgacctacacatttggatatgagagctatatgttgatgggattcacttatataacgcactgtctatttcacagtgaaataaatatctgcctcattgtcagtgcagctgatgtgaaatatgagcacagtgctttgattttataatgtttgatgttttctgatgataaagtaataaaacattgtggaaaatagttacatacacacacacacacacaatgaatacaaggaaaaacaaaatcatctaccactactaagaagctaaaaaaatcactattaacattttggtgcacttattctgtttttttcttacagctaaagtttattaagatgaatttttaaaaatataacatttaattgagtccaacacctccattaagcattcctctatgacaatacttttctcattatactgtcattacttgcttatacttctttaatactcctagactagattgtaaaggttgtgaggatgggaaaggtatgttattcatacagttacctaattttggcacaggaacccaaaactgagattcaagttctggtacactgactttgcaaggcccaagaatccaggtgtttatcttttcatttctatcaccagcacctggcccagaatctggcaggtggtgtaaactcagtgaatattggttgcttgaataaaggaatgaatgaacagatggatggatggttggatggatggatggatggatggatggatggatggatggatggatgtgggtttttatttattcttctttacccaaaattcattaactccctgtcaagtgccaggtctggctaggcaacagaaatataactagccatatttgatacgaggcatccctgtgaaggtactgacctcctctgatgtgggatagggttcctatgagtacagagcccaatcagccccctttggctggtcctcacggcttgtcttggaggggacccaagcccctccaggctctctttggcaagagacagagcaaagaccgctattccatggagtactattcctgtactcttcaaagtgctccagaaatccctagccttgggcctgtgttacccagagcgctcctcaactccctccgcgattccaagttgtccctgctcagtggtgggcgtgctgtggagagggtatctcaatggagaaagactatagaggagaggggcgccactgctccctcagatgagagcagcccttgacaaaccttccacctccccagccagctggcacaactggaaatctcagataagccccagttctggtcagaactggtttggcagctctaggggaaattttctgtctgactgaccctttccacagagggagctggcagttttgcagaacaaaacaaacaaacaaacaaacaaaaagaaagaaagcaaagaaaaggcggggccaaactaagggctgggaaaggcgcggggagggtgcggggctgggggcgcgggtagggtggctacatttaaaacactccaaacttctgctggcttccaagtttacactttgagattcaatcaagattgcccccacccctatcccgcattcactcactcatacacttctctacttggcaatgcagttttgttgcaatgcaatttggcagcgcgattgttgaagcaatataatcctgcacgcagcgcaccttttaatcaatgcatttttttcctgcaatgctcttgttattatttttattgcaactgaatctctgaacccttttccctccccattcgaatcgcgctccggctgtgattgctcgggtctgactttgcaagtggcagtgcgcttccaaacccccctcatccgcccctcgtccccctttccccccctccctcccttttccgcgcccaggcgaaagcagccgattggcagaacggtgctttcaggaacaataacagtggggggagcctgggtcctggggagccgcccccgccccccccagcaccgtagcgagactcgcgccccccgccggatccccacctccgcgcccgccccgcgggctgagctgcccgaccggggcccgcccccggcgcccaccatgtacgcctttgtgcggttcctggaggacaacgtctgctacgcgctgcccgtgtcgtgcgtgcgcgacttcagcccccgctcgcggctggattttgacaaccagaaggtgta

SEQ ID NO: 1482 - DNA, 2300 bp, Homo sapien
cactatttattaaacagggaatcctttccccaatgcttgtttttgtcaggtttgtcaaacatcagatggttgtagatgtgtggcattatttctgaggcctctgttctgttccattggtctatatacctgttttggtaccagtactatgctgttttggctactgtagccttctagtatggtttgaagtcaggtagcatgatgcctcagttttgttctttttgcttaggattgtgttggctacatgggctcttttttggttccatatgaaatttaaagtagttttttctaattccgtgaagaaagttaatggtagcttgatggggatagcattgaatctataaattactttgggcaatatgaccattttcacaatattgattcttcctatccatgagcatggaatgttttttcatttgtttgtgtcctattctctctcataagtgggaggtgaacaatgagaacacatagatacggggaggggaacatcacataccggggcctgtaggggggtggggggctgggggactaggggagggatagcattaggagaaatacctaatgtagttgatgagttgatgagtgcagcaaaccatcatggcatgtgtatacctatgtaacaaacctgcatgttttgcacatgtataccagagcttaaagtgtaataataataataatattaataataataaaggccgggcgcggtggctcacatctgtaatcccagcacattgggaggccgaggagggtggattgcctgaggtcaggaatttgagaccagcctgaccaacatggtgaaaactcgtctctactaaaaatacaaaaattagccaggcgtggtggcgagcacctgtaatcccagctacttgggaggctgaggcaggagaatcgcttgaacctgggaggtggaagtggcagtgagccgagaccaggccattgcactccagcctgggcaacaagagcgaaactccgtctcaagaaaaaaaaaaaaaaaaaaaaaaagagaggaacagactttcaagaaaaaatgtgcaagaggtttgttattcatgctctctttatgtccttctttaatacatttgttttataaacatttactccccagccctgtgctaggtacctgggatgctaaagttactcagcctttgcctcccctcaaagagctcttattctagtgagggaagataaaaagtgctgggacaaaatattgtagtagaaagagataggctatccttgaaaagtgtgggtggttgggaaaggcttcacaaaggcaatgacatttgagctgattttcagggtaagttgaggaaggaagaacttcccaggatgaaggcagaaaaagcacaaaagcttgggacctgctaaaacatgctatctttggaaatgtcaaatagtttaggtgtctggagtgtactgtgtctgggaaggtagtaagagatgagattggtaatgttttgtggtcacccccatttagatgcagagaggaggttggccattggctacttgaaatcattttgggaacatagtccggagcttcaaggacttttgttaaatacggccaactctgcatgatccatcttgtgaattatcagaagtcttgctgcacattacttccccttgaccaccataggaatgtattcttaaaataaaaactcactgaggatcagtccaaagaaatcataatcatgacagtaaatgtgctggaacaactcagagtggctccttttttttccacaagcttgtggggcaagataagaccaacagctgcatcaggacaagtggtggtcatttttggctgtaccacataaccagtgggttggtttaaaaaaatttgtactgacctacacatttggatatgagagctatatgttgatgggattcacttatataacgcactgtctatttcacagtgaaataaatatctgcctcattgtcagtgcagctgatgtgaaatatgagcacagtgctttgattttataatgtttgatgttttctgatgataaagtaataaaacattgtggaaaatagttacatacacacacacacacacaatgaatacaaggaaaaacaaaatcatctaccactactaagaagctaaaaaaatcactattaacattttggtgcacttattctgtttttttcttacagctaaagtttattaagatgaatttttaaaaatataacatttaattgagtccaacacctccattaagcattcctctatgacaatacttttctcattatactgtcattacttgcttatacttctttaatactcctagactagattgtaaaggttgtga

SEQ ID NO: 1483 - DNA, 2300 bp, Homo sapien
tcagtctttaagttcacttcttcctttaccccttgttttaaccaaactagacttggttaaaagtctatgatgcttaaatatttgctaaataaaacaatgaactgaggcctgaccctcttggaggacattactaccccaattgccctctcaagaaatcctcattcttctatactgcatgtacagaaggatcaggaggggtcattttcctcctcactcctcatgcaacttccaagccatcatttctctacctcatcactgataactccagaatttagggtagcaatctagttagaagaaggagtgcctataagatttgtcttgaagatatatttccattataagaagactgttatttatgtatttatgggcagtagctttgggagtaggaggcaaatggactctattggtgggccaaacacctttaaacaacctttgatactacctctgacttttatgtgaaagctctgtttctttgttgcttagactgcatatctatcatcctgtctttctcctcagcactttcagattcttacccaccttagaccccatggcccatcattttagtcactttttctaatataatcaaataccagaatatttaattaaatttaatataatcaaatgtatgtacaggcatcaatgccatgtaaccactgctgttccaaaggaatcccacagccacacctcccaccctggccacttagcttcagaaagacactaaggtagaaacaagattctgcaacaaacactagtatgttataatgctctgttctatctgttaacagttttctccaggttgttctacctggagacagcacccttcttgtttttctcaatttcccctcctaaaccttcctcctcacatttgtcttcatatgcccctgtagtctttggcttctcaattgaatgccaagccactacaggtgagccttacatccttcatccactgtatctgcactccccaggagcatcccttcctttaaggatcttccaaatcaaccttggtggttaagacttattaagcaattgataaaaaagcaagagttacacaaaatgtggagctgaactggcctggaattgtccatgtagttagtatcatggaaagggcacagttttagatgagttttgcaggattagcaggatttgaaatgatagaaatgagagacattcactgcagggaaacattgtgaagaggttggatatcataaataatgagagggtagagtaactctttaaagtgggtaaatgcaaagacattatggaaactatgactgcaacatttttgtttcctgtttgcatctcagtgtttagcttagcaaaattgcccacacagcatattttaaagcactatttcccaaagtgcttctgtggaaaattagtctcatggaatgctctgtagaaaataatagtaataatttagagaaatgttgaatatttccctttccttgaatatatacaatgcatatgagtttattttaaaagttcttaattagtcttataatttaaaaaacttgacttccccaggaaaagtaggcctctcccatttatatctctatagcatcacagtctttatttaccttcaaggcacttttagaatctgtaattatattgtctacttatttttaatattttactgaccgcttccccactattatccatgaggacagagatcttccttgtcttatttattattgtacatcaaggcctgggcatttgatgccacatatgttaagtgctcaaaataaggataaacaagtgaatagaatgtgtctatttttgtttaactttgcattttccagacagttgagaaagggtggcactggattgtgagcaaagagctgccagattcaggtctgttttaaacaatatgtggtttgtgttgtcattctcccagccccatcacccatggttcttgatgttacagtttttctccaggcattgatttatatgtattaccttttgaagcttgaacgaatgtctcatatgcccaaatttctttgtttatatattttaggcaaaggctgccacccaaaaatgtttactactaccgctgcccggaccataggaagaactatgtgatgtcctttgccttttgttttgaccgagaagaagatatttaccagtttgcttactgctacccatatacatacactcgcttccaacattaccttgacagcctgcaaaagagaaacatggattacttctttcgggagcagctgggccagagtgtggtaaggcctgtgccaggtttgggttactcatttggaaacaggcaaacttgggatagggacttaacacgg

SEQ ID NO: 1484 - DNA, 2300 bp, Homo sapien
aaatttacaagaaaaaacaaacaaccccattaaaaagcgggcaaaagacaagattacacgcttttcaaaagaagacatacatgtggccaaaaatcatggaaaaaagctcagcatcactaatcattagagaaatgcaagtcaaaaccacaatgagacaccatctcacaccagtcagaatggctatcattaaaatgtcaaaaaatagataatggcaaggttgtggagaaaaagaaatgagtatacactgttggtgggagtataaattagttcaaccattttggaagacagtgtggcaattcctcaaaaacctaaagacagaaatgtcatttgatccagcaatcccattactgggtatatattcaaaggaatataaatcattctgttataaagacacatgcatgcatgtgttcattgcagcactgttcaaaaagcagagacatggaatcaaactaaatgcccatcaatgatagagtggataaagcaaatttgatacacatataccatggaatactatgcagccataaaaagaataagatcatgtattttgcagggacatggatggagctggagaccattttccttagcaaactaaagtaggaacagaaaaccaaatattgcatgttctcacttataagtgggagctaaatgataacacatggtcacacagaggggaacaacacacactggggcctatgggagagtaaaaagtgggagaatggaaatcgggaaaaataactaatgggtactaggcttcatatctgagtgacaaaataatctgtgcagcaaaccctcatgacacaggtttacttatgtaacaaacttgcacatctatccatcaacttaaaagttaaaaaacacaaaaaattataacaaattttttaaaaaagataaatgtttgaggtaatgtatatcttaattaccctgattagatcattatacattctatacatatatcaaaacatcacatatacaaccaaaaaatgtacagttgtaatatatcaattaaaaaattatataaaattcaaaaaggcatttattgatacaaagtcaatacttaaaaatcaattgtatatctatatactaacagtaaacaattagaaaataaaattttattgtgataccaattatgatagtatcaaatatcagatacctataaataaatgtaatcaaaagtgcaagacttcaaaacgcaaaactataaaacattgttgagacaaatcagggtgttaagtaaatggaaaaatctatcatagacatagatcgaagattcattattaaaatctatgtaattcactaaaaacccattggaagtgtctgtgtctatgtgtgtttatgcatgtaaaagttgataatttaatcagaacgtttatataggagtgcagaaggccaagaaaagcagcaacagagttttagatagcaagacttactgtaatgttatagtaattaaaacaatttagtttacattgctgtggatttgtatagctagaccgatggatcacaacaaagagcctgggaatagacgcaatacatattaaaaacaatatcgtagatcagatgaaaatttgaactataaatgaatggtcctggatcaatgggtcatccatatggaacaaaccaagctgggtctctacctagcaccaaatacagaaataaaacccaaatagattaggaaataaaatgcacaaagcaaaacacagcagattagtttatggactcaaagtatgtacagtttttttttttacaaaaagcacagaagcattaattatgaaggaaaagatagacatatttgagtattttacaaaaaaaaatactatgcaaaacgataccacagaaaaatgaaaatgaaagtcaatgattgaaaaaaaaatagaaccactgctctcttcaaagctgtcagacagggacatttaagtctgcaaaggttactgctgtctttttgtttgtctgtggcctgcccccagaggtggagcctacagaggcaggcaggcctccttgagctgtgctgggctccacccagttcgagtttcctggctgctttgtttacgtaagcgagcctcagcaatggcgggcgcccctcccccagcctcgctgccgccttgcagtttgctctcagactgctgtgctagcaatcagcgagactccgtgagcataggactctcctagccaggtgcgggatataattctcctggtgcgccgtttcctaagcccgtcagaaaagcgcagtattcgggtgggagtgacccgattttccaggtgctgtcacccctttccttgaccaggaaagggaactccctgacctc

SEQ ID NO: 1485 - DNA, 2300 bp, Homo sapien
catatgaatggtagcacggggaaactaattcccaggagcccatgtaggggacgttttccccccacttcccatgctgtgttatttttcacacaacaaaagggaagtctctgaagactccagcagtagtgaagaagtctatactccctcctgcactgcttcctgaggaatagctgacacagaggagaaccgaacctggtcctgtcagcaagctggttttccaggcttttcgtctcctctgcccagtaaggcatttgtctatcaattctgactaacaaaactttctgcagtgatggaaatgttctatacatatgttgtccaatatggtagccagtagccacatgtagctattgagcacttgaaaagtggcaattctgattaaataactgagttctaaattttacttaaaatttaaattgaccaatgtggttcaatttaataatgttatatttgtctctttatcctcagcatctgcacagagcctggctcatactcatcaaatgcattttcattcatcaccctatttgtgtcttagagctactctttgtggtaggcaggacctttgtctcagtttgttggaagaggaaactgaggctcagtaagtttaagtgatttgcccaagattataaagctataacatcagtctgagtagaacccacatctttctctttatttttccatctccctatacttaatgtagttcttttgttcttcttagcccttattgactcctccgacaccgaaattcccaaaaccctcacagcctttacataagtgtcattaggactgtggaaagcacatatatattcatcttgatagttgtgtggacatggcttgtgaattttaaactgttcaaatgtgagagataattctgatagctattttcatgtaactttctgtacaagattcttatccctgattttaatgcagatgaatggacagttccatgcatgtggccagcatcttacttagaaggccttccggtccgtctctgcatttctgcctcaaggctttctctcaaactctagaagtctgctcagccctggcaagcataaccaggaaatgtgagagagttcaagctggaaggtggagagcaaccctcaaccaatggagacagaaattaggagacaaatgccccagactctgtgttcttcagtgggacaacggcaggcacacattctaccctgtttttcagagtctgaagcaagattaaaaatagttgtctactaaagcaatcagctcaataacacatttttcttagcgtttttcccccttccctctttcactctctccacctcatttcctttcagattaccaccattttccattcagcagacattgactgagatcctactttgtgtcatgcaccacgctgcactatggagtatacaaagataagagaacaaccgtaggtatcagagagctcatggtcgagaaggaaataatgcataaagcatttggaatagagggaatatacaggggactgcgggagggcagagctggtcaggacgggtaatgttccagcttggttttagacgataacggcgtgtcactactgaaaggtgggaaacagcagcccatatttactgaaaaatacgtcagcaaaaggataagtcttttctggggttgagggttgctgtcgcagaggggcaaggagccagaaccctttgggcctctgtgtgtttgggttggggtgggcacacagttggttttcagtgcatttcagttgaagacgagtaacccaggcaaaccaaggggagaagctttgggaaatcaagaaacctgtcccaagtccccaaagttgagcaccaaccacagaaaagccagtttagctagtctgggcggtcagtacgaggaccccggtcgccgtcaggaaagcgccatccctacagacctggcccctgtgctctaggggtggcggagcctgctcagttgccaggatgcggtggatcggttgcggaggagcagcgccccggggcccaagtcccagctcaggcccgggctcgcgccgcgggggcggggccttggacgcacgctcctcccaggcgtccctcccgccctcagccgcgcgccggccacccgcgcgcctgccgcccgttgcccaggcaaccgtcgtgccgcgtcttcctgaggtagctcctgtcagcccactgatcccaccacccgctccctactgccccgcggtcttcgcgtgagctcggagactgagggacaacaaaaatggcggaggggagccagtcggcgcctgaggcaggtctgtgggggcggccgatctggggaaggctgaggcggccaggctgtcc

SEQ ID NO: 1486 - DNA, 2300 bp, Homo sapien
atgtcagctattaatatcattactgtttttaggctttagaaggatcaagcaacttgttcaagatgacatatcttgaagaggaaagagctaagatttgaacttaggtttcatcaataccctaactacagtggttaagactatattctttactatgctaaactgcactgaatttttgcctgctggcctttgccacaatgctttgctcattgtagttattttgataataattagagatagtgatacactaaaactaatgttttattttaattctaaaataataaacatttactactgatttttaaaaaaaacacaggcaaaagggaaatatgaatcatgcatcatcccaccttccaaaataaccagttaccctttcaaaaaacaggatcattctgaagatacaattttatgaactgcttttctcactttgaaatatattgtgaacaacttttcatgttgatattcatcaactgtatcattcctaatgtctccagaatattccattgtatgatcagtcttctttattgactgatctgaaaaatcagtcaacaaagatgttcacaatatcaagttgactgatagaaaagttataaataatattgataatttttccatatttcaaagaatgccccagcaaaaatcatagacccaaatctttgaacatgttaatgattatttacttaaaataaatttataaaagtggaactactggatcaatggatttgaattagcagaattttgagttggtatatccccaactgctcagcagcaaaattcctttgtattatataaccaaagaagattgtaggaaaaaagcttttatagccatcagtgattgttcaattttaaggctgcactaagaaacttgaattgcatgagatggtccatggaaagtacatagcgcttggcatagtgtcaataacatagctattattataatgaaaccatcatcaaatttgttccatttgtcatcccaaatctttttactacctaggattcctctttagtttatttgggcctatttgaagttctgaatcttgcccaagtcttaaaaacagggaaaacttgagaatgctgacaattgtgaggtaaagcaataggctaggggtcgggagaacttttataatttttcctcctgattcttttgtaatctggggcaggtcttccctggacctcagagccttcacctataaagagacactggataagatgacctctttaatatttccattctaactcttgatactaagcttaccttagcccaataatttttactgatacctgtatttcctgtattttgaatcaaggtagattttctttaggcaatagtggccattctcaacaattcaactgttagtttctgagccctaggagtagaattttatgaaggtcaaggagggccaaacaagccactttcccatttttaatgatcatcccattacctaccactgaactaatgttgtgttattcaaacatctagcgtggtttaaaaggccacagagtaatggaagggccagtaactatttttacgtgaaatcatagctcacaaaggacttcggcattttgtttgggtcaattgtttccatttctcactttactttggacatatcttagacaccaaacagccaaacatgacttgaaggatctacttaaggtgtctacattccctgccaaagacaagccaccttctccatgctcctctccccaaagggtaagatttattctaagggttctgaattcgtcacatttataaaccccgtgggtccggcacagcaattaacattggtccaaacggtgtcagtgaactttagctgcaaagaaactacctcatttaaaatttaagcagaccacagggagtagcattggaggaaagagaggagattttctccttcaacattttgagcatactggaatgccaaccccctaggtaggtgccagggccaccacaggaacctgactcgcaggagtcgtcctccgtctctacgcgaagcgccccctcgaggtgggcagggggtggcggcggcgacggtggcggagccgcagagcgagctagagagcgagagcggtgagactctgcggacgtcttcccgcccgccgcgctccgccccacccagcctccgcagcctcgggccggatcgcccggcggggaagatgcgcctcaagaaccaggtagaagcgcctcggcgcaggccccgcacccccgactctgcccgccctctgttacggacacccgctgggccacgtggtcgcgactggcttctcccagcggccagcctggccaccccgactcccagggaggggga

SEQ ID NO: 1487 - DNA, 2300 bp, Homo sapien
ggaagagatatcttacttttagataaggaaaacacatttctagaagtatgcttagatactataattgtcactactgacaatttactgggttgagtaaaattgtgtatgtcaagtgcctaatacagtgtttggtatacagtagactcccggtaaaatatagcgttttcatttgtgctttagaattcctgttaatttcatccaggtgcggtggctcacgcctgtaatcccagcacttggggaggccgtggcgggcagatcacgaggtcaggagattgagaccatcctggctaacacggtgaaaccctgcctctactaaaaatacaaaaaattagccgggtgtggtggcgggcaccagtagtcccagctactcaggaggctgaggcaggagaatggctgaacctgggaggcggagcttgcggtgagccgagatggcgccactgcactccagcctgggcgtcaaagcgagactccatctcaaaaataaaataataaaataaaataaaataaaataaaataaaataaaataaaataaaataaaataaaaactctgccctaactggcaagtcaaagaattcctgttaatttcgttatttcttcttctcctccctttctcccctcccctcctctccctttgaccttttcttccttctttctcctcctcctcccttctttttccatggatgtaccttctttgccttttacatctattcctttattattagttacagaattataaatgagtccagaatttttttaaattccatatcaagtcattttcaaaaatttattaaactgaccaaacactatatcctttaatggtatgaatagctactccatactttacctgctcgtgcacttagatttataaaaatttatacatataccagggttgtttgtttgtttctttgttttggttttttatttttagtaaagctcatctgaactgatatgaagaggccccaaatcccttaatgcagggatcttcagaaatctctgtgtgttttcacattgaccctgctgagttttttgggggttatgatgaagaatatatcagggaaaagtccagacagccattccacctaaatcagatgcttggataaatgtgtatttacctttttttttcagaattttgtaagtaagatagttttcctgtacttcaaattttctttcccagaaagacatcctagtgctttaagagtatggtcaaaggcacatttgaaaaagtaagcatacactgactctggaaaggaaacttttactttcagctactgttcttgcataaggcttaggaatatgaagagaaagcaggaagatgaagtatgaatctactcttaggtccatttacctgcacaggtgaactcttggcgatttagacaggttagacatccatttgtcacatttccccccacagtagcattcttctagctttcccacaatctgtagtagacaaaactacttaggaaggagaaaggcattattgactatcaggtcatatatctcacagagaacattcgacagtgaatttctgatagactccttcacatcagtctggtgcatctttcttgcctctgtagtatgtttgcattttcctataaaaattgatttaatgtttctacatgataaagaaaaaaaaaagacagaaaccaacaccacaattcaacaaaggaaaattaagctttaaattttctcaaaagcttttacatatagtataccattttctgggcagactgattgtatttttcctaaagaaggaaatgccagcagtctaggtttatttttcaagggaagaggtaaaggatgaaaataaattgaaccacaggaaaatgtcaggtcatagtcactgatgacgctatttaaatggtgtgctataatcatattagggcagagcacatggaattcctgatttctgcatgacagtgaagaagggccagcaattatctatatgtgtgtgtgtggatatgtgagtgtctgttcactctaccttcccaccccattttgctaattcaattgaggggcaagaagaggtaatccagacagccggaacaggaggaaaaggtctgcagctgtgttcggagggactggtgtgaagagagaggctcagtctgacttggagttttgtgctgttgcacgtgaatgctctggaactgccctaatcgactgaaaatgagccggctacagtcatatggaacaggtctgtttagccacatcactggatagcctggcagatggtagaccgtcaatgggtggtattgattggctggatttgccttagggtaacaagactatgggtccttaaaaac

SEQ ID NO: 1488 - DNA, 2300 bp, Homo sapien
tttacccttttcaaattaaaagtcttccttggtaatcaaaatagagaggttaccttgagataaacactctttaaattagcaccaaggcaagaaaacttgagaatattttatttactaggctgattacattttaatgtttgaagaaagtgacattttttaattagtgtttaagacatatggtgagtgtacaaattagcttatttcatacaaccagaatttgatgagagcaactcctccttctcactccccagttaaaaattgtcacttgaaacttaatatatgcaaggaggttaaatggtattaagtgatgccgtcttgacttaaagatgaaggacatagtcactattgtgtatggctaaatacggcctggatgggctgggaaaatattactgtcaacacctgtgtttgcaagaaaatgtggaggttccagacctttaattttgtccagccaagaaaagaaaatcccaggtatctgtgtgtgttggtttctgttttagacacatgtggaacatagaatggtgttgcatgctttataagtaataagatcctccttaaaatcaggccatataacaatataagtgatgtaatttatttttgttcaggtggttctatatccttttaacatacccccaatcacttggagctttcaacttgggacattctgtttattcttggcagaggagcagattaattggaatagagtgatacaaaggagatgccaagttagctatacatccaaaatagtatacgacagaaatgttccacttcgaggcagatcttcgggaaaaagaacagcaatgggtagagacatgtgattggcttgctcttgtggttgtttatcactattcatataattgtatttttaaaagagaggcttaatattttgtattttttttcggtgtctttacttttaagctttcagttatttcttatcaggaaagacccacattaaataaacctaatttctacccagaagaaaagttgcacccttaaactcttgcctccatcttgtatgtgcttcatccacatgcacacttttgagttttcatcactgtgtgtgaatatttttctgtttttgctaaagagaaatattttcatgaggtttttggccttccccattgctctgtgttgattgtattttccttgttcatcctttgctgaatgaaacaaagcttgtttgtgtttcattcttcgcagttcttattagaatttgtggcagtgttttgttttgttttgtttcatttccttgctttaagtcaagagaaggaattttatttatttattttgacaagatatagtgagagacaatcttgcctgttaagatgctagtgtttctcatgtcacattttacacccaaaagctattccaaggggaaaaaaaaaagaaatcttttaagatggttcatttgaatctgtgcactctacccacctggtggttatatagtgaactgttactttaaagagtagtttaaacaccagccatgtttggggcaggctgctcttgcaaagagagcagtacatataacaggagtctactgtgtgtgagataaggggaaaattcagctcactgactagaggttttaatgtacgaactctagggaaataatatattgactgttccgtggtgcgcaagaaaattgaagaaccctttgcagacggagtgctttgcaaaggattctatctgtttctcttaaaacaaaatctgtggcaagatgtttgaaatcagcaggacgcttaatgctgctttgttaaataatgaggtaatattttgtcacttttttctgggcagcatctgtttttcccccctcttcttttttttccctatatttatgaaggattcctttttttccgcctcatggaagtcaaggaaatacaattcacgcttccatttctgttccttccttttggtgcttttggagaatttggttgtctttttttatttgcagtttcagccggctgctgtttcctagcccattgtgccacgtaaggcttctccactgcgcggagtaggtagttattaacgctgaattggcttctggtacagtccatctggactctgtgtgggaaagctggctgccggcgactgatgctgagatatctgcaacctttgggatgtgtgcatggtggcaaggggctgactgatatgagattacttcttttaagggaaattgtcattaatgagtcaagaaactgctcatttatggtaagaggaatacagcggcgctggcagccccacagtgctgggatatcatttttaggttgccttagctgcttgagtgagacaagtttctttctgtggtg

SEQ ID NO: 1489 - DNA, 2300 bp, Homo sapien
ttatactgtatatacagctactattttggaaaagtggccagaataccttttaatatacctaatgttaatttatggttcaataagtgtactgaggttagtatggatgggagaaaagggtttttaaaatttttatcttttataacctccagagaaatctaagtaaatattttgttccaagtgagctgtttttatttgtgtttgtcagcattgtcttaatgtttacttttcacaatattttaatattggtgaaattgcactcagagtttatgttgttgatttggggcacacatacctactctgtgtatatatgctgaaccatttagaacactttaacctgtgaattcaccctcagtacacagttcaacagatactgtagtactattgtgactcacaggacattttatacatttgctaaagaaattactttaaaagtttacttaactgagtattgttccaccttaaggaattatagttttaacatttgtacttttctatttcatgtattttcatttctaatagctgaacgtattcatactcaagtctaatggattatgcagtgtacccaacacatattgttttatgatgtatctgtattttctgaagtgtgaatatatatgtatgtttatatgtgtgtgttcatgaaacagcatcttggacagaatagttttaatcttgaaaaatgtaaggttattttctttcctaataatttttcacaaacccatttattcttggactttgaaacccagaaatatagcttattttttggtctgtatgtctactctgcctagttctgtctcactgtcaactctagtcaaagattaaagattacattgaattttgtatttggtaatatgtgttaccactgtgtatttattgaagaacaaattgattaaattatgagttaaataaatagtgacacattagtcttttgcataggtgtgaagcatgaacttctcaggtaagccacttaaaaaacccaaaccagaacaaaaaatacactactgaaggcttggtagtgtagaggttgttaaatgtgtaaataggcagacaaactgtatacctcaccatacacttgctaaatgtctctttgcaaatctcttaagaggccaaagaaaaaaagacatccctttgaaggagagaagcaaaatcacttatttagttaagcaaaatgaacactctgcacaggttttgaaatgaggctgttgtcaaaagcatgttttacctttctctaaaggggtaggagaatgtgttttagtggatttttaaaaattcagatcatgttcctatccaacttgaaaaataaattcatttaagtaaatcattcatcatcctcagttttgaaaagctcagacagaaggcagaaaggtagaggctgacagctgcccctcccttacccccaccattttttttctttttgtttattaggaaatagttttctgagacaaacttgtatgaacctagttcacggagcaagcttaatccccaacttgcttgcttttgaaatgttggccatgttagctggagaaggagcattacttactaaaaatcagcaatatctggaaataataaagttaaattgtagatgaattagcacattaaagtgcttttgttgtacctttaagcctacaggcagatcattaaatatgcatttcgctagaaagcaactgtctagaaagataaggtggttgaaaatattctacggtggaaaagccctccatcagagaggtggcacggttcggccctcaggatgggaaaagaaggaccctcccactgttagtttaggtttgcaagcctccagtgacctgcagttgttacagtacttttgagctgggaggagggaaaaggtaaaaatacaagtatggctgttgttgcttcagccgggccttaattaccagacacaagaagcagttcagaaatctggtctctgttgttgtagaggtcaccaaatcattaacatcgtcaatctggcagtagctaatttaaatagcacctgatgttgcaacgcctcccttcgtttccccagccaatcagatccaggcttcggctgacagatggtcccataaatggatgtaaaaaggggaagcttcgagccaatttcagcaaggctctgttcagttgttcttatctacatcctagaatcgggggtttcagctcactgctccttttcttttttttctttctctcccccgcccacccccccaaaaataattgatttgctttacaatcatccacactgtgttttgtggatctttaattatatataacaatagtagtcattttaaatatatattctgaaatct

SEQ ID NO: 1490 - DNA, 2300 bp, Homo sapien
accaacaatagagcgggcgagcggctcattgagagtctggcagcgccgggcaactgggccccggctgcgcgcagcgtccggcgcgcaccgcgaggggacccggcacggcgagagtcaggtcgcgggttccaaccacgcggcccgcagacgagcctccgacccggatttctgaagggagggttggactgcgctgcgttctgaggggtccggaagttcggacatggtgactgaaggagggtgacgtggtcagataaggggccgggggcaaagggaagcggccaagagctccagcgtcgccagtggagccgggaggcgcgtgcagcgccagcggaggaggaggatcccggagcccaaggcaggtagttgagggccgcagggagagcagtgggtggagacctggtctgcggcccctgttgaggaggcctgggccccgtgggccttagggacgcccgaagggtctgggagaggaggcaacgctcatagagaggaggtctgggactctcggacggagacacaaggactctgtcgcgggctctggcagggacggggaacgcgggaagcagaggagaccgcggcagaagcggggagctgggcctgcttgggccttatggggctgcggcgtgggagggactctggtgtccgtttatggccagttgcgaaggcgactcccctggcttggtgcggcctgctgggccatccgtgtcctaggaccccaactctgagatcagaacgcaggagcctgcgctcgagaggggtcccctgggaccccaagacggggagggcgtgtctgacgactctgtccctaaacccggaggggaggggagggcagtgtgaggtggtcttcgagaaagatccccctcccgaaatgcctaacttttcgcaggatacgtcttccgccccgactactactccagactgcgaagctaaaaaactgcaccacaggttttacccaatcccctcccccagcatttgcctgtggggttttttcttacacattcccctctcccaggcgcggcccctggatcccggacacccagatcagctgcttttcactgttttccttgcccatgaagctcatctttgggctgggtttgcctatacagaaagtttctttggccgaatttttctctttaatacttcccagtcctaagctaaattccacatacattttgtctctcactctctggaggccctcaccgtggaacttttggcgctcacatttttacgggtcccagagccactgggcctaactttgcccaagttgtttcctcgtcctcactctgcttcctaaagctattctttctgttgttgatttttctctccaaagcttctgccccaaactgcattaaaaataaacaaacaaaaagaaacaaaactccggcccaaccggccttcacatctgcgccttcacatctctctcctcttcacccttccaccaaactgaccgttttgctccgggttttcctgttttgcccttggcatcagcctaacttctgggccaaaactgtcgctctaatcccagtcccgtcaaacgagcatttctctcacccgtctcaccccaattaggctaagctttggggtatcatcttaacttttccaaattctcattacagccatctgaatcagtgactttcacactttacatgtctctttattttttccagcggaatcactaattcagacaaaatcttacccctagcgtgtatatcaggtctaagagcagccatggccagactggggtgaaggtgctagggctcacaaggaggttccgactgcacctcctcccagcaattctggcccctctagcccagcctccgcggcccaaatttccctctccagcttgggttcctcaaggcggcgctttggcctagcgcgcggtgtgctcctcaccaggtctctcccctctcccaccttctttcccgtcaggtcctgtcatggagctgcgctcggagctgcccagcgtgcccggcgcggcgacggcggcggcggcaacagcgacggggccgcctgtggcgtcggtggcgtcggtggcggcagccgcggcggccgctgcatcgctaccggtgagcgtggcaggcggcttgctgcgggggccgccactgttgctgcgggcagccgagaagtacccgcggacccccaagtgcgcgcgctgtcgcaaccatggcgtggtgtcggccctcaagggccacaaacgctactgtcgctggaaggactgcctgtgcgccaagtgcacgctcatcgcggagcgccagcgtgtcatggcggcgcaggtggcgctgcgcaggcagcaggcgcaggag

SEQ ID NO: 1491 - DNA, 2300 bp, Homo sapien
aagtcatatcttactagttctctttataaaatgttccaggggcgggccgggcgctgtggctcacacctgtaaccccagcactttgtgaggctgaggtgggtggatcacgaggtcaggagttcaagaccagtgtgaccaacatagtgaaacctcatctctactaaaaatacaaaaattaactgggcgtggtggcgcacgcagctccttagcacctggaacagtgcaagtcatcaagttaatgttgatacataaatgaataaaatcaaagtcttaactcctatggtagtttccagaaggcaacatttctgtgtgagatacaaagatgaatgactcttgccttctagaaattcaccattcattatgcaataaatatctgtagtgtgccacacattatgcttaatttcttttctttcttttcctttttttcttttttcttttcttttttctttcttttttttgggacagcgtctccctctatcgcccaggctggagtgcagtggtgccatctcagctcactgcaacctccaccttctgggttcaagtgattctcctgcctcagcctcccgagtagctgggagcccagcacgacgcccagctaatttttttttgtattttaatagagacgaggtttcaccatgttacccggggtggtctcgaactcctgagtccaggcaatccacccgccttggcctcccaaagtgctgggattgcaggtgtgcaccagtgcacccagcccattatgcttaatttttatggatataatgacaaaggtccttgcttcaagaaattctattttagttgggtgtgattttcttttattttggttactaatatttcatgttacatatattggtgctcgctaagtatagtctacaattaacctgtgaacgctatggaagacaatagggcagacagattatctgcctaattcttttttttttttttttttgacacagagtctcgctgtgtcacccaggctggagtgcagtggcacaatctcagctcactgcaacctccacctcccaggttcatgccattcctctgcctcagcctcccaagtagctgggactacaggtgcccgccaccacacctggctaatgttttgcatttttagtagagacggggttttaccgtgttagccaggatggtcttgatctcctgacctcgtgatccactggcctcggcctgccaaagtgctgggattacaggcgtgagccaccgtgcccgtcctatctgtctaattctgatctttatgttgtgtgtgtatttgtcacatagttacagatgggcaaaggaggaaagttgaaggttaaaaccatggagcacacccaaaatattttcctggtaccataggcatggcaaaattacacttgagacagacagtagaaattattcaggcatactgatgataggtctttattttcaatactgatgaaaataatatttctaatattagtttaatactcatttaatattagtttaatacttctgtatttcacttgtaattgaaccagagtctttgagtatacattttagtagcatatttggaatttgatataattgacagttccaggaggagataaaaatagaaccatgacttacatttcttgattttttcactaatttcaaatactcttcatggttctgataaatttctaaattttggaactttgttataggctttacaaaatgttgctatgatttctccagtttctaaattctgtgtattactgagtcctaagtgaaagcacaattattttgaatgaatttttacataacaattgaagttctgtagatttcaatatcttctgaattttgactgaaatcagattcatgaatataaataatagtttcatacttctgttattctagaacagctgtttcacttggaattgaaccagagtctttgaatatacattttagtagcatatttggagttgatataattgacagctttgttggaggagatacgtatgcagatattatgaattagcctatgacttgtagaaaattcttaagtatacaaagcatttagacttgaaatttaaaaacaccttggtagagaaagagttaacaggttagctccccttggttgttctcagtgtgttctcttgcctttaggagctgaaaatatgataacattgggcccagacatgcctgtgtggaggttagggtactcctggggtttttgcagctagctgtaaagcaagctagaacttgttcatctctgagttccttgtttttctttcaaccctttcagtgccctgcaggagtcattaaatcaaaacttcatgctgatc

SEQ ID NO: 1492 - DNA, 2300 bp, Homo sapien
tccagcctgggcgacagagcgagactccgtctcaaaaaaaaaaaaaaattaattaattttaaaaaaaataaggaacttaatagaacagagagagagaaaagcccaacaaaatttcagcaaggaaaaatactgcctactaagctagtgttagaacctgtgcaatgtgagtattaaaaaagagggaaaagtctgcctatacttgacagtagcttctaagttgatgccaaaatggccaaaaatatctcactaaaataattccttcaccaaacatcaaaaggcaaaggtagcactcacaggatattagttctagctccaagtctttcacaatgcatacagttctactttcaaagggccttcctaagatacttacatgtcagtggcactacgactgggtttattaagagaacagcctttacttatcctttaaagtattcctggagaaaggacaccaaccaagcaattcaagtctgtaggggaggggaatccgcaaatatgaataggtaatttattaagcttgtgaattcattgcagagatactctggaatatatagtcttatctgtctccttgttatcttcttaccctccaaagattccaattaggcaaagtctcaaatgtttactcctctttgaaaaggacctcagtaccccattgtcattgccctcgccatctcatcattctgcttttttactcttcccttaatacaatataaatacaccacgcccataacaccacacgctccacgctcacactccatacatctctccccacagaaccacccaaaacatcccatacttaatggtccaacaccaattaaaacaaaaactctacacgtccccccatataatacaggaaacactacacattccacacacattgtaacccaagtcattaatacctccaatcccattcaacccgtacttaacacattctacacactcatgatagcatataaattatacgcttctccatagctcgccacacacacacacacacgccacgcaccgtataaaagcctaaatgacacaccactgcagcgttcaaacgctgggaagaagactcccttgtggcaccggaaacccacgaggttggaagtgggaggggaagagggccagatacttcacctgaaaatccgccaggatcatctcccggtccatgttggacgccatggcggccgccgagttccgcggctccgggagcgaagcgcgcacctgggaggcagacggcacctcctgcgaccgtcgccgccaccgccgccgccgccgccgggcgccgaggggctggcgggcgagccggcgggcgggtcggcgggccagcgggcggggcagcgcgggaagcgctaggcgctcatgcactcggtaaccttcaggcgccccggccgcccgcctgcaacctgcggagcccgcgtcgcagcagcccggacaggaagattggtctggatgtgggtccggtcttacagtcgcgggccaggatgagggcaggttgcgacagcgcgcacccggataccttcagcggcgttaagcccggcgggggcggggaaaccgagcgagcgagcgggcgggcgaacgccgcggccgcctccgcctcctccgcttcctccctggccgccgcctccgcccctggttggccagcgccacggctgtcgcacattttgcctgtcatcgaggtcgcaaagcgccgctttgcggctccacgtgaccaccctcctgtcaagcgctgagcgcgcgactacccggccaggatctctgcgctggcggcagagactgcaacctgcagctgcggaagcttcaagtctcgcaacaggttattccagtttggatttaagcaaaggcctcaggatagcgcctccccctagctgaggcggggaccagattgtgcacctcacgtggttagtcacacaaatacacaccaccctcacaaaccaactaaacacactgttacaactcgtctaacaaacagcatttcagaaatatatgtttttctctacaatgtttcagcaaaatacagcttcatatagtctctcacgctcaacctgtcaaaaccgaatccacactgtcacacccagtcccaagctccctgacgtctgcatcctcagactccgtaacacagaagtaaccagactgccatggtagacatgggagagacgaggaagctgagaaaggtaaaaatctcgttccagagaagaggaggagcattttttttaattgataaggtagttatgagaaataacaacctcgagttaatagggttgctccaaagggggaaaaaagggaaaacctttctactgctgcagttatatttg

SEQ ID NO: 1493 - DNA, 2300 bp, Homo sapien
acccaggctggggtgcagtagtgtgatcttggttcacactgcaacctccacctcccaggttcaggtgattctcctccctcagcctccctagtagctgggactacaggcatatgccaccatgcccagctaatttttgtattatttttagcagagatgggatttcactatgttggccaggctggtcttgaactcctgacctcaagtgatctgcctgcctcggcctcccaaagtgttgggattataggcataagccactgccctggccatggaattattttcttacggctgaaaattaagcaagacattttgattcatgtgactgtggagggttctattatctagctaattctggtctaaacacagattagtacttaagaactgtaggccagcctattttcatttaaggaaacacacagaataaactcagatcataatacagtgcacttctttatattcagtgaaactgaacaattaggtcatatttctgatttctcatgaatatattcccagtttatggagcctaggccttgctgggtgtggtggtatggctcacacctgtaatccccactctcaggaggctgaggtgggaggatggcttgagcacaggagttggaagccagcctgggcaacatagtgaggccctgtctctaaaaaagtaaataaatgatacaagtttaaaaagttcttaagggaagcctaggccttcatgctacatgatgatttcactagttattttagctctacaggataaaatcagcaatcttacttcacattttcaagcttttacatactttccaaagcaagtaaatgccccatgacaatccagaagctgatattttcccaagtcaaggatgaacaacttccactgtcacactttctctaacctggacgacaattacaaactgtcacacttcattgtacatagtctttggctgttttagttacagaggttgtcaatttctgaccatgggttgaaactttcaatatttggtgaatattccaaaataatttcttatgaaaatgaataggccgggtgcagtggctcacgcctgtaatcccaacactttgggaggccgaggagggcggatcacgaggacaggagttcgagatcagcttgcccaacatagtgaaaccccgtctctactaaaaatacaaaaaaaacttagccgggcttggtggcgggagcctgtaatcccagctactatggaggctgaggcaggagaatcgcttgaacccagaaagcggaggtcgcagcgagccgagatcgcgccactgcactccagcccgggccacagtgcgagactccgtctcaaaataataaataaataaataaataaataaataaataaaaatagactgactatattcaaagctggattcaagttttatcccatttgtaagatgtctcagcttaaaaaaacaaatataactgcagcagtagaaaggttttcccttttttccccctttggagcaaccctattaactcgaggttgttatttctcataactaccttatcaattaaaaaaaatgctcctcctcttctctggaacgagatttttacctttctcagcttcctcgtctctcccatgtctaccatggcagtctggttacttctgtgttacggagtctgaggatgcagacgtcagggagcttgggactgggtgtgacagtgtggattcggttttgacaggttgagcgtgagagactatatgaagctgtattttgctgaaacattgtagagaaaaacatatatttctgaaatgctgtttgttagacgagttgtaacagtgtgtttagttggtttgtgagggtggtgtgtatttgtgtgactaaccacgtgaggtgcacaatctggtccccgcctcagctagggggaggcgctatcctgaggcctttgcttaaatccaaactggaataacctgttgcgagacttgaagcttccgcagctgcaggttgcagtctctgccgccagcgcagagatcctggccgggtagtcgcgcgctcagcgcttgacaggagggtggtcacgtggagccgcaaagcggcgctttgcgacctcgatgacaggcaaaatgtgcgacagccgtggcgctggccaaccaggggcggaggcggcggccagggaggaagcggaggaggcggaggcggccgcggcgttcgcccgcccgctcgctcgctcggtttccccgcccccgccgggcttaacgccgctgaaggtatccgggtgcgcgctgtcgcaacctgccctcatcctggcccgcgactgtaagaccggacccacatccagaccaatcttcctg

SEQ ID NO: 1494 - DNA, 2300 bp, Homo sapien
aaatactagattttcattggagttactgtgtaatacttatgtatgccttctgaactaagaccctaagctctgcactgccaattctggtttacccaacaggcagatgaagcatatgcttcagggcaccagcaaaaccagaatgttaaaaaaaaaaaaaaaacctttgccaaataatttaatatctcagcaaaaccactgaagtagccatcatgggaaaaaaatcagaactttgttggacttttttactgttattttggggttctgttatttttctttttatttctatataaggaagaggtggtagaacatcaaaatcttttcagtgcttagggcctccaaaaatcttaatacaactctgtgtacatcttaaattatcataagttttccttagttgttcagcaataagcattttatttcatgaaaattatagtacgtttacccgtactttatgtaatcatacaatttaagattcttcctctttacaatttatctctaagcaagaaaccataataaatgctagaaggcaatcctcataaattggactaataccagttctcttttatcagccaacagtgctaatatgtcctcacaccctctggctgtatgaaaagattacacagttcccagaataatcaaaagtaaattattatttatttcttactggtataaatggaatcttaaatgtttctatttgaaacgtctacatatatgtaagaaaaagagagttaatttcttgttttgtagttctcatttgattcacaattcaagtttagttacctaagaaaagaactctagtttttttctcaacaattacattaaagaaaacactgccagattcttcccagtttcaactttccctctacctaccaatctcttgctggatgattacccagatatttctggtgtgttttgttgctaatactcccagtgtacttcaagaagggtacagatactgcttgaggatccgcttgccaaaggccggttctaattagacttgtcattttttgcttggtttcattttgaccactgggtgcatcatgcaaccgtgttggatatttttaagagtataaaaatacagaaagcaatagttaattaatctcacatagctaaaagaggaagttaaaagtactggaaattggtgtcggatgattaaataaaggattaggagagagaccattctagacaccctccccaaccccacatccccaaaatccaagccacttctaagtagtgagagaacttcggcaaccaagaaatggctttgttagaaaacacttcacacgacttattttaaattttgctttaaatttaattgcttttctcctttttctctaataataggactatttcgcagtttccagtccttgattaattaaggcttcagagttcgttcttacatatgccatgtcttaagttttcataaaattcagtctacacaagacttgctttttgtgagcactgtgcttagtggcagtccggatttttccctccacccccgcggccacccctgcccaccgcgccgtcgggcatggatctggcaggtgcgaggccgaggccagggctcagcgaaggacgccgagtttacagagcgcgcgcgcctagaggaggcagcagcagccgcagcctggccgcccgaactttgcgagcctggcgggggagcacagaggcgggccgacctgccccgctagcgctgaggaacgactccctttatgccagctcgctgtccgccttcccgcagcgtacgctgcggagcctcaaagaccctgcggccctccacaaccgtcttaaataacaaacccctgtcctcgcccccgtaggaattggggcagctgggggttcgcgtcacagactcaagcccgccagcagaagggcaggccggacttcgcggggccgaaccccgctccagctggggacaggccgcctagccggcaggagggagccggcgcgagagacttgacgggaggaggtggagagcgggaggcgggaatgagggcgcgggaccgggcgggcggagcgtgcgagactgcgagcgcgagcgccagcagggcggagggcggggcgtgggcggcgcccggccttcccgctcccgcggcgctgcaactctgccgagcctccttaaaactctgccgttaaaatgggggcgggtttttcaactcaaaaagcgctcaatttttttcttttcaaaaaaagctgatgaggtcggaaaaaagggagaagaaaccggcaccctctctgagaggcaacagaagcagcaattgtttcagcgaaaaaagcagcaagggagggagtgaaggaaaaaa

SEQ ID NO: 1495 - DNA, 2300 bp, Homo sapien
tcttactggtataaatggaatcttaaatgtttctatttgaaacgtctacatatatgtaagaaaaagagagttaatttcttgttttgtagttctcatttgattcacaattcaagtttagttacctaagaaaagaactctagtttttttctcaacaattacattaaagaaaacactgccagattcttcccagtttcaactttccctctacctaccaatctcttgctggatgattacccagatatttctggtgtgttttgttgctaatactcccagtgtacttcaagaagggtacagatactgcttgaggatccgcttgccaaaggccggttctaattagacttgtcattttttgcttggtttcattttgaccactgggtgcatcatgcaaccgtgttggatatttttaagagtataaaaatacagaaagcaatagttaattaatctcacatagctaaaagaggaagttaaaagtactggaaattggtgtcggatgattaaataaaggattaggagagagaccattctagacaccctccccaaccccacatccccaaaatccaagccacttctaagtagtgagagaacttcggcaaccaagaaatggctttgttagaaaacacttcacacgacttattttaaattttgctttaaatttaattgcttttctcctttttctctaataataggactatttcgcagtttccagtccttgattaattaaggcttcagagttcgttcttacatatgccatgtcttaagttttcataaaattcagtctacacaagacttgctttttgtgagcactgtgcttagtggcagtccggatttttccctccacccccgcggccacccctgcccaccgcgccgtcgggcatggatctggcaggtgcgaggccgaggccagggctcagcgaaggacgccgagtttacagagcgcgcgcgcctagaggaggcagcagcagccgcagcctggccgcccgaactttgcgagcctggcgggggagcacagaggcgggccgacctgccccgctagcgctgaggaacgactccctttatgccagctcgctgtccgccttcccgcagcgtacgctgcggagcctcaaagaccctgcggccctccacaaccgtcttaaataacaaacccctgtcctcgcccccgtaggaattggggcagctgggggttcgcgtcacagactcaagcccgccagcagaagggcaggccggacttcgcggggccgaaccccgctccagctggggacaggccgcctagccggcaggagggagccggcgcgagagacttgacgggaggaggtggagagcgggaggcgggaatgagggcgcgggaccgggcgggcggagcgtgcgagactgcgagcgcgagcgccagcagggcggagggcggggcgtgggcggcgcccggccttcccgctcccgcggcgctgcaactctgccgagcctccttaaaactctgccgttaaaatgggggcgggtttttcaactcaaaaagcgctcaatttttttcttttcaaaaaaagctgatgaggtcggaaaaaagggagaagaaaccggcaccctctctgagaggcaacagaagcagcaattgtttcagcgaaaaaagcagcaagggagggagtgaaggaaaaaagcaaaaaagggggcgacacgcaagtgcctgtaggggtgaaaggagcagggaccggcgatctagggggggatcagctacaaaagaaactgtcactgggagcggtgcggccaaggaggaagcagtgctgccaggctctgctccagggcacagctggctggcggctgccctgtccgcagcaaaggggcacaggccggggaccgcgagaggtggcaaagtggcaccgggcgccgaggctgctgagcgctcgccgagacggcgaccggactggctgccccggaactgcggcgactctccctactcagaacttggcctacgtttcccaggactctccccatctccagaggcccccacaaaaccgggaaaggaaggaaaggacagcggcggcagcagctcaatgagtgcctacagcagaaagcctgaacgagctcggtcgtaggcgggaagttcccgggggggctgcccagtgcagccgcaatgctgccgcgagctgccccagcagtccgggctccgtagacgctttccgcatcactctccttcctcgggctgccgggagtcccgggacctggcggggccggcatgacgggcttctcgggggcccgccgcacgcccggcagcctccggagacgcgcgccgagcccggctcccacggcctctg

SEQ ID NO: 1496 - DNA, 2300 bp, Homo sapien
gaaatggctttgttagaaaacacttcacacgacttattttaaattttgctttaaatttaattgcttttctcctttttctctaataataggactatttcgcagtttccagtccttgattaattaaggcttcagagttcgttcttacatatgccatgtcttaagttttcataaaattcagtctacacaagacttgctttttgtgagcactgtgcttagtggcagtccggatttttccctccacccccgcggccacccctgcccaccgcgccgtcgggcatggatctggcaggtgcgaggccgaggccagggctcagcgaaggacgccgagtttacagagcgcgcgcgcctagaggaggcagcagcagccgcagcctggccgcccgaactttgcgagcctggcgggggagcacagaggcgggccgacctgccccgctagcgctgaggaacgactccctttatgccagctcgctgtccgccttcccgcagcgtacgctgcggagcctcaaagaccctgcggccctccacaaccgtcttaaataacaaacccctgtcctcgcccccgtaggaattggggcagctgggggttcgcgtcacagactcaagcccgccagcagaagggcaggccggacttcgcggggccgaaccccgctccagctggggacaggccgcctagccggcaggagggagccggcgcgagagacttgacgggaggaggtggagagcgggaggcgggaatgagggcgcgggaccgggcgggcggagcgtgcgagactgcgagcgcgagcgccagcagggcggagggcggggcgtgggcggcgcccggccttcccgctcccgcggcgctgcaactctgccgagcctccttaaaactctgccgttaaaatgggggcgggtttttcaactcaaaaagcgctcaatttttttcttttcaaaaaaagctgatgaggtcggaaaaaagggagaagaaaccggcaccctctctgagaggcaacagaagcagcaattgtttcagcgaaaaaagcagcaagggagggagtgaaggaaaaaagcaaaaaagggggcgacacgcaagtgcctgtaggggtgaaaggagcagggaccggcgatctagggggggatcagctacaaaagaaactgtcactgggagcggtgcggccaaggaggaagcagtgctgccaggctctgctccagggcacagctggctggcggctgccctgtccgcagcaaaggggcacaggccggggaccgcgagaggtggcaaagtggcaccgggcgccgaggctgctgagcgctcgccgagacggcgaccggactggctgccccggaactgcggcgactctccctactcagaacttggcctacgtttcccaggactctccccatctccagaggcccccacaaaaccgggaaaggaaggaaaggacagcggcggcagcagctcaatgagtgcctacagcagaaagcctgaacgagctcggtcgtaggcgggaagttcccgggggggctgcccagtgcagccgcaatgctgccgcgagctgccccagcagtccgggctccgtagacgctttccgcatcactctccttcctcgggctgccgggagtcccgggacctggcggggccggcatgacgggcttctcgggggcccgccgcacgcccggcagcctccggagacgcgcgccgagcccggctcccacggcctctgaggctcggcggggctgcggctgcctggcgggcgggctccggagctttcctgagcggcattagcccacggcttggcccggacgcgaccaaaggctcttctggagaagcccagagcactgggcaatcgttacgacctgtaacttgagggccaccgaactgctactcccgttcgcctttggcgatcatcttttaaccctccggagcacgtcagcatccagccaccgcggcgctctcccagcagcggaggacccaggactatcccttcggcgagacggatggaaaccgagccccctggaggacctgcccctgcagttctgcctcacacggctcaagtcaccaccgtgaacaagggtgggtgaatgccttttcttccccctgaatgtctttccttccgcggtattttctgccccgatctatagtcccttgagtctccacacacactcctcacagagatctgtagcgtaggtacgtgacagctctgcctacatctgacgtccggagtcattaaccaggaatgtatgtgtgtctgtgtgtctctctgtggagtcgtcagaattcttcataggggttaagctaaaaaagcgaggcgaggagcccc

SEQ ID NO: 1497 - DNA, 2300 bp, Homo sapien
aatgtttctagtcagtttatgcaaaagctgatccaactaatttaagaagaaatttaagaaggaaggttgaaatatcaccttgctttatataacattgaaattttctgcaatcactgtaactataaggtttatagcacttttaaatgtgggaagaaacgctttgatagcataaggtgtgagaggtcatctgaaattaaggatagtggtagatggaattgaaagcttgagcaaaaagcagaggtttagaataaccgcagtacatttatagatcatcgagaataaaatgtcaaataagctgactgaagatgaaaccctactccaaagagttaaagaaactaacaacagatattcttgagtttgcaggatgacacataagaaacaacttgctgaaaagctgaaacttcctttgctattaatagtaagaaaacaaaactgactaaaatcagttgaaaccaatatggccaattagagtttgtgcagaatgaatttgctgacattacagcctgaatttccaccatatgttttttattaactccccctgaatttgcacatgggacccatgagaaagcatgaagagataagtacacatgcctgaggactttccagacctccctttccttccaccaatcacctactaatttcagaatgcaccccctgaacttttctaataaaaatactgccttgaagccagcatagggtggcagatttgagttggactcctgtctctttgttggttgacttgcaataaaaagcttcttggctgggtgtggtggctcatgcttctaatcctagcagttttggagtctgaggtgggaggatcacttgtgctcaggagtttgagaccaagctggacagtgtagtgaaatcccatctctacgaaaaaaaaatttaatttaaattagctgggtatgatggcaaatgcctgaagtcccagctacttggaagagtgaggcgggaggatcgtttgagcctgggagattgaggtggaagtgatccatgatcaagccgctgcactccgggctgggcaacagagcaagaccttatctagaaaaaaaaaaaaaaaaaaaaagcgtttcttttttcttttctcaaaaacccaatgtcatagtatttgctgcaatcacattgggcagtgagcctcttttgcttgataacaaagatatatataattcattggatttaatttactttaaaaataagcaagctgggcatggtggttcacatctgtaatcccagcgtttgggaggccaaggtgggcagatcacccaaggtaaggagttcgagaccagtctggccaacatggtgaaatcccatctctactaaaaatacaaaaattagctgggtatggtggtgggtgcctgtaatcccagctacttgggaggctgaggcaggagaatcagtggaacccgggaggcagaggttgcagtgagccaagatcatgccactgcactccagcctgggcgacaagagcaagacttcactcaaaaaaaaaaaaaaaaaggcaaagcagaattaacaaaaaaatgttccatagcctacctgactactcacataagcgattagattacagaatgtacatttacagttcatcgagaataaaaagtcaaatttgtgatgaaatatatagtatagtaatggatctataatttcagaacgctaaaaggttgcccttttatgaaaaaaatggtagattataccctataagtagtgctttagtggcatgctgtaaatcctgatatactgtgctttcattttatttgttgaaaatatctttttattttcctttgagacttcctctttaatgattatttagaaatgtgttatttagaagttatggtagttttcaatgatttctctgtattagataatgtatcatgtgtacttggaaaggatatgcattttgctctcgttgggttgaatgttctataaatgtcaattagatccagttgattgatggtagtaacatcaatacgtggcttccaaggtttccctagggatcatctccacccccgtcagcccaaagggagaaagatcatgaagaaaattgcctggaatgtttttatgacatcacttccactcaaattctattggttagaactcagtcatatggcttcacctaaaggtatgagaagctgggtcatgtagtctagctttttgcctgggaagaagaggaaaatatatttagacgaacaaccagaaatctatttctattctctggaagagcttgtataagataagaaatacttgaatcatgggtatacagtagaaattgtaaagttattggggctattttctttggg

SEQ ID NO: 1498 - DNA, 2300 bp, Homo sapien
aatgagttcttggaagctcaacaattccaaaaccaaaattgtgagtcagtttgttctttctttccttctttcctttctttttctttttctttctttctttctttctttcttttctttctttctttcttttctttctcttttctctttctctttctctcccttccttctttccttccttcctgcctcccttctctctctctctctttctccttccttttttttttgagactgagtcttactcactccctcgcccacgctagagtgcagtggcacaatctgggctcactgcgctgcaacttccacctcccaggttcaagcggttttcctgcctcaccctcccgagtagctgggactacaggcgtgcaccagcacacctggctagtttttgtatttttagtagagatggggtttcaccatgttggccaggctactctcgaatccctgacctcaagtgatccacccgccttgacctcccaaattgctgggattacagacgtaagccaccacgcctggcccaaaattatgagtcttttcaaaaattttatatcaaaaaggtgatatttaatgtggaatttgagtgcatttaaataagatagtgacttcgtagaatagggactgcagagtaagagtgttcagacccattcgagtttaatatagccctacctctaagaatcctttctgttcctcactcaaatgaactaattgctgtctttcagttcctctaaaaaccttggggtccgtggcagggtgtgggcttaggactcacctgattacttgtcttcccaggtggtctctgggctctatcaggaacaagccaggtatgatcatccttttccccagtccttagcgtggggtctggtatacacacgcacacacaacttcagtaaatggtgaatgaaacgaaaggcagtcaagatccacctgttgaatgaacgtctatcaggagcactgtcatccttcttgcttccttcttttgcatatgttgtttgagctgctcattcaaccaaggagagagcatactctaccttgggcagtgtgccagccttgcacagagggacagatgattcagcttgatcaggctgtgacagagaaaagctcagggtctgagagcacacaggatgcgactaacccagactggagggtcaggagagtctccccaggggaaatgaagttgcatccagaaggattcctgagaataatgattagcctgatgagaagcagaaaggttgggagtggagggaagtgggtttctgtgagagaaacaatatggacaaaggccccaggcagaggcaatagtattccagataacgaaaagcattttagagagtctagtttagaatttgtgaaggaggtgacaatgctgctaatgagattgaaagggagtcagatttgtaaaccatttaaggattgtcttaaggacagccttgaggagacactgaaggttttaacaggagaatgacatgatccgatttaaattttaaaaagataactctgtcaactgtgccaacagtgaattggatgtgggcaatgatgaactcaggaacagctgagagtctattgcagaagccaaggtgagagatgatggtggcttggactttggtgctgggactggaaagaaatgaacaatctgatatacaactggaagaataatctctctggctgtgatgtggaaggataaggacgtgattggacaggcagggatggttcagtaacgagctaggactttattgtgaagggataaaggggaagcttttaacattttaatcatgggactgatccattccgatatgggtttatataaatagaccgcttggcggagggtggtgagaagactgtcaggcagtgcacaggtaagaactgagccctagacggggcaggagcaatgaatgtggggaggcgcgggagacgggagattggtttcggagccaggtacggagccaagcagtcagagagaagcaaaaattgacgcagcaccgagaacagctgctagtggagagggggatgggcgccgccggagccgccctcgcctcctggcgccgggggcgggaccagagcacgcacggcgcgatgacgcagtgcccgagccggcctcgttctggctgccgccgtctcgctgaggcggagtaggatgaggcccgcggccgtggctccggcgtcggcgggggcagcagcagctgaggcagcagctgaggcagccgcgacggccgcgcccccccccgctgacctggattaggcccagcagctccgtggccgccgccgccccgcgggggggcggggtggggaagtgcttcgtctccccg

SEQ ID NO: 1499 - DNA, 2300 bp, Homo sapien
cagacataaagacaggaaaatgtcactcccaaactccacaagcgaaccaccagacactggccaaggggatgtgatcacatactctgatcccagaactcaagggcagagggtatcatccccacacggtgcccgagggcaggcgaagaatcaaccttactctgagatcagagagcaaatgccctcagatccagccctaaggggtcaatgccgcccaggccaggccttgccgaagccaggggcagagacggccccgaagccccctcaatctccgccagagctgcctctactcgctccccccaacacacaccctcccctacctgatatggcggcggcggctcctgatccggctccgtcccctcgccaaagctagcccggtcggactgagactcgtgaagcagggagatgtcatccgaggtgggggatttgaggcagttccccatcttccggagctggggtgcgtgatctgggggaggagaaagcagcggtggggtcgttcgcacactccgcggtccgcctcggttggcgaggtggggtcgggcgacaggccggggatcaggcggaggcgactccaccgccccacggtgccgccgaggggccgctcatgccagcccccggggttgggggatcaaggctgggccgcgggctccgctggggtcgcggcgttcgcctcctgcgaggcagcgatgggggggggggggcggggagacgaagcacttccccaccccgcccccccgcggggcggcggcggccacggagctgctgggcctaatccaggtcagcgggggggggcgcggccgtcgcggctgcctcagctgctgcctcagctgctgctgcccccgccgacgccggagccacggccgcgggcctcatcctactccgcctcagcgagacggcggcagccagaacgaggccggctcgggcactgcgtcatcgcgccgtgcgtgctctggtcccgcccccggcgccaggaggcgagggcggctccggcggcgcccatccccctctccactagcagctgttctcggtgctgcgtcaatttttgcttctctctgactgcttggctccgtacctggctccgaaaccaatctcccgtctcccgcgcctccccacattcattgctcctgccccgtctagggctcagttcttacctgtgcactgcctgacagtcttctcaccaccctccgccaagcggtctatttatataaacccatatcggaatggatcagtcccatgattaaaatgttaaaagcttcccctttatcccttcacaataaagtcctagctcgttactgaaccatccctgcctgtccaatcacgtccttatccttccacatcacagccagagagattattcttccagttgtatatcagattgttcatttctttccagtcccagcaccaaagtccaagccaccatcatctctcaccttggcttctgcaatagactctcagctgttcctgagttcatcattgcccacatccaattcactgttggcacagttgacagagttatctttttaaaatttaaatcggatcatgtcattctcctgttaaaaccttcagtgtctcctcaaggctgtccttaagacaatccttaaatggtttacaaatctgactccctttcaatctcattagcagcattgtcacctccttcacaaattctaaactagactctctaaaatgcttttcgttatctggaatactattgcctctgcctggggcctttgtccatattgtttctctcacagaaacccacttccctccactcccaacctttctgcttctcatcaggctaatcattattctcaggaatccttctggatgcaacttcatttcccctggggagactctcctgaccctccagtctgggttagtcgcatcctgtgtgctctcagaccctgagcttttctctgtcacagcctgatcaagctgaatcatctgtccctctgtgcaaggctggcacactgcccaaggtagagtatgctctctccttggttgaatgagcagctcaaacaacatatgcaaaagaaggaagcaagaaggatgacagtgctcctgatagacgttcattcaacaggtggatcttgactgcctttcgtttcattcaccatttactgaagttgtgtgtgcgtgtgtataccagaccccacgctaaggactggggaaaaggatgatcatacctggcttgttcctgatagagcccagagaccacctgggaagacaagtaatcaggtgagtcctaagcccacaccctgccacggaccccaaggtttttagaggaactgaaagacagcaattag

SEQ ID NO: 1500 - DNA, 2300 bp, Homo sapien
tgcttcctcaggcccagctcccatggcccccacaccccctcctcatcacctcctactcccaaaaaggacaaagcctcagggaaccttttttctttttttagagacagggtcttgctatgttggtcaggctagtcttgaactcctgggcccaagcaatcttcccacctctgcctcctaaagtgctgggattctgggccttagggaacctttttgaactgaaagtgactctcgaagccttcctgtagagtgaggtgggtggctggggctaaccatatggggaaggagagacctggtgggggcacacagctgctatatagaggaacagaaggtgggccaggcctcccagctgtcaggaaatctggctcagtccccagaccgctgtgtggctttggggtggccagtccctctctctctgcaacactctcctcatgaggacttctgtgaaaaatgggggttgtaaccctctgagttctggggccccacccatttctaatctccagaacttggccaccacagactccaccaacttctagtcctggggcctgggcctctggccattgccataggcaccacctgctctgtgcaggcagcgcccccctctgccaggatcctccgaggtcagctgctgggtctgacccgcagaccctggctgagcgacggatgaacggagtatgcagacacaggcttgcctgtcagcagatgggggacccctgccagagtcagcagcggcccccataagcctgccacgcttgcatttatttagtacagatgtaatgacaaaggcctaaagcaaactccatttgtgggtaattaacattgtcgcccccccagaaagagcagtcctccgcatgatgattaaaggccaggttccgaggcctaagtaaaccaacttatctagatcaattcccttacttcttgttatctactctgagagaattcagctgccttcagccaaatcctttcccgaagcttttgcaaaacctccgagccttccaaggtttgcttctttctgtaatttttctcaccaccctgacctatctcctgcagtcagccctgtggaggcctttgtgtttcccccagtgctggcagcctagaggctgagatggccagaaacaaggtggtgacagtggcgtgctcagggcttgggaaacccaaggagctaaaggcatgcccaggcaaccaaagaggacaggaaggcttctgaggagagacctctgaggtgggtcttggagaggaaggacttagggaggcagagtggaggaagtgagaggacaccccaagccaagagggcggcaggaccaaaggctcagaagccagggcgctgcagaggggctgtgtgccacagggtgaagagtttgtgtggcagaagggcagggggcttgcatcaggggtgacagctgctcttttgtcccagcatagcccctgtacatccctggagagctggggcgtccacaactctaagtcacagcccccatcctaaccctggtggtgcagtgagggtgagctgtctgtgggcaggagggaagactcttggagatgagcctggtgaagggataatggcatcccgggccgaggagcagcacaggcagaggcctggggagagtttaaggagtgtaggggaggaaatggcagaagatgagccagaaaaagaaaggttagggcaggtcctggaggacatgagtggctgtttgggctttatccagcagtgggggagccttggcaggcttgtggcttagataggtgctttagaaagcccaccagcagttgctgggccaccccgctggctgggtcctgttctaaggcaggaaatacaagcatgagcaggaaaagaccccctcaaggctcacgtcctagtggggagacaagaaacacagatgggcaatataacacgatgtctggttccagtaagtgcagtgaagaacaagcgaggctggatgcagggagtgatgggaggggctttgtaaggggaggtcgggggaagcctgtctcagaggacaccagaatggagcgcaggagcagcacgtggcagtcacatggcaggccgttagggcagagggagctgggcagggcacagcagggcaggagtgtgtttgatgtgtcctgggaaccgccctgaggccgtcgtgtggctggagtgctgcaggtgtcaaggaaattgtaggagatgtctcctgagtgtgatggaatataaccagatttccagaaggaactgacatgatctgacttaaaaaggtcagtgtgcgaaatggcttgcaggggacaggagtgggagcagggagataggagacaatgtgtaccag

SEQ ID NO: 1501 - DNA, 2300 bp, Homo sapien
gagttggaacttagcattccccaactcaacacttaaatctgggaccctccaagggctacagcctcagtgaataggaagattggctagaaaaaaggtccgcccccaccagcaaagttagacagcatttctggtgggaaaaaaagactccctaaaaaatgataaatactggtctgccatcacacaaactttgggtttgatggcacaccactacctttgtggtcctggaaaccataaacttaaaaaagtaacttaaatggtctcagggtggtagttcccctgggaacctggacagagtaaatgaaaaatccttcctggagcaatgtatcctgtcccacagtccctttggatctgtcaaacatgaatttgtaatataattgcaaaacacacaaggaaataagccactgtgagcagcaggcaccagaaacaagaaagagcagaattagtttccctgagagtctaaaatgctagaattatgagatatagaatagaaataattatgtttaaaatgtataaaggaattgaagatggacttgaggcagggaacataatactaccccaaataactaagatttgaaaaagaaccaagtggaatttcacaaaatgaaaaatataatcattgaaatgaaaaattcagtaggtaggataagtagcaggtcagacacacctaatgaaagagctggtgaaatgaaagaaattactcaggatctaacagagagcccaagagatagtatagaagttagttaagagacatgaaatatggaataaaaaggtctaacagagaagagagaagaaggtggaaagagtggaatggagagtgttccaacagacctgggtaaagatggtgctggcctggaccagaaggtattgggcatagaaggggttgattgagagatgttaggaagtaggctgtggcttatacctataatcccagcactttgggaggatgaggtgggaggatcacttgagcccaggagttcaagaccagcctgggcaacatatgagaccctatctctgtaaaaattctttataaaaaaggaagtagaaatgatgggatttagtggagtttagtgatggaggggatgacagaggccagagaagggatgtggcaaagatgattatcagatttttggcttggggaattgggtagaggagtgttgcttattgggtagaggagtggacaagcatggtgtctcacgcctgtaatcccaacacgttgggatgctgaggcaagaggatcacttgagcccaggagtttgttgagaccagcctgggcaacatggcgagaccccatatccaccaaaaaaaagaaaggcaaagactgggggagaacagattgggagaatgaacacgagttcagttttgaaaaagacatgtttcaatttgcctgggaagatctactgatgcatctcagagtgggagactttagagctgggccctaaggtatatgtaggagtttacctggtggagagggaatttcttttaactaacttctgggaaataggatttcccttcagggagagtatcaagcctctttctggaacattctttcactcaaaggaggccccttgagaagaggcattatcaaaacatcaaataggcagggcttctgggatctcttagtttcatctctcatttttatatgggaaagctgagacccagaaaagtcaggggtttgctttcctagccttagactcttcattcattcattcattcattcattcattcattcattcatttacctaacagatatttattaaaagcctactttgtactggatactagttgctggggatacagcagttaaagattcttgcttcctggaagcttatagtttagtggagggagacagacaataaacacaaaaataagtaaaatatatcacgtcagagggtggtaaaagctatagagaaacgtaaggactggaaagggctcaggtattctggaggagccattggcaaagtgaatttgaaaggccctgggcctctcgtttggggctgctgacccatagtgtgacagcccattgtgacaacgtcagggattctagagtccaggcctgggggagggaggaggccttggagaaggaggagggaaaaaggggctgtgggatttagtggctgggctgcaccccctgggggggcagcagagcccaatgggccagaagggccacaaagactccctttacccttgtggagggtaagatcattgattcctgaggcctctttgcaccttgcccttggcccctcccccacctccaacagatctctgatgacattcccttctgctccccctcccacccttgg

SEQ ID NO: 1502 - DNA, 2300 bp, Homo sapien
gcacgtgagcatcagtagaatgcctgtgtccgctgtaacaacagcacagcaaacatggcaggcctgcagtctccaactacagtgctcaaaaagcttcaagtttcaggccgggcgcggtggcttacgcctgtaatcccactgtgggaggccaaggtaggcggatcacttgaggtccagagtttgagaccagcctggccaacatggcaaaaccctgtctctactaaaaatacaaaaatcagctgggcatggtggcacatgcctgtaatctcagctactcgggaggctgtgggatgagaatcacttgaacccaggagacggaggttgtggtgagccaagatcacgagattgtgccactgcactccagcctgggtaacagagtgagactttgtctcaaaaaaaagagaaaataaaaaaagcttcaaattttggagcattctggatttcggattttcaaattaggaatgctcaacctgtattggtaaatttgtattctttttttgaacagcggcctccccattgtaagcttctggatccacccccggttacatgaatgactaacaagtgacaagggaggaaggtgtgttccacacagagggaacagcatgtttaaatgcctagagatttgaaagtgcatgacatgtgataggggccccagcctcatcatcctctttacatgtattgcttgtggtctcaccagcctcaccctttcccacttccatgccttcatccatgctgctccccgatctggtacaccctctccatgacttcagtttgtttaaataatataaacttcaaggctcagttctgtcaccacctcttccaggaagctccccagtctctccccttgtctggattctttatagttgctggtggatgtcatcatagcttacttctagtagttaattatctttttcgtgcctgtatatgagactcctagagatgggatgattcttgcaagtgagcatctgcccctgctcacaaatgggcaggatgggacttcactgcctttccaggcagcctgcttagattttaagcagctaccaccaagcccaaactgcctggctcccctgggatctggtacaagtcctgttcccaccgtggttgcttctgcaggctgtccccttctgcttcctcttctgacgtcctggaggtcatagttgctccaggggagctacagtccttccttacttctgtcccctcctttgtgaagggacagctctaatggcagccacatgctctgatgagtcatggttaagagcagcatctggggccaggagatggtgactggttaactcttcatgggccagtggctttctgtgccagaagatcaggtcaggtggagacaccgcctcagggctcggtgcacagtggacatttggggagcgttgtgggtgacccccacacaggcactgggaatgcaggggagagggggccaagggggaaaggggccagagtgttggctttggattcaggagggatggattccagtcctagcttgccacttattaggtgagtgaccatgcgtgaatcaaatgaaccccatgcctcagtttccccatctgtaaaatagcaattatggggatcatttgagaaggcagtgtgaactgccagctagcagtgagtgctaaaccgtgttttccccgccttctggtctcctgcagtcactcagtgggcgagatggtgggattaaaatccaggcctgactctgggggctgtctttgtctgcacgaatgcccccattaatgcgggaggatggtgacggctcaggtgggggccgcttcggggcggaagctgtggggaggagaagtgacagtaaagtggacctcaggtcccggagaagaacttctagcgccaaataggtggggacgtgtgaggagggagcgagctcccggcccgggcggtgtctgcgcagagggcgccgggctctcacctgtcggagcgggggtgggggccgcccagaacccccggcggtgcgggagcgcgggtcgccgcgggcggccatggccctacggtgcgggtggggagaccgaggctcggcccggccccgccgccttccccgcccccggcgcgcccctccccggccgccgcgtccgcgaccgcacagcgcccggctcggggttgcggcggcagcacctgggccgcgattggcgtccggctggggcagcgccgcccgcgcccctcggcgatgacctcggctggcggcgccccaggagccctgcccgcggggtaagtgcgcggctgggaggcccgggggcgcgggcggcgcgggctggggcccgggcaggtggcgggcgccgcgc

SEQ ID NO: 1503 - DNA, 2300 bp, Homo sapien
ttttatacaggctgactatccctaacccaaaatgctctggaccagaagtgtttcaatttttggattttcatggattttggaatatttgcatatgcataatgaattatcttggggatggggtccaagcctaaacatgaaattcatttgtgtttcatatacaacttatacacatagcctaatggtcattttttttttttttttttttttggtgggggcgatggagttttgctcttgttaacccaggctggagtgcaatgatgtgatctcagctcactgcaaccttcgccttccgggttcaagcgattctcctgcctcagcctcccgagtagctgagattacaggcgtgcgccaccatgcctatctaattttgtatttttagtagagatggggtttctccatgttggtcaggctggtctcgaactcttgacctcaggtgatctgcctgtctcagcctcccaaagtgctgggattacaggcatgagccaccatgcccagccacctaaaggtaattttatacacaatatttttaataattttgtgcatgaaacaaagtttgtgtacactgaaccatcagaaagaagtgtcactctctcagccatccatgtggacaatctgtgattatttggcatcatcatcatttttgactctgaatttatgtgctcccaataagcatttttttacccttattcacacataagtacttaacaataaaaatataacataccattaatgcagtgaaaaaatagtgttcagggtaactcagcagcacgtgagcatcagtagaatgcctgtgtccgctgtaacaacagcacagcaaacatggcaggcctgcagtctccaactacagtgctcaaaaagcttcaagtttcaggccgggcgcggtggcttacgcctgtaatcccactgtgggaggccaaggtaggcggatcacttgaggtccagagtttgagaccagcctggccaacatggcaaaaccctgtctctactaaaaatacaaaaatcagctgggcatggtggcacatgcctgtaatctcagctactcgggaggctgtgggatgagaatcacttgaacccaggagacggaggttgtggtgagccaagatcacgagattgtgccactgcactccagcctgggtaacagagtgagactttgtctcaaaaaaaagagaaaataaaaaaagcttcaaattttggagcattctggatttcggattttcaaattaggaatgctcaacctgtattggtaaatttgtattctttttttgaacagcggcctccccattgtaagcttctggatccacccccggttacatgaatgactaacaagtgacaagggaggaaggtgtgttccacacagagggaacagcatgtttaaatgcctagagatttgaaagtgcatgacatgtgataggggccccagcctcatcatcctctttacatgtattgcttgtggtctcaccagcctcaccctttcccacttccatgccttcatccatgctgctccccgatctggtacaccctctccatgacttcagtttgtttaaataatataaacttcaaggctcagttctgtcaccacctcttccaggaagctccccagtctctccccttgtctggattctttatagttgctggtggatgtcatcatagcttacttctagtagttaattatctttttcgtgcctgtatatgagactcctagagatgggatgattcttgcaagtgagcatctgcccctgctcacaaatgggcaggatgggacttcactgcctttccaggcagcctgcttagattttaagcagctaccaccaagcccaaactgcctggctcccctgggatctggtacaagtcctgttcccaccgtggttgcttctgcaggctgtccccttctgcttcctcttctgacgtcctggaggtcatagttgctccaggggagctacagtccttccttacttctgtcccctcctttgtgaagggacagctctaatggcagccacatgctctgatgagtcatggttaagagcagcatctggggccaggagatggtgactggttaactcttcatgggccagtggctttctgtgccagaagatcaggtcaggtggagacaccgcctcagggctcggtgcacagtggacatttggggagcgttgtgggtgacccccacacaggcactgggaatgcaggggagagggggccaagggggaaaggggccagagtgttggctttggattcaggagggatggattccagtcctagcttgccacttattaggtgagtgaccatgcgtgaatcaaatg

SEQ ID NO: 1504 - DNA, 2300 bp, Homo sapien
tcccagctcctgatttgatcttaggaacatttctaaacttctgacccaaatattcttaaaacagttgtctagattagaggtagatacgtaaaggctctctgcatagtgcctgccattgggtagaagcttgataggtattagctccttctttatttactcaccattgagtacctactatgtatagcaatagtgctgagctctgtagaagacacatgagatactatctgtaccttcagagagaaatctgaaataccattgtaaataacttatacaaggattttaaaatatgtaatgctaaatgctgtgagagagacaaaatgtatcctctgaaaacggagagaccgctctgatggggagatcctggatggcttcctggaggaagtggtgctggctgtgggctgacaggctcggtgagattaatcctcttagtaaactgggctctgggcccatagaaggtcaggcttctgaggtcctgtggctcttcttgcctgcgaacccaggagaaagttggctaagtgctcagtgctggccaagctggacaaggctctggactaaggggtttgggtccctgggcatactgtaactggattttccagatttagaagctctagctttgtgatcagataagcagtattccccggcccttgttgatctgcaaagaccatgatatgagtgaaaggtcatatgttctctgctgcctaccagggaagagtgagagaaattgcccagatggtccttagagcctctgccctctgggcagctttgcccagggcctcccactccgtgctcagcccacccatggtccataggcagggtgggaggaaagcaccagattgggcagagaagcctgggtgtaagacctgacttcacaacttggtttcaggaaaggtcgttcacccctctgaacctgtttcatcaactgtaaaatggggatgagtgagtatgtaacaagatgcagataaataagaattggtgtaaactgcctggctcagggcttgacacatgagagaacacctgacatgtgaaaaccagtcaccacttattggacacgaaatttgtattgcacaagtacctaggatacagacccagcccaaaaggaaacaaaaatgggccttagccaccctgcccctgccctgtgttcaacccccaccttctctgatgagctaaatctccaggggtccctgaatccattcttcacactggagctggagcaggccttctcaaatgcctcctcacggtgctcccctgctccttgtccttagttgggcctcccataaaagcccctggactgcacgccaggggatccccttgctccagagctgattctgcttggtggtggtaatttaaaataaaaaccaaaaatgtacgcagcctaagatgaaatgtggggcttcaaagaaagtttacactggagatggggcggtggctcattctcctctgtcccccgacctgccacggggtactggactcataagtcggtgaagtgggtcactccagggcctggcctggcctgcagcctccaccctcaggcccagacagctgctctccacttccctgcccatcagccccctgctgctggtgctctgtgcccagcatttgactcggtcccgagcttctgaccccattccggcgaggccctagcaaagctggctctgtatgtagggaggagggaacagggttggtggtgctgctatgtcccgcagggaccctggtaaggccatcgtgtggcccgtcagtttggaggctgggctctggaccgagtgggaccggccgctggcccccttgtgaccttggacaaagcctggagctccgtttctcccggtgcccaatgaggggtttcagagtgtttggggtcctttctggttctgggtgggagtgggcttgcccagggacctcaggcccgctctagggacacttaagcccttccactttggggcagggaggcgcaggtccagggcggggaggagccacgggtcccgccctgcccgccccgtccaggtgctgccactgtagcctccacggccgccgccgccgccgcgaggggccgcccgcggccccgtccgagcccggcccgcgcccatggcctttctgaccacctggaaggaggcggcctccgggaaaagcgaccgcaggtaccgggcaggggtggggactcggcggaaggcgcggacgggaccaaggggccgccggaggacccagccgacgtcggggaaacagctgagaggcacagctggggaaagggtgtgtggctgctgggcgtgggggtcggccggaggcccgagaggggcagcgccgcgcgc

SEQ ID NO: 1505 - DNA, 2300 bp, Homo sapien
attctttttaagttttctgtttagcaatatatgttatactacttggttgtgctaataaaaggaatattgtaagaccagaattttattagataaacatgaatcaaaagttaaatttaattgatcttcttactaagaggaattaatgcctaaagatctccatattttttttttagttgggaatggtcttcaggatatgattagagataacaccatcctttcctccccttcctcttcctcccccatagaccccaaattatgaagagaaatttgtagtcctcaagcttcctccattttacccaaacatagactgtgtttgctgtttagagctgagtcctttgtaatctgttttggattttcaccaagtgagcttccttcctttgctctcccatctttctgccttggctactttgagtcagctcactggcttcttgtagccctgttttcctgcatgcacacttgatctgagcagacactgtcagtgacagcagttagcagcagagcagaaagaattcagtacaaatgtgtgcactgctgatctgtgacactgtagtgttttctatttttgttattatctactttcagaaaccaggagctgagttgatactgaccttgtgtggaatgcctctgaggatttgggatggggggagggtgctagattttcatgtgacttatctctaacatgctgcagcaagactgaaaacattcatctgctcacataaggaggaaagaaaatttccaagattgagcttgcagaatttgttgggtattttcagaaatttttccccgtgtttttgtatttcttgaatttgcttaatttatataagggttggaggtgggggatggtctttgcatgataaataggttgaggtatggaaggatcgggctgcaacaatgattctcatggtaagggactgtttaaaatcacaacatcgcgacccacattgcgacccatctgacaaacggttagtgagctccttggccatctcaaatgtttaaaagtaacagtgtacaaatagctttatttgtatgctttcttccatagacatcttaagaacattgtgcctacgtatccaaaacagttgatttttgtctacatttaaaatctcacctcaagaaggtgagaaatataaatgaagcatgcagttgtcccttaagtatctgctttggtataattttctcactttcctttatgctggagctaaatggagcctgagcttacattttgggttatgtctgagatggaaactgaaatgtagtcttgaagctcgaaggagaaacttggctatactaatctggaggacttgttaaatgctgtcttcccttctccatgttgccgccttttacctttccctgcgaccccagaaatgtactgctgcagaattctttgagctttttctctcattttgtagaaaagaaagtgaagggaggtgtgtgtgtttgtgtgtgcgtgtgcacgcatgatttcagtacaactacaaatgggcagttaaattgttacatcaaaagtgacagctttattttgcaattctgaatctaaggttgcttgggattcgttcatagccactcaggcctgattaaagcatataagaatttaggtaacgatgtttcaaagtaaaagcggagcccagcatgtttgatttgaagagcagaagagataaatgctgctgtggttctttttttactttatatatactgtttgtatatttgatcaattggatttgatatatggtcctaaaatagctttttttgagatgtaatttttgatagagcaaattgcctgtgtattaataatctttcccattttctctgttgtttcattctaaaattgatgcacaccagtgatttaaggggaaattaacacttcagtaaatgtctttttccttagtattgttgactgtttttattagccattttcatttaatttgacagtggtacctaagggttaaccttacagagctgatgcaacccctccttttctttaccagcaattttcattggacactatttccatagcaacagtgacatcagtgaaacctgagtgtttcattgattatttttctcctcttccttttttaatctatcctcttttcaccacattttagtgagaaagcaattttttttttacaaatggagcttatattgatttttatttcataaataattgaaagagggtagaaaaatctgcccttcatttaaaaattgaatgtttcactatgtatttaaaaagcgattcaggattaggaggatggataaccataccagctgtagctgatgttctaaaatattcttgcattgtttgc

SEQ ID NO: 1506 - DNA, 2300 bp, Homo sapien
tacatggcagggtttccaccttattcatctgagaggaatatcttacatctcatatggtttggaggagtccccttgaatagcaagtgaaattatactccccaaagcgatttgctccatgattttcagatttcataatttgtgtagctacaagtttaggcacttttgtatatgtcatctcattcatcctcacaacaaccctaagggcatacaactagtgaatgggagagccaggaatggaacctggatattcctaatgtctgagtcctatttatttcactatactatgctgctttgtctatcagttgtataaccctgggcaaatcacttagcctctgtgaccctgcattacctcatttgtaaagtgagtatgacgattacttccttttagagttgtgaagctcaaatgtgctaatataaagtagaaaacaccggtagaaacaccggttgtggttatggctgataagtgtaccaaagtgaagtaatgtaaaacagtatctcttattctctcttcagttaaagagattagcagcaaaaaagaagccaaggaagatgctcttgaataagtggttactcaccagacctatatggcttgctcttgttagctggcctttgccagaaggagtctgagtagaattaggagttccttgggaaatttctggaatggtttgcttgtggaggcaatagtctaaaaacttaggtggggctaactccatcctgggtcttgttcagttgtccctcctaccacggggactgctatgataatggtaatgggtgtaggcctgatagagttgtggtttgttgtaatgggaagccatcgtgactaagaaattaagaccaattcgggcaaatacatttattgaggcctctgtggtaggctaaactatgagggagataaagcagtgagtcagccccttgtcctcaaggattttacagtgcagtgaggtggagacaaaccctcaactaacgcttacagataaggcagagtataaaaacggtcacatcagaacaacttagaggtggggtgtggagttcctagaaggcttcttgaagtaggtggtatatactctgagactttgaagatgaatttcaagtaactgggtattccaactgaaggttggcagcatcagaaggtgtaggatgtgttatgtttaatataggcaggaacgaaggcctttactgagcatgcactgtaatgctagggtctgacgatatagaaatatattgaaaacagttcttgccattgaggagctcttaatctagagggatagataggtgtaaactgtcattagggtgatgacttcacaaggtagagaagaaaggttataaaggagagtgtgtaactctgacataaggaagagaaaaagatactttgcaaaggaggtgaaacttgaattatgtcctgagaaagaaggaggagtttgctaagtggatgatgggagaagctaggagtgctacaggcaccagcgttcccttgttaaacaatctaaatgtgacaggcaccaggcaaatacatttttgcttcccctttccaaatggattttggctgtgggagggaatgacttaatgtcttcttttccaatatactagcagatggttaaatatttacagttagacttggattctaattcagctatataattagctgtatgaccttagtaagacacttatttgtgtttcagttccttcattcatacaattcaaaaaataagagtctagtacagagcctggcatatataaagtgccattattattttctatcattatctcatttagtctttgtaagtaactgggcctctagttacaatttcccccatttttcagaagcaggagctcagcgtaggtaggtggcctgtctgaagttcacaggtcaatctgcagtcgcctccgcagcccgtccgctttaattttatgtccgcgccgggttttccaaggcggccccgggggcaggctctggtccggtggccgagactccggcgccagggtttgggcggcgccgcggccggctccggcgggcgggcaggcgggcggggccaggcggggcggggcgggcgtggggagggaagttgtggaagttaggggagacgcccgcccgcccgccccggcctcgcctgcggccgctccctccgcctcctccccgccccgagccccagtcagcccgtcttccttcccctcccttgcatgatggaaacaccatggctgcggcggcccagctctctctgacacaggtaacgccacacgcccgtccgccgggcttggccggccggtgccccctcccccaccgccctcagcttcgccgactt

SEQ ID NO: 1507 - DNA, 2300 bp, Homo sapien
agtcacagggcaatttggcagcttgagctggaagaggccttcagggtaaactttatttgatcttctccttgtagttcaatggatagttctctactcccactccccaatatctaggttttgtttgtttgtttcatttttttgagacggagtcttgctctgtctcccaggctggagtgcagtggcctgatctcggctcactgcaacctcagcctcctaggttcaagggattctcctgccttagactcctgagtagctgggattacaggtgcccgccacctcacccggctaatttttttttttttttgtatttttagtagagatgcggtttcaccatgttggtcggtctggtttcgaattcctgacctcaagtgatccgcctgcctcggcctcccaaagtgctaggattacaggcgtgagccaccgtgcccagcccccaatacctaggtttattaccttatctctacctatgaatatcccacatcaacacacatccagtaagaccaccctgagctggctctgtcagctcctattactcacgtctgatgactcaactgtttccccttatgagacccaggggacttgagcttgcttttgaaagagttaagaacatggcactccaaaatatgctgctcttccatatcgactattttgaattaaaggcacttataaaacagcaagtgcaagaagatcactctgaccttcattctgtttctgaaaagcaggggataaaatccccacatgaaagatgtcttccctataccaaaaggaaagtaacatttttattatcaaagacaggaagttgaagccaaaggaaatctatataaacaaactttgttaaactaacccttatctccctcatcacttctctacctaattatcctggcccaagcccctttcccttaccacatttcacaacttactattctttgcccattcaccacataagtaattgactctaactgcttctataggtcttcatttccttaggagggctcccatgtcacataaaacttacattaaatacatttctatgcttttctcctgttaatctgtctgatgtcaatttaattttcaggcccagctgaaaaaattctaaaagggaagaggttttacctcctcaacactttctgtggtctccccgtctctttcaaggtcatggtaattagacaggtcttggtgaccacctctgtcactccctcctgagggaggggcctcagagcttctttgtgccttaacttgctgtggcttgaatgaagtggatcctgcttctctgaccatcatcgacccagtgaaggataagggtagatgccaaggcaaaaagatgtgttatgtattaggccctcatggggctccctaaaaacttcaccttattcatgctcatggacaatgctgtgagataggttttttgttggttgtttttgctttctgtttttagggtttttttgggtttttttgtttgtttgttttgggacagggtcttgctctgtcgcccaggttgcagtgcagtggcatgatcatggctcactgcagcctcaatctcctgggctcaagcaatcctcccaactcagcctcctaagcagctgggaccacaagcatgccactacacctggctaattttttgattctttgttgaaattaggatctcactatgttagccaggctggtctcaaactcctgggctcaagcgatcctacttccttggcctcccaaagtattgggattacaggcataagccaccaggcctggttagataggcatttttaaattccattttgcatcttgtaagtggtagacctgagatttgaacccaaatctgatttcaaaactgtctgatatagtttgaatgtatgtccccaccaaacctcatgttgaattgtaatttccaatgttggaggtggggcatggtgggaggtgtttggatcgtggggagaatccttcatgaatagcttggggtatcctcttggtgatcagtgagctcttgctctgagtttgctctgagatctggtggtttaaaagtgtgtggcacctccccttcctactctctctgtctccttcctgttttcaccatgtgacgtacctgctccctcttcactttccgccatgattataagcttcctgaggcctccctagaagctgagcagatggcagaaccatgcttcctgtaaatcctgcagaatcgtgagccaattaagcctcgtttctttataaattaccccgtctcaggcatttctctttttcttttcttttttttttttttttttttgacgaagtcttgctctggcccaggctggaatgcagtg

SEQ ID NO: 1508 - DNA, 2300 bp, Homo sapien
gctcacacctgtaatcccaacactttgggaggccgaagtgggtggatcacctgaggtcaggagtttgagaccagcctggccaacatggtgaaacctcgtctctactaaaaatacaaaagttagccaggcgagcgcctgtaatcccagctacttgggaggctgcggcaagagaatctcttgaacttgggaggtggaggttgcagtgagccgagatcgtgccactgctctccagcctgggcgataagagtgaaactccatctcaaaaaaacaaaacaaaacaaaacaaaacaaacaaaaaaaacagaaactcattcatttctataccatctaactactgatccactggcatctgaacccatactctctgctcttctttcttgttactttggataaagtatctctgctagtatcaaaagtcaacctttgcacttgggcttggggtctcagtcttttcctttctttctttttttgtattttattccagtgttttgccaacacaaaaagaggtctcaatcttatgaagggcttcactgctgctattctctcttttctctaggatgtccccagtttttccctctcttgaaaatcagcaaagtaatattctctagtgtcttcgatctaaataataattttaaaaaaggacaaagaaagcccttcccttgaccacacctccgtttccagctagtgcctcatcttttagtttcctttttagctctttctcttgatatttgcacggctggccttttcttatcctccatatctaagtttaaagccacttcctaagaggcctgccctataaccaccccctataaattagctacccactgacttcctattaaaataatttattaaattatttgcagtgttaatcagtattggatatttttcttgtttacttgtttagtgtttgctttcaccacagaatttaagctctgagagagcttattcactgctgtattcccaggacctccaacagtgcctagatatagtaggtggtcaataaatcctttggtttttttttttttttttttttttttgtgtgagagagaatttggctctgtcacccaggctggagtgcagtgatgcaatctcggctccgaggttcaagtgattcttgtgcctcagctaggactacagggtgcgccaccacgcccagataatttttgtatgtttagtagagatgggcttttaccatgttggccaggctggtctcgaacgcctgatctcaagtgatctgcctgcctcggccacccaaagtgctgggataacaggtgcgagccaccgcgcccagccaataaatgcttaaattgcccctgtaggctgttagtgatctatccctacttctttgaccttatctcccaccactttctccctggctcactgctccacgcacactgacctccttgttgatccctcaagatgccacgctcactcctaacatttggtctttgcatttgctattccttcgtcttggaaggctcttccaccaggctccctccttcgctttcttcaggtctttgcttaaaagttaccttttcactcaggccttccctgtttgggaatttaaaatagcagtcccagcgctctctccttccttgcttatgtttttctccatagcatttatgattttttaatgtacgatataatttactatttattttaccattcccctcacctgtcatgaaggctctgttgtatccccaatgtctagaagaatgcctagcacaaaacagcgaatatttattaaatgaatggatttgtggaatgaatgcataaatgaatatcagatatgaaatcttttggaagtggaaggtatcatggccagtaaaattatttattaatatgttcataatcttttttctttactctaatcccatgacagattataaataatcttaatagcagtattcacgtttgcattctcgcatccgtggcatggagtcctacacacaataggcgccctaagaaagcgtgtttgacttgatcgctggagcatctgccggcaccgcccaggacccgcccaggacccgccccgccccctgcggccccgccccccgcatgctgaatgccatataggcgagtgacgtcaggccgtttgttgtcattggcggctcccaagatggcgtccatcatggaagggccgctgagcaaatggactaacgtgatgaagggctggcagtaccgttggttcgtgctggactacaatgcaggactgctctcctactacacggtgagtccttggagggcacagctccaggcgcctcggggccgcgtttcctgggtggaggtgggggaccggg

SEQ ID NO: 1509 - DNA, 2300 bp, Homo sapien
ctcaggtaaggtggtgtgtgcgcctgtagtcccagctatttctgaggcaggaagatcacttgagcccaggagtttgagttcagcatgggcaacatgagacctgtgagactttgtctctaaaaaaatttaaataaataactaagataaatgtaaaattacagctgtagtaagttctacaaaggagagttacatgggctatgacgatgtaagatagcaagaactgacattggcagggaggaaatgatgatgagtagaagtaaataagtgaagtgtggggattgatgtcaaggggacagtataaaagaaataacagcatgcgccaaggccctaaaattggaaagtccttggcaaattaaaggagtttgaaaaaggccattgtgtgcaaagcagaaaataggtactacaaggtaaaagatggagctaagcggtaggtaaggctaaaccttgtcagccattgttaaatattgaattgtatcctaagcacaactcagtggaaagcagttaaagttctttaattgggggaggcaatgaaggggtaataaaattggttatagaaatactgctctggctctagtgttgagaatgaattggagtagccagagtagattcaagaagactttagtaagattattccaacaggccaggacctgttatagggtggtggcaatggagagagatggacagaatggagagtgtatttaggaggtaaaaatgacagaacttggtgatgcactgaatgtgaaatggggaaggtgtctaggaggactactaggtttatggtttgcgtattagggtggatgatagcagtttcatttactgagacagggagccctggcagagtacccagcttttagagtgggtagggggaaggggagagtgcatctggtgttgggcattttgaagtgatttacatacaacaaactgaaggtatctttaacactgagtccagcaggttagcatatttattcagcaagcattgcacctttttttgttgtttttggggtcttcaactcctggcctcgaatcctccctccttcccccgcctctcccagcctccgcctcccaaagtgctgggatttcaggagtgagccaccgcgcctggccagcatcgcgctgtttgtgcagtgtgccctgtgctaggtcttgcagtgggtaccagtagagacataaaagtacaaaagataattggacgtttagtagagtcctgaaagggggcgggataggaagatacctaaccataagaaaaaccagcaagagcggaaaaggagctagtcctccagatcaataagttaatcacttatgtttgtgattccctgcattttgggtgattctctgtcgaggtcctcttaagtccagacttttgatataatctgcagtttgcgccatttggattcctgaagcatctttacaagccacctacattccttatggagctgtggcacaacagcaagcccacgatgtctcaccggattaataaaaatataggcgctcacgcttttgtttaccgatatagtatctcctcctcccctcactccatcaacccccacgcgacacaactttccggaagtaagcaaaatccgttatcaaggtgaaactccggggaccaggctccacagctgccataaactggatggcacgttagaagccggtgggtgtaggtgaggcacgctggcgcccgcgggcccttctccagccgctacccagtgggaatccgcggggctgaagccccgaaaccaggctgagcgtcccagagcgcaacctccctttcccccagcagcgccggcgccgcagaagccgcgtgtccccaggcgcactcccccaaggtgaacccccgccccccacggaggcggctgggtcgcgggtctgggcggggcgctccggacgccctcccgccgctgcgcacccctcccgcgagctgccagctccctcggcctctccacccaaaactggcccaaccgccaatcgtctgcctctcacctcctacagcaggtgacccatggccaatcgccaggggtctctttgccaggagccgccagggccagccaatcggggcgacccctccgccggggaggggacgggaaaggggtggggggtgaagggggtgaagggggtgtcccgggggacgggctgaacctcagtcaggaccgcctgcaccgcagtccggggatcgggtcgaggggagaagaaaaaggggtgctcgggagcagcccccggctacctcccctggaggcacagagggcgggggccttggcgaatggctttcttgctggccacttgcggagtgagtagaccccgagggt

SEQ ID NO: 1510 - DNA, 2300 bp, Homo sapien
gttaaataaaacaggcaggattttataaaacataccaaaaacacttgatcatttgcaatgaaaaacatctagaaagtttatactcatagaaaatttaacctaatagaaaaatatctttgaatcatttgcccagggactagagcatattttccttaagaatttttattttgaaaaaatagaggaactattcatggaataggccttagaggcaggctgcttgggttcaaataaaatagccctgccactcactacctgtgaccttggcaaattacttaacctttctgagtcttaatttcttttcctgtaaagaaagctgaaatgttctaccttagaagtttgttgtaaggtacagaacaagcgcatagtattcaatgaatgttagctatatgtacatgtatgtgtatgtgcaatacattgtattacgtgggtttcattaatgtcaaaacagattagggctgagtagtattatttttgcttctcaagttctgcacatttatttttaaagcaagttgtagaatgtaatgtgacatatttgagcctgaagttggctgaccaaggactgtggataagtgtagcatagttattttttctatcaaaaacaataacaaaaagattgagtacttttaatatacatgttgtcaaaagacaaaattacaacaaatttaatcatagatctaattggcttttattcaagatgcatgaatcggatcagcctccattctacaaaatagaatgagaggtctcactgggcagtggcaaagcagtgggttttgtaaggtgagaactgtaacaggaaaaaatgctgattggttaacatcagattacttttcttttaagggttaaaacagtgagcatttccgtattacactgattcgggtagactggaatctcctattttcagaaaaaaaaaaaaaaacctggtctattttgggatccacttgcttccttagagtttaatgatacggcatttaacaagagtgactccattttggtttggtctaatctgttgggccctagtacaagagctcagtccaaaacagtggcctctcataatttttgtttaacagtgcacaaagtttttaagtgttttctttggttgaccagcctaattgtaagaacgtttcatctggaaaataaaagattacatccaaaagagaattctggtcccttgttccaaagttattttatttcttattcccttcagtgggaggggtaaggaggtgtgacatattctcactgctatatatcaaagcgttaatggtggaattttgtctttgtaaagcatttggagttattttcgagaaaagcgctgtgtaaacaaggaatttattttaagaacaactccatgtttgttgagatacttgtttagttattatggcttggtctagtatctgaaaatagaatcaaagtaataaccagaaaacccttagcacccatgtaaatacagactttttattttgcagaccgggaaactgaggcccatagaggataagagacttaaagattctaagctattaaaaactccaagtctctgtttctttgcttttctcagtgcttcaaaacattccccacttcagtttcttagttgtttttttttttaattattactgattgttttgggggtgttttctctaagtgtccttcatttttcagttaaagtatttgtggcagataaactattttagtgacaagaatcagaattcctgtgttcaagtcacttgatcgaaaagaccttatttaatgagttttagatattcatgcagaaagagggctgggtttttttggttttaaattttctttaacagtcctgaacacagtgtatgtttgtttttcacatggcctggaaaaaaatttttaacttagatattacgtgagaatgctacaaaaactttaccattacctcagtttctattattaggtgattttaagtttttacaactgcttttttgggcttatttattggcaaagtatttcccttatatttctgttttagtatcttctgttataagcactacttaatatatatgtgaagttcagttttccagatcaattaaaggtaaagaacttacatttttatttcttgggtttgcccagtttagtcttctaaatggtaaatgtaaactttgctgtggcaaagactttggtttaacatgtacacactcgcacccccctgctgccctatggagttttctttttaaaatgccttcatgctgtcagaataatttcttgacttagaatcagagaatcctagacttttctcccctctaaaattaactacatgtctgaatttttctccctct

SEQ ID NO: 1511 - DNA, 2300 bp, Homo sapien
tatcagtatagcactacaaacattgaagaaaatctgttaaataagagttctcagaaaaatcctaagtagaagaaaaaaatatttattttttttaaattacgtgtgaaattaaactttttaaaaatgttttttggctgttcagttcctttgtccatttatctactggagtagtgatcttcatcttgagttgtaagagctgtttatacattaaaggtatttatccatgttttcttcttcagcatttttactcggtggtttataattctgcgttatctaaagtggtaagaagttgtaccaaggcagtatataagcttccctgctaatctaaccctatttggattatgaatttacatgttctgtggaagaaaaatgtttacctaaaatttaaatgctgagagtctgataatagagattctaagtgttacagtcttagtgtccctttccaagcttgtgttcatcagcccactttatattttcattatatgtccagccacactggttcactgattaatccctgtcacacccctcttcctatcctttccttgtctttttttttttctcccgtctccatgtcttgttcttttatcacagccttactcttctttaaggcttttctctagtgccacctcaataaattgtttcccagctctgccctcattctgttcccccaaacagagcatgatctttccttgaactgaacttccagggtgcttagagcattcttgtatgatgtttgtcacattccacctacaatttaaatgctcttgttattctctcatacttacctttgtctccaccatagcttgcttgcatttatttatttatttatttatttagagatggggtcttgctctgtcacccaggctggagtatagtggtgcaatcttggctcacggcaacctctgcctcctgggttcaagtgattctcctgcctcagcctctcgagtagctgggactacgggtgtgcgccaccacactcaggtaatttttgtatttttagtagagacggggtttcactgtgttggccaggctggtctcgaactcctgacctcgggtgatccacccacctcagcctcccaaagtgctgggattataggcacaagccagtatgcccagcctccaccacagcttttaacacaggaccttgaatatagtggatatgtagttattactaaatgttaagaaatttttgcttactctggggtgttctacttcgtaatgaataattgataatctgatactcatttcaaaaactcttctcccattcccattctctaatgaaattcttctctttttttcattggttaatcatctttctcatgtcttcccgtattccagtttgttggttcccagtctgtattcttttcttctttttgtttattcctttaattgctcatttaaaagtttcttactgtgtaaatagtagtgagagcgcgagtgtgaataaaacttaattcttggattgtaggtgctcatcatgtatttcctatacacttgtctaatgatgatagagcaacagcagtagaaagtgcacacacgccccaaactcagatccagtttgaattccacattaataatgggacaattaatagtgggacgctgagcttcatatttcttcactgtaataatttcttcatcatagggctattgtaatataatatgtatgtaatatacaaataataaaataatgtatatgtaatgtccagcagataggaggcatcaaaggattcctctgagtgagtttgttgagtagtttgttgttgttactatacttagggagaaaaaggaagtttcacagaggaagtgacatttgaacattcaaaagtctttctctgtttttgatctgctaggcaggttaatggtcatttctgaatctgacaggttgagaattagtttttggagcatgcctgggcaatatgtggtggatgttaccatgatttgaatgaggtggtgttttgttttgttttcttttttttttttttagtctgtttatctgaagagaaatttgatcttcaagggtcaaatgtgtatgtttttcaggtagttcttccaacgtttattcttgaaagaagatctcttttagaaatgtatgcagacttttttgcacatccggacctgtttgtgaggtatttgactgaacatggtagtttccaacgtttacagatgttactcagcagctttctgccttttattttgcaggatagatggattccttgtcacctttcaaacatttctgggtattctgtggtattgaataatgtgtttacactggttgcctgtttgcttaaagttatatggtg

SEQ ID NO: 1512 - DNA, 2300 bp, Homo sapien
agggatgatcctgcccacgtggctctgaatgaatgcttgcattggggaaaagggtataaaaggcaggtaggtacctcctggcgtaattggaggctgtttgaagggtaaaggatttccccatgaagccaattatttccccaggttatgtgattttggagaggtggctgtaggtatatataatctactaattgaaaatttctattcagtttcagccttttatgctgagtgttttaacaagaagatacaattcaatgctcatatctggaccaaatcaaaattccttgggatgtcaattggggtgcacaacatagggcagggtaagtgtgttggcattgggtggactacaatgttataggagaattttatgaaaatggctagactagatgtcattgttagcaactaagcattggtattgggggtgagagcaaagggtggggaactagataggttatccctaaattgaatggagtatcctggagtaaccatcagctcgacaagaaagccttgtggccacttggcactactcatcagagattctgtcccttctctccacaggctgtgtctcatgtctagactatgatgaacattacattctcacattccccaatggctatggaaggcaagtgtgtccatttcctctgatcagcagtagactctgctgttccttgagacatgccccttccccctcttcctcttaactgtcaaccttacctaaaaacttttgattttgcaggtctatcctcacagtgccctgggtggaattaggaggagaatgcaatattaattgttccaaaacaggctatagtgcaaatatcatcttccacactaaacccttctatgggggcaagaagcacagaattactgccgagattttgtaggtattttttctgccttagagctcttatgcttttctgaaataactgccttttgtcttgaactacagcttctggattaggagtgtgaaagaatggttctgtctttgtaagcgtgtttcacattttatgtgtcatgtcttttgctgaagtcccatatcagaagaagacctaaaacatatattcagagcagtcagaggtcattgataggtttccttcctaaaaacctgacttgcaatgttgaactaaaagaggccttcctaggttgcctagctaaaccagattatggatccctaatttattcttgccagattgaatgatgagctggtccttacagcagactttgtgacccctgcagcactgcctcctggtcctcacagctatccctttttctgtgcctttgctggggaaaaacagtaaccatcacattttgcacgcatctggcttgcttccacttgacactcttgggtcacgtgcagatgactgtgccagtcagtggaaagtctatagtgatggcaccatgactctctctgcctctggaacccttaactgggggggaaggggacagtgggaaagaaagtttcaggcgttgatagcagctctcctccctctgccctggtcatgtctcccttttctggcctctttcaatcctgtttatgccttgcccttcctaaccaggcctttgctgtgttgcttatcttctcacattccatagttgtgtgtccaagtagaggtctgttacggcttttgcagaatggatccttgctcagggaaagtattcacaccatctggcacagaggtccctttcaacctgaggatgaaagcctgcattatattcttaagcaaagccttccctgacccccagtgcccatgtaagctcaccacagcacttaccacctagaatttcaatggtggttacgtctctctccactacgctgtgaacagcttgaggatagggaatttgccaactctgttatggtccttgcacccagaataggacgttcttgcccaaacccaccattcttgggatctcaagttcataagcgtcctgttgaaggccctcattcttatagttagccctggggagtccagttctgttaagatgctttcatcaaaaacttcacagttgctcttctgtgctctactctgtagttgggccacactgagcagattctttggtagaattttcaacttgagactaacacaagtatttccttttctgttcagttctccaaatgacaagaagtctttttgctcaattgaaggggaatggaatggtgtgatgtatgcaaaatatgcaacaggggtaagatcctctattttgccacttgttttaggctacattagattgtactctatccctttttctggcttccttcattagtacttccttcataatgcatttccttctacagtatattagagctg

SEQ ID NO: 1513 - DNA, 2300 bp, Homo sapien
gaaaattttcattatatgaatataccacagtttttttattctgctgtcagtagacttggattgcttccagtttacataattgagcttattgccctgaggctctctttgctcttatttattgatctgaagcttagactttttctagggtttcctgggaagaaccaatatcttactacatgtttataggtctgtggttttctccattaatctgatcaaatttgcatgtcttctaatgatttctaaaaatttgtaatctgctaacagtgtcctttcctgttttctgtctgtcatgattttattttcaaaaaccaaaaaaaaaaaaaccaaacattttttctatcacttaaatgtgattattttttattatttatttattaatttttgggacagggtctcatttttcacccagactggagtaaagtggcccgatctgggctcgctgcagcctggacctcctgggctcaaatcatcctcccaacctcagcctcctaagtagatgggactacaggcgcatgccaccatgccaggctaattttttgtattttttgtagaaatgaggtttcgctacgttgcctgctggtcttgaactcctgagctccaaatgtgattattttatatggaaagtagataaatcccagtgttcagtcttccatcttaggccaaaggttctcttccttgtctttctttgcatgttattcttagtttttgcttgactttttaagtgtaccttgtcttagacgccttccctgactgcttgtttcttacattctgtatttatctctgtcattctgtattatactggctcatctcattattagacagtgaatgcctgatgatgaggaattttgttttatcctttttatccttaatgcagcatgatatctgatatgtaaagggtgctaaataaatgtttattgaataaatacatgaaaaaattagtataaatggggctgaatgcgatggcttatgcctgtagtcccagcactttgtggggccaagatgggtggattgcttgagcccaggagttcaagaccagcttgggtaacatggcaaaaccctgtctctaaaaaaatacaaaaattagccaggtatggtggcctgtgcctgtgatcccagctactctggagactgaggtgggaggattgcctgagcccaggtggtcgaggctgcagtgagctgagatcgtgccactgcactctagcctacacaacagagtgagaccttgtctcaaagaaaaaggaaaaaaaaaattagtgtaaatgggagtggtctgtaatagatacctagtcatcaaactggcacagtagttttgcagataagaatcaggagcttgagatggtggcacatgcctgtaatcccagccactcaggaggctgaggtgagctgcttgagcccaagagtttaaaatcagcctgggcagtaaagcaaactctgtctcaaaaaaagcagaataatcttcctgcggggctaccagtctgtgggggatttcattttcatagagatataaccactttttagttcataaaggcagctttggagactgatatgtcaaacattttatagaaaagaaaatcagcagtttaattttgtgtgattttgctttaatattaagctgacatgactgttctgtatattgagggatacaatttatcttagcctaagtcttctggtatgatagaatgtttaaatacttacaaactgagaaataggggaggctgagtggtgagttgcatatctttagctactaaaatgtgttttttgaataggtaaatatatttatgtagttcaaaatttaaaaatacaaacagcgtatattatgaagtgttcttaccttcatttccctccagctgttcaaaaactgattagcttttggggttccctctccagagcaaccaattttattagtttacaaatagttgtgtgtgtgtgtgtttgtacttttacttggattctttttttaaaattctgctaagctgattacttgtattggtgtaaagaacagctgaatcaaaatgtgtgattttttttttctccccccagatacatcaaattacagaatggcttgcaggcacttctgatttcagacctaagtaatatggaaggtaaaacaggaaatacaacagatgatgaagaagaagaggaggtggaggaagaagaagaagatgatgatgaagattctggagctgaaatagaagatgacgatgaagagggttttgatgatgaagatgagtttgatgatgaacatgatgatgatcttgatactgaggataatgaattggaagaattagaagagagagcag

SEQ ID NO: 1514 - DNA, 2300 bp, Homo sapien
gtttacatattttacagttccttcccattaggatgcaagctcccccaaggcaaggctttaaatttttgttgtcgttgtttagacagggtctcactgtgtcaaccaggctggagtgcagtgttgcaatcacggctcactgcagcctcgacctcctggactcaagcgttcctcctgcctcagcctcctgagtagctgggaccacatgcacgcatcaccaagcctggctaattttaaaaaagaattttgtacagacgggggtctcaccatgttgtccaggctggtaccaaattcccaggctcaaagcaatcctcccgcttcggcctcccaaagtactaggattataggtgtgagctatcactatcacgcccagcctaaggcaagttttgttttgttcatggttgtattccttgcatttggaactcagaagaggcctcgaaaaccttgaagatacagtaactatcaacacatctccctgcttcacgtctttccccgctcattcgtatgtatgagctatgatctcttaccccatggtgtcagtatagtgcatcttactaatttcagctgctttttagctttcatttatgtttgtatttccgtcacattttacattgctaaccaaagaccactgctagcgggaaaaactgggaaaggagacttgaaggcagcagacgctgcagctgctcgataaaaattggccgaatttaacaggaggctggaggagctaaaaaacgttttcacacagaagagttagcacatccagactggtctttttagcactttcttagggcttgaggatgaaaccccaccactgtcgggccgactgtagggtagagaagagccaattagtatttgcggcgctcgggagcagcgtccatccggcgggtgtaggaaaatacttccggcgttctggttttttatgtgctgagtcacagccgaaggctcgccccgggtctgaggagtagggtacccaaactatgacacgaatgggaaaatttaaaactttggaattaattctctgcactcgtttctcagttttctcattaggggaatatttttctttgacacgcggagcactactcagtggtttccacaaaacacactcgtacgtcataaacgcgccgggggcccttctcccgtcgtcctccgcgccactctctccgcttcttctccctcgccccgcccactttgggtttcgaaatgttcgctggctgttccgagaatcagtccgggtcacgttggtgcctctcctttcctgttctgattggttgcttacgtgagcgtgactactttcttgcctcatgattggctgaaatcagtagcgtcatcggcggccgggagggcggagggacgagggaagtcggcgagagggagactgggttgggggaggggttcaggcctgttccccgcggctgcggcagcaccagggccggccgccaccgcctctagaacgcggaggaggtgggtcctgggaagcgggatgtccatcgctccagcttggtggtgaatgctgaggagagtcactgttgctgcagtctgtgccacccggaggaagttgtgtgaggccgggcgggagctcgcggcgctctggggaatcgaaacgcggggtcggtgcgaagactctgctgctgccagaccctttcctattctggccatgcctggaaggaacaaggcgaagtctacctgcagctgccctgacctgcagcccaatggacaggatctgggcgagaacagccgggttgcccgtctaggagcggatgaatctgaggaagagggacggagggggtctctcagtaatgctggggaccctgagatcgtcaagtctcccagcgaccccaagcaataccggtgagggaggaggcttgcaatggggaggcgaacagtgtgccggcttctctgtcggtgccgccgtcacttcttgtctccatgtctcccaatggagcaacagggcacactttccaccccaaatgcttccttgggtggaggtggcaagcgtgattagaggcttccctgtggtgtcagctgggcaagtgggagatcttgggttgtaagacgtcagaatgggagaagcttttcgagtcatttgaatacagtcgctaaagcaagaatgaaggtttctttgaggaacgcagcctgaatggtgagggagtcttggtattatgttaccaggaaaggttgacggagttggatactttaatttggaggacaggatatttaaggggcatattatcactatccaaaatatttgagggacacttaagtgataggtgaaactagtggacgaaagttaccagaggatggtg

SEQ ID NO: 1515 - DNA, 2300 bp, Homo sapien
ttgccagcagaatttcacagcctcagtgactgcgcacagccctccagaataccctgaaaatatgcaggatagagcacaagttcccatgtctcttgcctgaatcactgcatttttagaaaagataaatccaatgatgctcgaccttgcctcttcctgtacatttctgacaggattaatgactatgcctccataatctataaacatgtgtactcttccacctaaaccttcatgagattttgctctagtgtaactcctgagtacattttttcttttttattagagacaaggtcttgctctgtcaccaggctagagtgcagaggcacaatcatagttcactgtaacctcaaactcaggagtcccagcaatccttttaactctgcctctcctgtagctaggactacagggatgttctaccacgccttgcttttttatgtgtgtgtggagacagagtcttgatatgttacacaggctggttgtaaatgcctggcctcaagcaatccttctgcctcagcctccttaatcactgggattacaggcccagcctttctgagcacatttgatttaacttccaagcacatgcagagcggccaccacctgtatagaagctgcgggctgaaacactgctttggagcagtctaaaaaaaaaactctctgactctcccaggtggcagtcctcaataagacttctgaagaaagctaacttgaattatttaaaagcctgatttactttagtttacatattttacagttccttcccattaggatgcaagctcccccaaggcaaggctttaaatttttgttgtcgttgtttagacagggtctcactgtgtcaaccaggctggagtgcagtgttgcaatcacggctcactgcagcctcgacctcctggactcaagcgttcctcctgcctcagcctcctgagtagctgggaccacatgcacgcatcaccaagcctggctaattttaaaaaagaattttgtacagacgggggtctcaccatgttgtccaggctggtaccaaattcccaggctcaaagcaatcctcccgcttcggcctcccaaagtactaggattataggtgtgagctatcactatcacgcccagcctaaggcaagttttgttttgttcatggttgtattccttgcatttggaactcagaagaggcctcgaaaaccttgaagatacagtaactatcaacacatctccctgcttcacgtctttccccgctcattcgtatgtatgagctatgatctcttaccccatggtgtcagtatagtgcatcttactaatttcagctgctttttagctttcatttatgtttgtatttccgtcacattttacattgctaaccaaagaccactgctagcgggaaaaactgggaaaggagacttgaaggcagcagacgctgcagctgctcgataaaaattggccgaatttaacaggaggctggaggagctaaaaaacgttttcacacagaagagttagcacatccagactggtctttttagcactttcttagggcttgaggatgaaaccccaccactgtcgggccgactgtagggtagagaagagccaattagtatttgcggcgctcgggagcagcgtccatccggcgggtgtaggaaaatacttccggcgttctggttttttatgtgctgagtcacagccgaaggctcgccccgggtctgaggagtagggtacccaaactatgacacgaatgggaaaatttaaaactttggaattaattctctgcactcgtttctcagttttctcattaggggaatatttttctttgacacgcggagcactactcagtggtttccacaaaacacactcgtacgtcataaacgcgccgggggcccttctcccgtcgtcctccgcgccactctctccgcttcttctccctcgccccgcccactttgggtttcgaaatgttcgctggctgttccgagaatcagtccgggtcacgttggtgcctctcctttcctgttctgattggttgcttacgtgagcgtgactactttcttgcctcatgattggctgaaatcagtagcgtcatcggcggccgggagggcggagggacgagggaagtcggcgagagggagactgggttgggggaggggttcaggcctgttccccgcggctgcggcagcaccagggccggccgccaccgcctctagaacgcggaggaggtgggtcctgggaagcgggatgtccatcgctccagcttggtggtgaatgctgaggagagtcactgttgctgcagtctgtgccacccggaggaagttgtgtgaggccgggcg

SEQ ID NO: 1516 - DNA, 2300 bp, Homo sapien
ctattacagaggtaccagcagtgggtgattaagagctcaagagtgaccatgggagctggtggccaaggtgatgtggaggacaaggactgagggaccaggaaatctcatagctactgaagtcaccaggaggatggcaggacaggggctagtgaggatgaccatgagccaggggctgcaatctgtaatgcataaggagcaattggggggtcagtgatgaggaggggttgaggggggtatggctggagagcacagaagaaagaatttttgcacaagggtggaaatggccatgccatccccacatcctagttttatagtatatggggagtggaaaaatgagaagccttctagcagagggcagcaaaggaggcagtacctggaggaggctcaggcaaagaagtcacctgagtactctgaagaagcagagggtatagcagagtttgttgacaaaagaacaggattctagaaggcacagaggaaagagctgccagtgtgatgggcagtgtgagtgaaagggctgggcaagaagctcagaagagtaagcgtctgaggcagaggccagacaagcagaggagctgtcagcttgggtggttcctaggctggagatgtacactgtagacagggtcataatggaacttggggggaaaatggttttggtatttgactcagacctctaagatctgagatgggggagaagtgtggggaaagacaatgattctagagcaagccttcagctggctcctgtgacctcaggaagactggaagtccatatcaggatttgagggtggggtatttattgcctcctctatctgcctcctctagtggaagtgggacttcctagggccaggccaggcaagaacatttttctactcctgttgacagcctcctggtaatgggaaaccattgagaggtttttgtttgtttgtttgtttggtttttgatggagtctggctttgttgcccaggctggagtgcactgctggagtgcagtgatctcggctcactgcaacctctgcctcctgggtgcaagcaattctgcctcagcctcccaagtagctgggactacaggcatgcaccaccatgcccggctaatttttgtatttttagtagagacagggtttcaccatgttggccaggttggtctcgaactcctgacctcaagtgatctgcccactttggccttccaaagtgctgggattacaggcgtcagccactgtgcctggccgagagttttcttaaacaaggttgatggtaacatggtgacattttttaaagggttgctcgggcttgtgtcaaaatgattttggtatctgactcagaatgaatgggaccaggaagtctcacagctaccgaagtcaccaggagtatggcagaacaggggctagttaggatgaccatgggccaggggctgcaatctttaatgcataaggaacaattgggtgtcagtgatgaggaggggtggagggtggtatgactggagaccacaggagaaagaatttttgtacaagggtggaaatggccatgctgacaccacgtcctggttttatagggtgaattggagagtgaaggcaggaattaggaagctgttgcattagtccaagcaagaagtgatgatgctggagtcagaacaagggcaatggagacacagaggaagggcagggatatgttaaggcggtgggatgtggggtgtgaaggaaacacagatagggtagaggacagcgtccaggtttctggcttggtttccgcttgtagtcagcctccctctctgggcttttgtgaagacggagccatagaacggaccggaccagaaagcagtttggaaatggcaaaactgctacccatcatcagctacattatcatcaaagctctctaattaccctagtaagttcagtcaatggaacgaggcatgacaattaagataaatcacgagagtcacccagacatgggggacctggaggtcctgagtcacctcggattacacctgctaggagttgagggccggggcggggcgaacacagactccgcccttgggcggggcctggatgcggccggagcggagcagtgctggagcgggagcctcagccctcaggcgccactgtgaggacctgaccggaccagaccatcccgcagcgccccgccccggccccctccgcgccctcccgacgccaggtcctgccgtcccgccgaccgtccgggagcgaacccgtcgtcccgcactcggagtccgcggtaaggggcgcggccccggcagcccgcccgcggaggatcagggaccgatccccggcgcggggcgctgggcaccga

SEQ ID NO: 1517 - DNA, 2300 bp, Homo sapien
acccaagcactctggcttcagagcctgctctttaaacctgtataccatactgcctgctagaatcaagttgaatagtctgtaaagtctcaagtaggtttagtttatgcacagacaattcagtgcataaggaggaggaaaaggcagggcaggggagggaaagctaagcactggtctgtgtttactttttttttgtttgagacagagtttcgctcttattgcccaggctggagtgcagtggtgcgatctaggctcactgcaacctccgcatcccgggttcaagcaattctcctgcctcagcctcctcagtaatgggattacaggcacacgctaccccacccgactaattttttaaaaagtatttttagtagagacagggtttcaccatgttggccagactggtctcgagctcctgacctcaggtgatctaccctctgcctcccaaagtgctgggattacaggcgcgagccaccatgccgggcctgtgtttacatttatttaaccctcacaacaacctacagattggtaaacctgtgaaatagcagttgttattttatagaaggggaaattgaagtacagaaaagttacataatttgccagtagttacaacactagtaagtggaggagccaagacttgaatgttttttactatactgtacaagagagatacaaagaccccagtatatgtgcatctacaatatacacacatgcacaggcacactcacatttctgcacctaccatcctatagtgcttgctgtttatacaagagatccaacagtttcatggctctgggtctcaaacctacaataatagagttgccagattgagcaaataaaaataacggatggccaggcacagtggctcatgcctttaaccccagcactttgggaagccaaggccagtggatcacctggggtcaggagtttgagaccagcctggccaacatagtgaaaccccgtctctactaaaaatacaaaaattagccagatatggtggcgcacacccatagtcccagctacttgggaggctgagacaggagaatcgcttgaactcaggaggtggaggttgcagggagctgagatcataccactgtggtccaggctgggtgacagagcgaggctccatctcaaaaaataataataataaaataaaataaaggatgcaggccaggcaccttggctcacacacctgtattcccagtactttgggaggcagaggtggcacaattacttgagcccaggagtttgagaccagccttagcaacatacaacctcatctctaaaaaagaaaaaataaataataataataaattaaagatgcccagttaaatttgaagtttagataagcaccaaataattttaaatatgtctatgcaatatttgggacacacttaagcttaaaaatgtttttggtgtttatctgaaattcaaatgtaactgggcatcctgtattttatctggcaaccctactaaggagaaaaattcctatttgtctttcaagttctaagtcaaatgactatttctacataaagtcttcagtgatttctctgggtagtttgtttttcccttctgttcttttataacctcacctgcatctatccattatagtatttattactctgattgtaggcgcctgatccttcccattcagaccttttatcttttgtggggaaagcgttttatgttcatctctgaattcccaaccttggagatgttgaatgattgaaatggtaattgaataaacatttactgagagccagtaggtttaagaggaggaatgaaggagaaccagcatttattaattgccttctatatgctaaatatagtgctgattgcttacaatatttaatgccccttaggccttattaataaaatggacgggcagtctttcgctgcaggaagatcacattctcctgaggcctataacatttggcataaataactgatgccattatagtctctgtatctcctttctgagaaagctgaacctgggcctagctggcgtagaactcctgtttccatagaaacaagagggtctgtaaaagtcaagggagacaggaagagcagtttgcacttccggcttacgtcggagacgcgtacaacccggaagttggcgcagcgcggttgccaatggtcgctccctgagaggatgccgctcgtggtgttttgcgggctgccgtacagcggcaagagccggcgtgctgaagagttgcgcgtggcgctggctgccgagggccgcgcggtgtacgtggtggacgacgcagctgtcctgggcgcagaggacccagcggtgtacggcgatt

SEQ ID NO: 1518 - DNA, 2300 bp, Homo sapien
attccatacagtaaggtcagtgaaaaaaaaaaaaggaagaggggttgggatccatgctacaattcatctacttagaaaagcataaactctgagttcacagactgtcagtccaactttcaactaagtaagggctgatgaggagagaggtgttaaaacttagaatggagatgtaggtaatggatggagtagggggccacacctcctaacctccattcataaccactgatcgctcacttacaaaaaaacttcgctgaaccacagcaaggacaattgttggggacccttaaacagcagaccttctaccattcgcttggctcttcttatgcactagatacagctacctgggatgcaggtgctgtttcccaaaggcaagcaagtggcagtaacctagctcttcgcggaagaagtaacgagagaaatcttcagacccagaacagggtcctctgcatatgcaggtccccaacggctctatttctcccaggtgggaaggtgaccgttcctcaggacctcccaagtgctaggcactatgctgggctcttaacatgctttccttaatttacgggccattccttccccccaatccaataatttagagaggcctcaagtacaacttctccattccccagacccgctactctctaccccaagaaatcttcaaactccaggagcggttggggaagataaaaagaaatctggagtggcctaagagttagaatgggaggggaacggtgctagggcaagaagagattatactgggatcagtatagtaaagatcagtaaagagaagataagaacgcggtctgaccctttccaagcccattatgtccatcagaagagatgacgaggagcaggaaactgaagcccagcaaacaggtggccccgagacgaggccgcgtctccatggcagtaggtgcgcggggccacggggctgagcggacgcagggccggagtcccagcagacggtccacacagttcgccgagcgccgctcagcacaacacctctacttcccagatttttttttttcaaactctgaaggaagtgatgttagacggatgtgggtggtgcctccggggtccggtttgggatggagtgagcttaaaggtgcagatcacgtagaagggtacgagagctgttctcgagcgcgagttgcttttcgtggattctgggtgtccaggtcccgggacggagcgggaaaatgtaggccaagatagtaggggcgggggagaggttcgggagaaccgttgctcctcgcgtccgccacccagtccagcccctccccccaagaaccgctgcacttcctagtcaaaagcaaattattgattcgtgaggtcagtcgctcccaacagtgggcggattgcccactggcctcggattctccttacccctccacaaatcaagactggacaactggatttcattgttaggttcctgcgagggtctctgaggagacctggcaagcctgttctgcggtgcgtgggctcgtgccgtgcagacatgcactttcccgctggagaagctctgtaccttatttttccttgcaaccgcaaatcttctactcagggatgatgcaaccaactgatgcaagctccaagaaaaccaaacttgggacctcttattgcaaaactgacttaggtggacttaggacaccaggatataagtcactgcaggctaaagtgtaaagcttctggttatttttcttgtagcttgaggatttcttcccaatttttccccttcgctgtataacaaacaggtgaaaatgtccggtctttttcttcctggtactagttgagtcctaaagtccgtacttaatgcatagcgaaaaagcgacctaacaaaagtacacacccaaataaaaacataccgaccacccttttattaggttccctaaaattgtaggcagggacacaacagaacgctcgggagactgcaagccccaggatgccgcgcggccacctgcacctgccgccactagcactaagagggatgcgcaaagcaggcggggcgttggagttcagatgttcgctcccgggataggctgccccggagagggagaggcggggtcggctgtatcacgtggatctgctcccgccgccgccgccgccgccgtcgtctttctctgtctcggctgaggcagccatctttctcttgccgcgtgctggtgttggaggaccctccctgcttcaggtgagacccccggcggtcccgccacttcacggccataggccgctgcgcacggtctccccccgccctccccttccgacacccgccaaccgctcaggctgccacttccgccgtggtg

SEQ ID NO: 1519 - DNA, 2300 bp, Homo sapien
ggaaataagggcccagaagggagaagtcccttcctaggcccaaaagggagaagtaacttcctaaagccacatgattaatgagttcttccttggggattccaggatcttttagcactgttctcaaggactcaagaaagggtgtaaacaggtttatatttattaagtgcctaagttagaagcattgtggtaggcactttcacatacatcatgtttacacagagataaaaataattgcaaccttgagtcctgactttttattatgtagggtttctctaagacaagcacaggctttggaatcagaaagaccaaggttctaccagttgggaaaggtatttttcttctctgaacttgtattcctcctgcatttggaaaggtataacaccacgtacttcacagggttgttttgagggttaaaacattatcaaccacagggaatggttcacagaagatacacagttactggtaactattgttaccactcccgaggggacaactatggtaaactgcaagaatgtgggaacggaagttgaaaccgccattcactagctgtgcaacactgagcctgtcggtcagcaggcagtgggaggggggttataaagatgggcaagggacgccgacttgtaaacaaacactgccattacaaggtgaagagtgctgtaactgagttcggttccctggactcaagggcgggaagtggtaacctcagcttccctatctgtagactgggagcatcaaatgagatgacaacagagagcctgtataaagctcaaagcacacaacactgctgttgtgagcaaggagtaatggaacagaggaggggcgtccacctgcctcctgggacagggtctgggcggcaacagggcgggcccgctcgctcccacagggggcggtggtgctggggaccttcccacaggtgccgacccccagctgcgccgccggtaaccgacaggccaagccagccgcctccgcccccgctcgccgcaccacggcggaagtggcagcctgagcggttggcgggtgtcggaaggggagggcggggggagaccgtgcgcagcggcctatggccgtgaagtggcgggaccgccgggggtctcacctgaagcagggagggtcctccaacaccagcacgcggcaagagaaagatggctgcctcagccgagacagagaaagacgacggcggcggcggcggcggcgggagcagatccacgtgatacagccgaccccgcctctccctctccggggcagcctatcccgggagcgaacatctgaactccaacgccccgcctgctttgcgcatccctcttagtgctagtggcggcaggtgcaggtggccgcgcggcatcctggggcttgcagtctcccgagcgttctgttgtgtccctgcctacaattttagggaacctaataaaagggtggtcggtatgtttttatttgggtgtgtacttttgttaggtcgctttttcgctatgcattaagtacggactttaggactcaactagtaccaggaagaaaaagaccggacattttcacctgtttgttatacagcgaaggggaaaaattgggaagaaatcctcaagctacaagaaaaataaccagaagctttacactttagcctgcagtgacttatatcctggtgtcctaagtccacctaagtcagttttgcaataagaggtcccaagtttggttttcttggagcttgcatcagttggttgcatcatccctgagtagaagatttgcggttgcaaggaaaaataaggtacagagcttctccagcgggaaagtgcatgtctgcacggcacgagcccacgcaccgcagaacaggcttgccaggtctcctcagagaccctcgcaggaacctaacaatgaaatccagttgtccagtcttgatttgtggaggggtaaggagaatccgaggccagtgggcaatccgcccactgttgggagcgactgacctcacgaatcaataatttgcttttgactaggaagtgcagcggttcttggggggaggggctggactgggtggcggacgcgaggagcaacggttctcccgaacctctcccccgcccctactatcttggcctacattttcccgctccgtcccgggacctggacacccagaatccacgaaaagcaactcgcgctcgagaacagctctcgtacccttctacgtgatctgcacctttaagctcactccatcccaaaccggaccccggaggcaccacccacatccgtctaacatcacttccttcagagtttgaaaaaaaaaaatctgggaagtagaggtgttgtgctgagcggcg

SEQ ID NO: 1520 - DNA, 2300 bp, Homo sapien
caatgctgaagcagctaaaaacacttttataggaggaagtgtgtttagagtccaaaacaagaagtcttaaatgtgtgccaatcttagctctgccatagacttaaatttgatgacttaaatcccaattcctatgctcaaatatccacagaaaaggaccaacattcacttttctcaaaggaatgtggccatgagagtgtagtgaactaacaaagagccaaaggaatttattgcaaaaaaaaaggggctaaggaaaaacattagacctagatacttggtaaaccctttgggattcttctgcattttgaagtaacaattcccaagagaacagacagaggttgggatgccaagacaaagtcttgacttgtttgaaataaaagcaagaacaaaattaactcttcaaatcaaggtatagatgaaagaacagattccattccaggtggtcaggacaacagaattgagaaattttgttcctaaggagtatctcagagaaaaatgattttagggagactgagagctcaaggcagtaggggaggaacaagagtagtcttttgtttcttggcaagttgtggtgtgtggaattcaagtaggaaagaggactggactcagtctatgcgatgtcaagctcagaatctggagtagacctccaagatcacctggtttaattctctattctcaatcaacctctactttattgcacccatcattcctatctgtgatgtcatctcaacatctgctagcaccagcaaagtataaattacaaacgaaacagttccctccctcccatcttaatagattaggaaataagggcccagaagggagaagtcccttcctaggcccaaaagggagaagtaacttcctaaagccacatgattaatgagttcttccttggggattccaggatcttttagcactgttctcaaggactcaagaaagggtgtaaacaggtttatatttattaagtgcctaagttagaagcattgtggtaggcactttcacatacatcatgtttacacagagataaaaataattgcaaccttgagtcctgactttttattatgtagggtttctctaagacaagcacaggctttggaatcagaaagaccaaggttctaccagttgggaaaggtatttttcttctctgaacttgtattcctcctgcatttggaaaggtataacaccacgtacttcacagggttgttttgagggttaaaacattatcaaccacagggaatggttcacagaagatacacagttactggtaactattgttaccactcccgaggggacaactatggtaaactgcaagaatgtgggaacggaagttgaaaccgccattcactagctgtgcaacactgagcctgtcggtcagcaggcagtgggaggggggttataaagatgggcaagggacgccgacttgtaaacaaacactgccattacaaggtgaagagtgctgtaactgagttcggttccctggactcaagggcgggaagtggtaacctcagcttccctatctgtagactgggagcatcaaatgagatgacaacagagagcctgtataaagctcaaagcacacaacactgctgttgtgagcaaggagtaatggaacagaggaggggcgtccacctgcctcctgggacagggtctgggcggcaacagggcgggcccgctcgctcccacagggggcggtggtgctggggaccttcccacaggtgccgacccccagctgcgccgccggtaaccgacaggccaagccagccgcctccgcccccgctcgccgcaccacggcggaagtggcagcctgagcggttggcgggtgtcggaaggggagggcggggggagaccgtgcgcagcggcctatggccgtgaagtggcgggaccgccgggggtctcacctgaagcagggagggtcctccaacaccagcacgcggcaagagaaagatggctgcctcagccgagacagagaaagacgacggcggcggcggcggcggcgggagcagatccacgtgatacagccgaccccgcctctccctctccggggcagcctatcccgggagcgaacatctgaactccaacgccccgcctgctttgcgcatccctcttagtgctagtggcggcaggtgcaggtggccgcgcggcatcctggggcttgcagtctcccgagcgttctgttgtgtccctgcctacaattttagggaacctaataaaagggtggtcggtatgtttttatttgggtgtgtacttttgttaggtcgctttttcgctatgcattaagtacggactttaggactcaactagtacca

SEQ ID NO: 1521 - DNA, 2300 bp, Homo sapien
atttcacatgtaaaatggtagcataggacctaactcatagaatcactgcgaggatgaatcatggtttccctttgagccccagtttctcttgttatagaaagggcatagtgatttttttgtgactcaggagtatgtggcaaaggcacacttaggattatgcaggaacagctttcattaagagagctactaggtgacatcttctccatggtggctgctcaattattaaatgaatgattcctggagaccttttgtagtttctattatttatcatcattaggccataacctaaggtaaggtgagattgccttataacattttttatacataaaaaatactggttgcatgctgctatctgctgtgcaacagaatgtcataggatccagtgtatgaggctctattcttccatggaggggtgttacataaacccattagtgaaatttagggaaatttcacccagactagggaggatgaagaatggagcatctatcttttgacagaaatacagttacacacacacatacacacacacatacacacacacagagagagagagagagagagagagaatgagaaacaaaaacagaggagtacaaaattgagcctaagaaaaagaactggaaccaataaaaattgtaactaacatttattaagtatcttctatgggccagtctctttatctccaatcttcaacaaccagcaaggcaggcaggagaaaactgaagttcaaaaatgttacataacttccccagggtcataaagctatatatacatgacagaactggaactggtagtgttggtatgtgtctgacaccaaaatcactacacattctagtataccactctgttaaaaaagtgtatttggaaaatttagggatcagaggatttggagaattttctttccctacttcccctctgacagtcgtgtttgtttttggttctgatgtttgcaccctagaggctgactgggatcaaatatggggcatctgtaaacagaatgattccatagcccccactgtgtaataatttccttccttcagagccttactaggatttgcctgggatgaggggtggaaaggtgggagagaagaggttgggagggagaggatgttagtaaaagatgggtgattctttgcttacctttaagttgtttatgaatttcaggacaacccgttggctattctcttctctggcttggcatatatatatatgtatgtatttttttttcatttttgttttgtgggggtggtggtttaggtgttaagggtttggttgatatctgtagaaaatttcttaatgatctacacagtagataaaaaaacaagttaaggtcaaagacaattccttcgtctgttttgggagacgagtgtgtatgtttgaaaaaaaggtttgttctgggtcactcttctttcatccagacgcattaaaggaattagaagggggtctccctgccacccccgaaaccgtgagagtcaaacggagattcccttatattcctgctctcaggtgcgggtccgagtgacaagaacgttcacgtatcttcgggagagaacgaaaaggtgctcgggtctggcgggggcggggaacgccaggggttggtgggaactgaggggcttccggttcccgggaagcggagtcccgggccggccgcgggccgcgggctacgcagggagcacggggccctcgccgcccccaggccgcgctccttagcgttccctgcggctcgtgcccagcgcggccgccgcagtcccgacgccgtagccggacgtggggtccagggggcgctgtggcccagcggcgccggcggcaggagcggccacccgacgctggaggcttcgctgaggatccccgcctgccgcacctcggtcgtcccgccgcagccttgcgcccccggcccggctcggcggcgctcctccgggatccgcgtggctgccgcggcccgggcgccgatgcggctgggcgggtgccgggccttagcagcagtagcagccgcagctgcggctaccgcagctcctacaggagtgggaggtttcgcggcggcgcctggggccgcgccggtgccctccggaggaggctttcggctcagggacgacccccgtggccatgctgaagcggaggcggccgctgctcgaggtgagtgtggcgcggcgtggtccggggctcgccggcctcccgccgcctgtgggggccctggcggcagaccgcgggccgggcggacggggcgtcctgccactgcggtcgcctcccccaccctgcggtcctggggcctcagccctttctccccgcgtcccccgggaggctga

SEQ ID NO: 1522 - DNA, 2300 bp, Homo sapien
atttcatttgctcttagcattagtagacattaaatgtgcaacctatctgaaatggcatgcatataaaaatgattttgacctataaataattagacaacaaagatagatatttaaaaaaattcatagattatgggctgggtgtggtggctcatgcgtgtaatcccagcactttggaaggctgaggtgggcagatcacttgaggtcaggagtttgagaccagcctggccaacatggtgaaaccctgtctctactaaaaatacaaaaattagccaggcatggtggcacacacctgtagccccagctactctggagggtgaggcaggagaatcgcttgaatccaggagggggaggttgcagtgagctgagattgagccactgcactccagcctgggtgacagagtgagactccatctccaaaaaaaataattcacagattatgtagcttatttgcctacctaaacttaagtaacctaataggagccaatctataaatgttaaccaagttaataatcatgggaaaatactctttctttttttgagatggagcttcacacttgttgcccaggctggagtgcagtggtgcaatctcggctcactgcaacctccacctcccgggttcaagtgattctccctcctcagcctcctgagtagctgggactacaggcacacgctaccactcctgcctaattttttgtgtatttttactagagacgaggtttcaccacgttggccaggctggtctcaaactcctgacctcaggtgatctacccacgttggccttgcaaagtgctggaattacaggcatgagccacgacgcctggccgggaaatacttgaataagtcagttaaattccctgagcttgttttcttatttgtaaaatgagggaaatatcattgacacttatatacctcagagaagaagaaacactaccttagtaagtcaaagaaatttcatcacttattatatttgacttaaagtttacaaagacagcctattacatttctgattttctctgtttttcatgttttccttactcagactttttggggaatttgtaatttgacctcccctgcctgtattatatcaataagaagccaagcagaattttcagtttggaaagaaaaatttgaaacactaaggaaataggtgtggagatcatggtaatggatggaaaaaaggagataataggtagcatttacttaacacctattatgtgcccttagcatctgttaagtcattgacatacctagtgtatatgcccaaggatgcttttggatcgattaacattaaagaaatggtttagaaatggtactcgaagagggttacaagaataaccaggtcagggccaagtgcatggctcatgcctgtaatcccagcactttgggagactgaggtgggcggatcacttgaggtcaggagtttgagaccagcctggccaacatggtgaaaccctgtctctactaaaaatacaaaattagctggacatggtggtgcttgcctgtaatcccagctacttgggaggctaaagcaggagaatcgcttgaactcgggaggcagaggttgcagtgagccaagatggagccattgcactccagcctaggcaacaagagtgagactctgtctcaaaaaaaaaaaaaaaaaaaaaaaaaaggaataaccaggtcagagtcatcattagcattttggaactagtatccgttactcctgtacttaaacttccctgtcatttcccatttgaaaaaaattctgtaagcttcgttctttaatagaaacacaattttataccaaacaatgattcctttcccagcatctgaaatgtgtctgttgaagcatgaaatgatcaccaagtcagccttttatatttagttatattttgttgattgtcagcttacaggtttttagaatttattagcttaaagatcttataatatatccagtgggatgccaggttttgtagtttaccattatctggaaagatttataagagattttatccttgtgtatatacttaagatttataaattatattttaataattcaaaatgtaatacgcatttactttttaggtttaaacaagtctcttaagtggtgtttcctcaccgatggagaattacttccaagcagaagcttacaacctggacaaggtgttagatgaatttgaacaaaacgaaggtgagaatttatattggtgaatctgtttgcctatgtggtatagagaatgtggggatataagaggatgtagtatttaaaaaaataaaatcaggtctgatgacttaatgatagtaatattatttaataa

SEQ ID NO: 1523 - DNA, 2300 bp, Homo sapien
gattcacaactaccgagaggctgcggccagtgccaaggaggcaggcgaagcagccaaagccaggcgctgcgagcgcggcctgaaggtgagtcgggctaggctgggagcagggcaggggagggggctgcatgaaaggcggctggtggagatcgcaccagtggaggggaggtcaccccaccagactttgggggttggggggccacccctggcctgtcttggagcagggtctgggctgagatggctggctgggtttctggaccagttctctccctcagaccttggagtcgcagctagcctctgtgaggagaggcagaaagatcaatgaggatgagatcccacctccagtggccttaggaaagcggcccctggccccccaggaaccagccaacaggagccctgagacagaccctccagctccccctgccttggagtcaggtatctgcagatgcccaaatcctgttctagttcctggggtcatagcccacagcgtgtgtccccagcctgccaccactgttcattaccattggtcacatcctccccaggacatcctcaagccagtgaagtccgtgggcaccttcttctgtgaccctcatgtgctctctggggactgtttgtttccttatagacaacccctcccaacctgagaccagcctccctggcatttctgcccagcccgtttcagacttagacccagacccgcgggccctgctgtcatcccgacagagagagtacaaagtggctgccctcagtgccaagcgggctggagagctagaccgtgcccgagagctcatgaggattgggaaggtatggcatctggctcagggcacccaccctcattttatagataggggaaacaggctcagaaagggagctagactgagattgagtgagattggcctaagtgggggttgtttcagcccaggctcttggggtcccctgtctttcacccacacctgcttttccaacttctgcagagattcggtgctgtcctggaggccctggagaaggggcagcccgtggatctgagtgccatgcccccggcacctgagggtcagtatgtatcttctcaggctgcggtggggttggggaggagtagcaggcctggggctggccaggccctcccacctacacctctactctgggtcccccagatctgaagccccagcaggcttctcaggctcccacagcaccctcagtcattcccccagccgtggagcgagtgcagccagtgatggcccctgacgtcccagcaaccccaggtagggcaggatggtgggactgtggcgtggggacctgcaggcattggagggcaggctgacctgatgcccacttcttccttctttccttcaagtggcccctacagagtcacagacagtgctggatgccctgcagcagaggctgaacaagtaccgcgaggcgggcatccaggcccggagtggtggggacgagcgcaaggctcggatgcatgagcgcattgccaaggtgggcccgcggctatgcagcccctgcctgtgctggcctcttccctggctgggtgctctgtctccctggtcctccggctagtccttgtcttttctgaaccatcatctgtttgtctctctggggctcttgctgccttagggatctttttttctcccagggctgctgtcttcccaccagtctccctctccttgccccactgtgtgtcatgttgggcagggggcctgtgggctgctgccgaccacaggcccctcccttccttcccttgcagcaatatcaagatgctattcgagcacaccgagcaggacggaaagtcaactttgctgaattgcctgttcctccaggtaagtggggcatggcctaggggctctgtgaggaggtggtccctgggcaagaagggaatgggggacagccagtgattcccacttctcatgcgtctgcctcccctctgtggagccatccatcccagccatgccccagcagagccatgccccagacagggccccgggtagctttgtgcttctctgaggctgctccctgcccctcccatgctgtctctctcccacaggatttccccccatccctggcctggagtccactatgggtgttgaggaggacgcagtggcagcgacattggcagctgcagagaaactggcctctgcagaggattcagccccggctgataaagacgaggacgaggtttggttgagggctcaactccagggctggtggggagaatagcaggtgaggggtaaacccagaccctgttgtccatactaacaagcccaataaggtacatattctttcctccactgtacaga

SEQ ID NO: 1524 - DNA, 2300 bp, Homo sapien
ggaagtacatagaaattgtgtccagcgagttaagtggaatctccctccacagcccagatgagaacagagacttcaggcctgggaggatcaggaggtctaaatcgtcctctcttttcaccgggaaccctcagagaatccccccactcatcccccaccatcctgtgtgtccctgagttgaggataatgggaggacctaggaaggggctcactgctcctgccttggggtggcacaagcctaggtttgaatcctagctctgccacttaaggattgcagtgataggaaaattaatgttggaagtttctcagtttattcaatatatgaaaaggggatattatccatcttgcagatttgttttgaagctctgttggactttgaaaatctttacagatgtgaaaggtgttgttggaggttggagagagtggatggccatgtctatgtcaggctaccgtaggcagaggtgcagagaaaggagcagcttgttgcttggtggggggccaaggaaggtttccctgttgagggtcttttgaactgggtcttaaaggaagagcagttttccaggtgggactctgctgtgggagggaagagggatttctgcctgggtggatctaccaagcccctcctttactcatccctgaacttatctgagttgtgctgacttgttgtgacctttttcccccagcccccctgcccatggcccacatcgagaagttggcggcagactgtatgcgggatgtggaggaggaggaggaggaggaagggctggaggaagatgcagagctgctggtgtgtctgccaggctggtatcccagggctctgaggcaagcttgggcctggtggaggagagggcagtggagaggaggctgggggtgcccctgtattctctgactctgagtgagtgcttgcccctcctggctgtacagtgggtggcgtgtctctttgacttctggtctaagctctgcagttggggattctcagatttggagtaattactattttcaaggctatcctcggtcagattaaagaaatgttttggtgaaggggactcaggcacagtgactgacgttagggaatattgctgagagagagggtcctttactctcaggtcctgttgtgggtatggtcttgaggcccccaagctcctgggctgtgttttgtctccctagacggagctgcaggaggtcttaggtgtggacgaggagactgagcccctggatggtgatgaggtagctgacccaggcggctctgaggaggagaacggcctagaagacactgaacctccagtgcagacagccgtcctgacagcttcagccccagcagctcaggtgggttctggaggagggcccctgtgcctctgatgctcctgtgcgcccagacgtaacacgtgtgtggcctggcctgcacagcaaggctgcagtcaccctttccaggaccctcccccagcagccgccccaagcagaaactgagcacaagaaactcctccgtggcagccagcctcaaaggcctctctgttctcctagactaccccccgggagccatatcctggcttccaccaagtggggctctgtatttgcctctgccatggcctctggcctctccagtgagcctttgcttcctgccttaaggcttttaggctcttctttctcctggagtcccagagctccatcttctagggcagcttccgcagagggagaatggtaggcctagcaggccctggagtggccaggcccttagctgaattgttcataggccggagcatctcaggggctacacgctttgctggaggaacggattcacaactaccgagaggctgcggccagtgccaaggaggcaggcgaagcagccaaagccaggcgctgcgagcgcggcctgaaggtgagtcgggctaggctgggagcagggcaggggagggggctgcatgaaaggcggctggtggagatcgcaccagtggaggggaggtcaccccaccagactttgggggttggggggccacccctggcctgtcttggagcagggtctgggctgagatggctggctgggtttctggaccagttctctccctcagaccttggagtcgcagctagcctctgtgaggagaggcagaaagatcaatgaggatgagatcccacctccagtggccttaggaaagcggcccctggccccccaggaaccagccaacaggagccctgagacagaccctccagctccccctgccttggagtcaggtatctgcagatgcccaaatcctgttctagttcctggggtcatagcccacagcgtgtgtccccagcctgccaccact

SEQ ID NO: 1525 - DNA, 2300 bp, Homo sapien
ggatggtctccatctcctgacctcgtgatccacccgcctcggcctcccaaagtgctgggattacaggcgtgagccaccgcgcctggccaaaaaataggaccttcttctcagaattgtgagaattaactgaggtggttaagataatcacatagaacgctaagaacagtgcatgatggcagctattgctgttggttgtaataatggtagtgtgttttaaattctgactcacaagactgtctcagtttcagtgtggtcttactgggttttttgttgagtccctaggaaggtaagtgtctcaaggagtaatgttgcaggcctcagtttctttctgcacattgggcctcacagactgaaggagccactgattgggacttggagagccccaagtctggctctggagctggaccctaccctgcttgttgtgtggttcctaagagtcctgctctgctctcagatggggctctttatggagtttggccctgaggacatgctgctgggcatggatgaggctgaagatgatgaggacctggaggctgagctgctggctctcacaggggaagcacaaaccacaggcaagaagccagcacccaaggggcagggtgagtttggacacagggctggtcttggtgctgggacaagatgggcacaggctggtggtagaggggttcccttgcagctggacggagccagccagatcccctggtccttccaatacccatctgccgcactcccaccaagaggcggcctcgccctgcttccccaccttgtgtcatggcctgggctggcccctccccattgtggacaaatgtgtttctcagactgactcaggtccccatccttagccctagccacggtattggtgtagggtaggggcccagttagcacagactgaactgggtacataggaagtacatagaaattgtgtccagcgagttaagtggaatctccctccacagcccagatgagaacagagacttcaggcctgggaggatcaggaggtctaaatcgtcctctcttttcaccgggaaccctcagagaatccccccactcatcccccaccatcctgtgtgtccctgagttgaggataatgggaggacctaggaaggggctcactgctcctgccttggggtggcacaagcctaggtttgaatcctagctctgccacttaaggattgcagtgataggaaaattaatgttggaagtttctcagtttattcaatatatgaaaaggggatattatccatcttgcagatttgttttgaagctctgttggactttgaaaatctttacagatgtgaaaggtgttgttggaggttggagagagtggatggccatgtctatgtcaggctaccgtaggcagaggtgcagagaaaggagcagcttgttgcttggtggggggccaaggaaggtttccctgttgagggtcttttgaactgggtcttaaaggaagagcagttttccaggtgggactctgctgtgggagggaagagggatttctgcctgggtggatctaccaagcccctcctttactcatccctgaacttatctgagttgtgctgacttgttgtgacctttttcccccagcccccctgcccatggcccacatcgagaagttggcggcagactgtatgcgggatgtggaggaggaggaggaggaggaagggctggaggaagatgcagagctgctggtgtgtctgccaggctggtatcccagggctctgaggcaagcttgggcctggtggaggagagggcagtggagaggaggctgggggtgcccctgtattctctgactctgagtgagtgcttgcccctcctggctgtacagtgggtggcgtgtctctttgacttctggtctaagctctgcagttggggattctcagatttggagtaattactattttcaaggctatcctcggtcagattaaagaaatgttttggtgaaggggactcaggcacagtgactgacgttagggaatattgctgagagagagggtcctttactctcaggtcctgttgtgggtatggtcttgaggcccccaagctcctgggctgtgttttgtctccctagacggagctgcaggaggtcttaggtgtggacgaggagactgagcccctggatggtgatgaggtagctgacccaggcggctctgaggaggagaacggcctagaagacactgaacctccagtgcagacagccgtcctgacagcttcagccccagcagctcaggtgggttctggaggagggcccctgtgcctctgatgctcctgtgcgcccagacgtaacacgtgtgtggcctggc

SEQ ID NO: 1526 - DNA, 2300 bp, Homo sapien
tattgtgtatctttgtttatatcttaaatgtttcattataaaaatttttaaataattttaaaaggaatgagaaatatggatgtgaaatctcaatttaaatatggtaatgggcagggcatggtggctcacgcctgtaatcccagcactttgggaggctgatgtgggttgatcccctgagctcaggagtttgagatcagcctgggcacatagcaaaaacatgtttctacaaaaaaaaaaaaaaaaatgctgggcatggtggcacgtgcctgtggtcccagctactcaagaggctgaggtgagaggattgcttgagcctgggaggtgcaggttgcagtgagtggagatcgcaccactgcactctagcctgggtgacagaatgagatcctgtctcaaaaaaaaaaaaaagaaaaaaagtaagcaatcaggagatggaaaagccctttgtccaagtaaactgggagatcgctaactagaaaacataatttaaaagttcaaggcataggcaggagaggagatggcaatgttttagacagaagaaactaatccagcagtttaactttaaaatacattttaaaactttttttcctttctcttgggtttcaagatacaaccttgaagcaaactgcaaaagccttttcccttagctgtaaaatagaccccatatccctccctttctcactgtatatactcccttcacatttatcttactgtatgctagtatttaattatctgccttctgagaagttccaagggctaatcttgagacagacaaaccaagcctggagacacagctgcaaaattccaaagattacttcaaggtggctagtcaacagcggggccattgtggagatgagaccagcccacgctccaggtaggctgggacccaagatagccaccagaacaagacacacagacgttgtactctgtacaattcttgcatgcttcccatatcaaattttccttttaagccgttctctttccccccaaaatcgaagtggttactttagatgggaatctggccacttccccattactccgctctcggtttttttgtttgttttagtttgagacagggtctcaccttgtcacccgggttggagtgcagttgacagctcattgcagcttggacctccggggccacagcgattctcctgcctcggcctctcagtaggtaggactacaggcacgcaccaccacacccggctaatatttgtaattttttgtagagacagggtttcgccatgttgcccaggctggtctcggactcctgagctcaatctcttgttaactggactctgcaagccgcagggagaaacgtgctttccttagaaaactagactagagcatatttactgatgctaaagaggttggttttgtatttccctgggcaaataattctctctgagcctccgtttcttctagagatgatgtccatcttgcaggattgagaactggtataagctccattatgaaaagtgactgacacaagcttggcagaaaacgggtatactccgtttctctccttaatatcctccatgccatttgattgcacagcagggtaggcgagtgagaacttagtgttagactctgtaaagtatttaagatgtgcagcgagctctgcctgtctgaagttttcaacggaccggaaaaggatactttcaggtgctgaattattaagaaacatatggtgggccccatttccatttccccaggcttaaaggacatggacaagcaggtgagccccgcccctgtctctcttccagggcggagcttgggtaggccccgccctcttgctcggtggggcggggcgagggctggaggcggggtaggtccagcgagcgagcgagcgcccagcgcctcgggctgagtgagggaggaggttcggtggagaggctgcaagtgggcgagggctgggcgcagcgacctcattggagccggccggtggacgccccggcggaaccgcccagagttcctgtcctgcgctacctacccgaacgcgcctgcgcgctgcgaaccccgccccggtgtcacctgttggagccccccgcccgcgtagccgtgcacatgcgcactgccggccgccggccagtggggtcacgtgttgcgcgcgagccacctcccctgctggcgcttcctgtcgctaccgctgcggcccagggcccgcgggagcccagggcggtgccgggtgagacaaggccggggtttggctcggattcaccgcgaggtatgccgcgtccccgcccctcggcgtggggagttctggggaccgcgggggtagatggaggcggcgcgggcggggc

SEQ ID NO: 1527 - DNA, 2300 bp, Homo sapien
tccatccaggaaaacagaaaggtcaattcctaagaaatgaaactgtaacatttagaaatactaggaataaggcagaacaataggtgtaaaacatctaacaaagtgaaattaaaagacagtgatacaggggttgtaaatgtcttcatgacgcttataaaatgcacacaaggataaaacagaaatacaaaggctgggcgcagtggctcacgcctgtaatcccagcattttgagaggctgaggtgggtggatcacctgaggtcaggagttcgggaccagcctggccaacatggtgaaaccccgtctctactaaaaatacaaaaatcaggtgggcatggtggcaggcaaatcacttgaacccgggaggtggaggctgcagtgagccgagatcgcaacactgcactctagtctgggtgacagagcagaactctgtctcaaaataaaaaaaagaaaagtagatgttattatcacttcaaggtgataacttatcctatcttatacaggatggcacagccttaactcaaacccggaaaagccagactgcaattactgtgctcttaactacttcaccttacaacacactgtgtgaaactggataatgttaatatgtaactgagagcttgcttttggtgtacttattacaataaatcaggcttcccagccactgactgaacattgtggattgggcctcaatttgcttacccacaaaatggagaaaatagaatcttccgtttattcaaccaatatttattaagtacccatcgtgtgccaggcactattttaggataatggaagattaagtgaaaaaatgcaaaatggtaaatccactttcccactaccttaatcccttgcatttatttgtaaggtacagtggttttatttattaagtatcatttgatgaatactatggaactaacataattcaagcaaaattttgcattcaatttcggcagattcacaaacctcctaaagtccacatattgccctccattaaagttaaaaactgttgcaaagggacttaaaccattctgtcatattggaaactcctttggcatttccagcccacctaacacagcagagacgagggtactattattcatgtgttacagacaactagaatcgtatataatcattgcagtttcacaaatagatcaggataagaatgccttttccaactgtcacagcagaagactcttcaattccggggttagaaaagagaagtaggaagggggccaccagacttctcttctgaaaagaaggtgaatgacagacagcccagcagttaggagctcatctgaaaaaaagatctgggtaggagcccagactgcttagtcacgaaaagcgacctaagacacgtccctccctgggcgcaatttacgtccgtaaaatggggtaataacctctgctccgccttccctgtagtggttcctacactatagctcaaagaacgaaacaagtagagtgctttacaaatgcagatggagggaaagtcatcactgagcatcagggtgcggagggcaggaatgctcctgcttctaggctgttggcttccgccttcccccctgcaaactcagttccctgcagcgcgggaagccttttaggaatcggagtgtggaacagaggaacgctcttaacagttcagaacagtgcctggcactgaacaggcgcttggtacatgtcagctaaaagaatcaatgactgagtctacagagaacgtcctcagtttcagaggttccgatgcgccctcccccgagtccctcgcagcccgctggacgccacactcacccggctccaaagcttcctccggctagccgcaagccctccgtttcctaccgcctccacttcgagagctccgggggatgcggcacctctaacctgcaccagcagggctccttctacaactacgggccgaaagccaggaccaaagcgtgtgtctcactagaaatgaaaagaaggtggaaggagaaaagaaaacttcgcgccaatcggcgtggccccgcccccagaccgtcccttcgttgcgacaccaactagctcgccccgcccactccgtacacctaagaggggcgcatgacgtacatccgctaacatgcagccgccatcattgattcgataggcgacgcggggagcggaagccctttacactacggtgtttccggcttcaagatggtcgcctaagctgtttagtgaaacttcttccacctttctccattcctctaggtgctttttctgaacctggatgtgaggcattaaaggatccgacggaaatagaattgaaggcattctaaaatggctaaccgtac

SEQ ID NO: 1528 - DNA, 2300 bp, Homo sapien
aagagaagtaggaagggggccaccagacttctcttctgaaaagaaggtgaatgacagacagcccagcagttaggagctcatctgaaaaaaagatctgggtaggagcccagactgcttagtcacgaaaagcgacctaagacacgtccctccctgggcgcaatttacgtccgtaaaatggggtaataacctctgctccgccttccctgtagtggttcctacactatagctcaaagaacgaaacaagtagagtgctttacaaatgcagatggagggaaagtcatcactgagcatcagggtgcggagggcaggaatgctcctgcttctaggctgttggcttccgccttcccccctgcaaactcagttccctgcagcgcgggaagccttttaggaatcggagtgtggaacagaggaacgctcttaacagttcagaacagtgcctggcactgaacaggcgcttggtacatgtcagctaaaagaatcaatgactgagtctacagagaacgtcctcagtttcagaggttccgatgcgccctcccccgagtccctcgcagcccgctggacgccacactcacccggctccaaagcttcctccggctagccgcaagccctccgtttcctaccgcctccacttcgagagctccgggggatgcggcacctctaacctgcaccagcagggctccttctacaactacgggccgaaagccaggaccaaagcgtgtgtctcactagaaatgaaaagaaggtggaaggagaaaagaaaacttcgcgccaatcggcgtggccccgcccccagaccgtcccttcgttgcgacaccaactagctcgccccgcccactccgtacacctaagaggggcgcatgacgtacatccgctaacatgcagccgccatcattgattcgataggcgacgcggggagcggaagccctttacactacggtgtttccggcttcaagatggtcgcctaagctgtttagtgaaacttcttccacctttctccattcctctaggtgctttttctgaacctggatgtgaggcattaaaggatccgacggaaatagaattgaaggcattctaaaatggctaaccgtacagtgaaggatgcgcacagcatccatggcaccaaccctcaatatctggtggagaagatcattcgaacgcgaatctatgagtccaagtactggaaagaggagtgctttggacttacaggtaagtggaagcgcgcggagcgcctctcagcccccttgtggcccatttctcctgaccgagcgcgggtaggactagcgactggcctctgggggtggtactggaacggagtatgtcgatcattcagaaaaattttgagtgcctgctaagtgcctcgtcttgtgttgagtattagaggcacagatgaatctggtaaggtcatattctgaaggctgtctcagttgggtgttgtgagttattccgtatttaatgatagcaggctgggttgcaacagtgttaagctcagggatccggatataacactttgacacaatctgttgaaggtctttaaggacctaacgttaatatgcctgaaaccaaattcatgatcttactattcttagatctgggccggttccagtatttataaatatcagtgcttcagagaagtcttccaggtaatcttccgatttgaattgtggctttaaatccatgtcctgtgacaatctgtggaccttgagcaagtcactttacctttcttagccctcattttccttacctggaaataagaacattgctagaactttcttcatgacttgttaaaaaaggttaagtgagataatatgaaaagcttagcagggtacctattttattatccattctcaatgtatattagctgttgtcgttactgttattaatacacattcgttctcctaatattacactgttgatgtatatttaggagaaccaaagcttgaactaactccactccaactaggaagagcttagccctaatatgttactgtattgtttttgttttttagctgaacttgtagtcgataaagccatggagttaaggtttgtgggtggcgtctatggtggcaacataaaaccaacaccctttctgtgtttaaccttgaagatgcttcaaattcaacccgagaaggatatcattgtagagtttatcaaaaatgaagatttcaagtgagtgcaatgttcactagctaatataagaggtttaattttggcggtttagaattgggctttggttaagaggggtgtacacaatgtatctcatttctagagagttccactccagatttttgcttttgagccct

SEQ ID NO: 1529 - DNA, 2300 bp, Homo sapien
agtttagaaaattaagtaacctctccaatgtcatagttaatgggcaacagaatctggatgtgaacccagatcttacacctcttaaccaccaccttttgttgtttgattttcacccctgagcgtccagtgcctaccaacatatcaggcactcacttttgcttaatatgtatttagtgaatctgtgaaatcctttttcagggaaaaattaccaaaactgagaaagtaaagtagaagattaatacaatcagaacagataaaatacaaacttggcagggtgtggtggctcatgcctgtaatcccagcactctgggaggcccggggggggaggggattacctgaagtctggagttcgagaccagcctggccaacatggtgaaaccccatctctactaaaaatacaaaaattagccaggcgtgatggcacatgcctgtaatcccagctactcgggaggctgagacaggagaatcacttgaacccaggaaatgggggttgcagtgggccgagatcgcaccactgcactccagcctgggcaacacagagagactctgtttccaaaacaaaaaacaaacaaaaaatacaaactcaagggctcaaaagcaaaaatctggagtggaactctctagaaatgagatacattgtgtacacccctcttaaccaaagcccaattctaaaccgccaaaattaaacctcttatattagctagtgaacattgcactcacttgaaatcttcatttttgataaactctacaatgatatccttctcgggttgaatttgaagcatcttcaaggttaaacacagaaagggtgttggttttatgttgccaccatagacgccacccacaaaccttaactccatggctttatcgactacaagttcagctaaaaaacaaaaacaatacagtaacatattagggctaagctcttcctagttggagtggagttagttcaagctttggttctcctaaatatacatcaacagtgtaatattaggagaacgaatgtgtattaataacagtaacgacaacagctaatatacattgagaatggataataaaataggtaccctgctaagcttttcatattatctcacttaaccttttttaacaagtcatgaagaaagttctagcaatgttcttatttccaggtaaggaaaatgagggctaagaaaggtaaagtgacttgctcaaggtccacagattgtcacaggacatggatttaaagccacaattcaaatcggaagattacctggaagacttctctgaagcactgatatttataaatactggaaccggcccagatctaagaatagtaagatcatgaatttggtttcaggcatattaacgttaggtccttaaagaccttcaacagattgtgtcaaagtgttatatccggatccctgagcttaacactgttgcaacccagcctgctatcattaaatacggaataactcacaacacccaactgagacagccttcagaatatgaccttaccagattcatctgtgcctctaatactcaacacaagacgaggcacttagcaggcactcaaaatttttctgaatgatcgacatactccgttccagtaccacccccagaggccagtcgctagtcctacccgcgctcggtcaggagaaatgggccacaagggggctgagaggcgctccgcgcgcttccacttacctgtaagtccaaagcactcctctttccagtacttggactcatagattcgcgttcgaatgatcttctccaccagatattgagggttggtgccatggatgctgtgcgcatccttcactgtacggttagccattttagaatgccttcaattctatttccgtcggatcctttaatgcctcacatccaggttcagaaaaagcacctagaggaatggagaaaggtggaagaagtttcactaaacagcttaggcgaccatcttgaagccggaaacaccgtagtgtaaagggcttccgctccccgcgtcgcctatcgaatcaatgatggcggctgcatgttagcggatgtacgtcatgcgcccctcttaggtgtacggagtgggcggggcgagctagttggtgtcgcaacgaagggacggtctgggggcggggccacgccgattggcgcgaagttttcttttctccttccaccttcttttcatttctagtgagacacacgctttggtcctggctttcggcccgtagttgtagaaggagccctgctggtgcaggttagaggtgccgcatcccccggagctctcgaagtggaggcggtaggaaacggagggcttgcggctagccggagga

SEQ ID NO: 1530 - DNA, 2300 bp, Homo sapien
cagaccttccccaagtgcaatttcagcagtaagagtgggtacttacgctttccttttttgtataccaggccttaatagtgggaaggagattgtccaagctccagggaagaaaaagactgattggacagggaagaagtgtcccaggccttctcaacagcaactagcaaaggagggtatccttgtagatgttcagtcctttaccagcctagctattgttatttatgtttcaaaatgcgggactgtttgcaagattggggtgaggcccagcttctggcatctgtagtggtgtcagtatcgcctctgttacattataaaagaattcagcagaatagtgtgcttttctaaaatcattcttttgaacggtggttttgaaattgttagacccggagtaaagatggcagtgatgacttaacttctggccataagaagttgcttctggtgtcttaacatcttgttttataaagaaactgaaaagttgcaagtattttatttgttctcctttacttaaattctgcttagagccacctacttggaaagtggctgcccttctccattctgaagagtaagaattgagggaataggaaatgatttttatacccaggaaagaggttagagttttagatatcttctatgtaaaatttattaaacttctaatcactaagggtttgtatattatatataatctgtgccattcctactgggaagttgaaacaatgaaaataataaatcattttctttcagatgagccataattgaaacttttaagattagcataattgtatcgttgaataataaagagaaaaattacctcctttgttaattttatcatatgtgaattagtaactaatggtttctttgaaatcctttggtttagctgcaatggctcctgctctcatgtagctaaaaagaacatgttggaaaaatgcaaatgactttataactcttgggattgatgtttatacccttcagctatttccagttaatttttaatgccataatcattatgtattatgattatcattaccataccaactctgctgtctctggtttttacaagagtaacacatttaaatttacagaggtaagaatttccttggagaaataggtgctggtgataataggagtatctttcttttccatatcaacataattataataaataactcacagatttaaaggcttattttgtgccaggcattctgctgagtgctttacatacatgtctcatgtaatcctcccaacagctctgcaggacaggagtttatgattatcttgattttatagaatagtaatgtaatgctcagagaggttaaacatctggttagtcacacagctaatcaatacttagtttaagatttgagactgggtgcagtggctcacgcctgtaatcccagcactttgggaggctgaggcgggcggatcacgaggtcaggagatcgagaccatcctggtgaacacggtgaaacctggtctctactaaaaatacaaaaaaattagccgggcacggtggcgggtgcctgtagtcccagcaactcgggaggctgagacaggagaatggcatgaacccgggaggcagagcttgcagtgagccgagatagcaccactgcactccggcctgggcgaaagagcaagactccgtctcaaaaaaagaaaaaaaaaaaaaaaaaaaagatttgaatccaggtttgtctcaatttggagcctatgtacttaatcagtatattgttttgccctcaccaaactcacctctagttgtttattcacttattgaaaaccatattcttctcctgtctttgtgcttctcaaactttaatctgcatgtgaattaccttgggatcctgttaaaatgcagattatgatttagtagactggggagggtcctcagattctgcatttctatcaagtttccagattatgctgatactgtaggtctatgaatcacttacttggagtagcaaggttattatagagctttatggctggaaattgtaaatgctactattaaatgcttagattaaagtagaatttgcacaaggtgaaattgagtcaaacttatttatttgatttgttttttagaaattaaattgtaaggaaataattgaaaatttggcaaaaattcttaagagacatccaggtatgaattttgaatcttatctgtaaaacaaaataaatttttttagcatatatgaaaattatttaacctactgaagtcttttttttttaaattaggtttaagaaacattttgcctataactactgccaaagtgcctatagtaaaatttgaacacaggcgaagtggg

SEQ ID NO: 1531 - DNA, 2300 bp, Homo sapien
tttatttttgtatgtgatattgataaaaatgtggtatcactctttgtataaatatattagcaaaataagtgtttgaaatatgaaaacagtagcattttcagtttagaagacattgaactcttaagtaaaagtgtttcagtaattttatgatacaaaaaccatgtcactgagagttacagtgatttgtaatgaattttgggaaaaaatatatcacgaagttggaattttttcactagaaccaatgggaagctgatgcatcagttttgtagtgaacattgatctttcatactttgtcttctcatatctctttcattagatgatgtctttgtgttactataggtagtaaatataggtggtcatctaatttataattggttttgttctaaaagttagttataatttttgaccactcacataaaattttttccatagaagcaatgttacagatgatatgctaagggctgggcgtggtagctcatgcctgtaatcccagcactttgggaggccaaggtgggcggatcatgaggtcaagagatcaagacactcctggccaacatggtgaaaccccgtctctacgaaaaataaaaaaaattagctgggcatggtggcacgcgcctgtagtcccagctactcaggaggctgaggcaggagaatcgcttgaacccaggaggcggaggttgcagtgagccgaggtcacgccactgcactccagcctggtgacagagtgagactccgtctcagaaaattaaaaaaaaaataaataaataaaatgctaagatagcttttagaaactcattttgggcggggaggagaactaacatttattgagttcccagtatacacttttacatacattatctcatttcattcttacaaccaccttcgaggtaggtattatttcccccattttacagatgaggaaactgaggctttgaaagataaactgacttgtccaagttcacacagctagtaattgttggagccgggattcgtaacccaggtctgtctgactccagagttcatgctctttccattgtatctcactgcctctctgtaatttttttaacccataatgtagctgaaatatagtactaatagtactgtagaacctaaccactgctttctgaaactgatagctttctgagttccaccgtgagatgccaggagcagaccttccccaagtgcaatttcagcagtaagagtgggtacttacgctttccttttttgtataccaggccttaatagtgggaaggagattgtccaagctccagggaagaaaaagactgattggacagggaagaagtgtcccaggccttctcaacagcaactagcaaaggagggtatccttgtagatgttcagtcctttaccagcctagctattgttatttatgtttcaaaatgcgggactgtttgcaagattggggtgaggcccagcttctggcatctgtagtggtgtcagtatcgcctctgttacattataaaagaattcagcagaatagtgtgcttttctaaaatcattcttttgaacggtggttttgaaattgttagacccggagtaaagatggcagtgatgacttaacttctggccataagaagttgcttctggtgtcttaacatcttgttttataaagaaactgaaaagttgcaagtattttatttgttctcctttacttaaattctgcttagagccacctacttggaaagtggctgcccttctccattctgaagagtaagaattgagggaataggaaatgatttttatacccaggaaagaggttagagttttagatatcttctatgtaaaatttattaaacttctaatcactaagggtttgtatattatatataatctgtgccattcctactgggaagttgaaacaatgaaaataataaatcattttctttcagatgagccataattgaaacttttaagattagcataattgtatcgttgaataataaagagaaaaattacctcctttgttaattttatcatatgtgaattagtaactaatggtttctttgaaatcctttggtttagctgcaatggctcctgctctcatgtagctaaaaagaacatgttggaaaaatgcaaatgactttataactcttgggattgatgtttatacccttcagctatttccagttaatttttaatgccataatcattatgtattatgattatcattaccataccaactctgctgtctctggtttttacaagagtaacacatttaaatttacagaggtaagaatttccttggagaaataggtgctggtgataataggagtatctttct

SEQ ID NO: 1532 - DNA, 2300 bp, Homo sapien
gagtatctggaggggataagggcagagaggcactgaaattttcagtctggccccagttttcttttccagattcattatcttctgcacactccagagtcaatgctgccctctgaatcacagacatgtgtctggcacacagcagacagatcttcaaggtccagcttttagttcttccacggaagtctcaccaaagtggaatttatcacactctcctctggatttgcccagccctttgttaataagacctgttgcttttattgtagctcacctgcttgctcaatggggaactttttggagacaggaagcaatgatttgtctttgtttccctaggcacctaacaacgctttgctcttaagtaattaggaaatgtttactcaattgaacttgttctaaggacactgctatcactgaattgaagggcatgtcggtatcttcttagtgtctctataggctttaggctttcagccgggtgaagtagggattttttctttgtttccaggctagtcaagcgaagcagggatacagattaagaatttgcagatgaggaaactcaagagggtacatttgctcaaaggcatcatgttgataaacgccaaaaccaggtagggctcttttgacttgaaatccagtcctctatccattatacctgggccttgtagcatcagccagattggggtaaaatgcactaactctgaaccctagttttttcatccgtaaatgagagcaacagtacgtaactcacagggctatcgtgaagtggagcgtccctctgtgacctctaaccagtcccagcctgagtcacattataagaaaatttataaggcactatcttgtaaatacttaagatttaacatcttcccttcacctctacgtccactcttttcatacctttttcctgcctagcatgtgtcaaactcaaaggactgggcacagagcacagaggttgtgtgctttgtccagctttgaggtcagagattggctaaataatctctgaggctggggtcttaaaaaaaaacaacaaaaaacaaaactaacaaaaccttaagtccgttccgcccgtgactttaaataattatgtagaggaatgtaatacgttaaaagcaaggggatgagggggcccattgatggtagatggttttatgcccgcctgcagctaaagaaatgatttctaaaacctcttttgggggtgggagatggagtgctccagagatttctcttcgagctccttcattcctgaactgcctgccttttcaaaggaaaaaaggtccagctgcggtgggctggaggccgtggtgagtgggtgggggtcgaccctggcggcttcctctgccccgctccctaccgttgctccgaagcccgcttgggcttccgagggtccgccgaggctcgggccacgcccagtccgagtgccaggccagagggtacccattccaggccggccttcctccccagggggagcagccttgggagcgaggcgccgaggcggccctcgggctcggcttccagctcgggggcctcggcagagactaggaaccagactggggcagcactggggcgcccgccacccccacccactccggcaagcgggcgaatcagcgcggctaacccgcggcgcccaggcgggctgcgggacctcgcgacctccgctcggcggccccgcccctgcccgcgagccccgggtggctccctcctcccctctgccagcggcccgccccctcctcgcgagctaacgagtgtctctcgcgcgctcccttccctccgcgtgggtgtgagtgcgcgatcctcctacctcggccttctccccattgtttcttcgcggccaccacgagacccctccccccagtgctgtttcccccctcccccgccccggtgtaaacggtgcctgtggggccccccgaacgaagggagggggcacccctgaacccttccctctgcgcgtagctcctcctctcccgggccaggaccccattacaggctctgtcctctcccctccccctctcccccggcaaccgctctccctcgccccctcccctcagcgggtcctcctctttctctccctctccctctccctcctcctccccctccccatcccttcccccccacaatgcagttcgcggcgcggcggacatggcggtggagtcctgagctagtcgtgtcccggcctccagcggcggcagcggcgacggcggcggcagcaggaggcggagggagagcaggagccactgagatgaggaggcgtcgcgcgcgcctgtagctcgcgggcctcgcaggtacgaggttccggccgcggggcagcgtcg

SEQ ID NO: 1533 - DNA, 2300 bp, Homo sapien
tgcaaccttgaactcctgggctcaagcaatcctcctgcctcagcctcctaaatagctagaaccacaggcacatgctaccacacgaggctaatttttaatttttatttttttagatggagtctcgctctatcacccaggctggagtacagtggcacaatctctgctcactgcaacctctgcctcccgggttcaagtgattctcctgcctcagcctcccaagtagctgggactacaggcgtgtgccaccacacctggctaattttttgtatttttagtagagatggggtttcactgcattaaccaggatggtctcgttctcctgaccttgcgatctgcctgcctaggcctcccaaagtgctgggattacaggcgtaagccatcgcgcctggcctaattttttaattttttgaagagacagttcttgctaggttgcccaggctggtcttgaacgcctggcctcaagcaatcctccagtcttggcttcccaaagtattgggattacaggtgtgagccaccgggccctgtcgaaagagatctttctacaacaaaagactcattgtgatacctccctgctaaaaagaaccttcatttcttggtttaaagaccacagtccctactgtggcctactaggctctgtgtgatctcactccctcctgcctctccacctttccctctcatcctttgtcctctctgttccaaccaaatgaggcttctttgttactcaatgcaccatgttcctttccccccaggacctttgcacttgtatgttgcttcatcctgaccaatttctcctcattcttcagagctcagctcaaatctccctttttctggaaagccctccatggccctccaggctagtttaggtggtactcaccacaacagtaattttagagctatttataaattatttaattcctgtgtctccctggatagagataatgccctcctgttcatccctgcctaagaatcacctaaagcaaaacttggcatagaaaaggtgctcaggaagtttttgttgatgaccacaggagtgcttagcccttaccacattacataaaatctgcagtttacctggtttctctcacaccagtctgtgagtttccagaaaaaactcacagcctgtgagtacaggatccagctccatgtttgacatttcatgggctcaacaggggttttctgagcagggggagacattgtgatgtgctgcccagatcccccatcactgaggacttaggacagacaccagctgctaggagtgctgttagcacaaagcctttaatgtcagcttctccacagacagggccatcttggcccttgttgccccacttgccaggtggccccacatccaaggactgataaaggcaggatgacctggccatcttagctcatctgatgggctactctagctctagagtccctgtcgagtcagctaaaactgtcttggggcctgcatggagctcactactttccccctgtgccactcctgttccctcccatccttcccacgcctgttgatcccaagggtgctccctcataaacatcctgcactccaatctccatctcagaatctgcttccaggaacctaacctgcaacaggcccacggtcctctcttcttctcccagccatcactttcagggaacatgcattcattcacctgaagtttgcaggcaccattcaactgttaaagtgtttcgcatccgtttttctattacttccatcctataccgactagctccacttaacatgtggagaaactgaggtcggagtgggggcgtgaccaggccagcctaaggccgctgcactaatgagaagctgagctctcagatttttgcctccctgtccctgccaagtcgctgtttcctgggacaagagggagcctcactgaaacgaactccggtctcaggggacagaatcctgaaaccctggctctggggtccggggcaggggtgcgctgcctcaggacagacggtgaaactgaggtccagagccggacatccaccgcctgcggagggaacgagaacgcggcgcgtcctgccttgcgggccgagcggcgccagagccgcctcctcccgccccccgcgctagatccccccgccccgtctttgccctcgcgacgccgccacctccggaacaagccatggtggcggcgacggtggcagcggcgtggctgctcctgtgggctgcggcctgcgcgcagcaggagcaggacttctacgacttcaaggcggtcaacatccggggcaaactggtgtcgctggagaagtaccgcggatcggtgagtgcgcggggtctggcggcg

SEQ ID NO: 1534 - DNA, 2300 bp, Homo sapien
ggaggctgaggtgggtggatcacttgaggtcaggagttcaagaccagcctgggcaacatggtgaaaccctgtctctactgaaaatacaaaaattagccaggcgtggtgacgcatgcctgtaatcccagctgcttgggaggctgaggcaggagaatcacttgaaccctggagacagaggttgcagtgagccgagattccagcctggatgacaaagtgagactccatctcaaaacaaaacacaaaaaacaaaaacaaaaaaaaacccactattctgaataggggttcataggcttcatcagactgccaagggggacatggagacagacatgggtatcagccctgcctgggccattgatcgctgtgtggtattggacttgttatttcaggcacattcacccctgcgtggctcaccccagagggctgttgggaggaacaaattaattcttggctgggagagggttttggaaattgttggaggctttctagttttgccaaaagccagggcagagcgctttcttcctcccagctgatctccaggcctccaggaagcctctccctcccagaggattcctcccctgtactctccatctgataaagaggctgaagtgcaccctcattagtgtaggctctccagctcccagtctgctcagacccacagctcaggggaggaatgttctggaggataataacagttccctccagctttcatatttgaccttacagtgactcttgaggacaccgcctccctcagagccctcccctgcttcctcagatggtgcccctctgtgtccaggtccttgcatttccctttttactgccctgtgctgtgatcgtcagtcagtctgactcctccatcagactgtgtgtttctcaacggcaggcccagatctgatccctctcaggggccctagggcccacccaggtcagggcagcggcacaatcagcatctgaggagctggcctgggtgaggacaaggaacccaaagctcagagagaaacagcagggaaggggtagagctgggctggagcccagatcccctgatacccacggcccgttccccacacgtccaaaccaagggcgaaggaatcgggggtgcccgaggcaccacagtaactatttcctaccctacccactgctgtgaaaaatgtagagctaaggcactgaaggtgctgtatgaagcccttccagatggcgtaaggcaacagggtacatgggggaagccaaggcactgagagccccttcagactgtggttctctgatgctagtgagaacactgcccttgttctctggaagtaatttttcaaaatggacaggtctgctgactttctttgctggtcagtgtggggaaggaggttaccgtctgggcccatccacacccatattcggctccttgtcccaggccagtggcaggcagtatgaacagaagagtgtggacattgtccgtgcacgagctagctctcagcgagactagcagggactccagatgatgaggacatctaaaagcccgctagaaaagaggcaccatgaaagccgcagaaagagcaaggacttcctactaggccgcccccggttaaaatctcgtgggcttaggaactccgggaaatggcttctctctggccctcagctctcacctttaacacggatgcgaacatccccgggcccctgggtttttgcggaggttgggtgaggttgtgttcactctcctcactgaccccgccgtgtggtcgccggctggtgccttgtctgtctgccccagccccgaatgccccgagactcccggcgccggctcggtgcaggtaaggcgcccgcgccctggcctcgaattcccgccccgccactctggccgcgtcgtgctgtcgttgcgcacccagcgccctcgtgcaggcagggggagcgcagtggggagggggcaggaagcgcaggcagagccaggcgagcacgcggctcccggcccagctccccgcgtccgctccggctcctgccgcgttccagcagccgtcactcccgccgccggcccccgccgcccgccccgcctgcccctacccctccgcgcgggccgggcacctggccgccgctcggtcctcggggccccgcgctgctgtctctgtctcggcttctctcggcccctgggtctcttcgtctctgccgttctcaggctcagctccgtctcgctcggtccctcgcttccccgccgggctctagccggccgtctggtggcccgaggtggcggcgggctgggcgcggggcgcgatgagcggcgcctgcacgagctacgtgagcgcagagcaggaggtggtgcg

SEQ ID NO: 1535 - DNA, 2300 bp, Homo sapien
ttgggatctattcagagaacagaaggttggtgggatgtgggggaagagaggcagaaaataaggctagaatcagattgcacagggtcttgaaggccatcctaaagaagatgacctcaaaccaaagttcaaggattcccatcctgggccatgtgtactgaggagtcccctaaggtgatcagggtataagaaaccacaggtaaatgtggtatattgcctggaatgtcaattttactcaaaggcttgggggagaaaaggcaatcttctgttatcctatgaaagatgtattatggggaaatgaatgtaaaatcctatgaatttaaaaaataaaactgggatttcagacattattggctgccttccaataaataagtggttggaaatagtccattctttgctgccattggggatagcttaataatggagccatttggaaagcattgttataggcgatgggaagccatggatttagctccattgagaattcaaaagtagggctggatggaattcaaagatgaatgggaagtcagccgggtgtggtggctcacgcctgtaatcccagcactttgggaggccgaggccagcggaccacctgaggtcaggagttcaagaccagcctggccaatatagtgaaaccctgtctctactaaaaatacaaaaaaaattagccgggcgtggtggtgggcacctgtaagcccagctactcgggaggctgaggcaagagaatcgcttgaacctgggaggcggaggttgcagtaagctgagaccgcgctattgcacttcagcctgggcaacaagaacgaaactccgtctcaaaaaaaaaaaaaaaaaagacgaataggaagtggctgtcttaggagaactttccatctaagctttatggaactgatgattcttagcaggaacaggagcaggaaaacaaagcaaaatgtaggtaaatttcctctcctcctccccatctccttgacatgttccttttctacctcattcattctttttcgctcttgtcgcccaggctggaatgcaatggcacaatttcggctcactgcaacctccacctcccaggttaaagcaattctcctgcctgagcctcccaaagagctaggattacaggtgtgctccctgtaattttgtatttttagtagagacccctgctaattttgtattgttagtagagacagagtttcaccaggttggccaggctggtctcgaactcttgacctcaggtgatccacccacctcggcctcccaaagtgctgggattacaggcgtgaaccaccgcgcccggcctcattcattcttttatttttttaaaaaaaattattattgcataccaactccctcacttactgtgtgaccttggacaaactacttaatttctctgtactttagttttcttatctgtagaatggggataataataatacctacccacagtgtcactgtgagtgtttttacagtgacatgatatataatgagaattaaatgagttaattcatataaagcatttagagcctggaacaaagttcagcactgtttgagtactaggtgttataacagtgacgttgctacacccttcactgctactgtgtgccagtcaacatctcccatagccattcattgcttaggtaattcatgttggtggccaagacaggtctgggaagaagacagatgaatcagactgctcactgcactttgtccagctacacctggcacatatagaagctcctctaaatgcttgctgaatggataagcgaatgtcttcctattgaactccaagttctttgaaggcagggaccatattcctagctgtcatatccctagaacaatgcactggtgaggcacacagtaggcgcttagggattatacatagataaatgactgcaggtggaaaatcactaaggctacaaagcgagcataggtaaggtgctgcagagagacagcccccagtttcaggaaggcggtagccctggaagcgtggctgccagcgcccttaacggcgcgatggctgctgggaagcacaggctcgcttggctcgccccgggatcccgggagagcgccgcggttggcgtcggcgtcagccccacgccccgccccgccccctccgccggctcacgtgaccgtctttgggccggcgcgaaccatggccggcatggtggacttccaggatgaggagcaggtcaagtcctttttggagaacatggaggtggagtgcaactaccactgctaccacgagaaggacccggacggtgagcggctccagcgcagcccggcgacgcgtcggggagggacgtgcccggaga

SEQ ID NO: 1536 - DNA, 2300 bp, Homo sapien
tggcacattggctcacgtctgtaatcctagcactttagaagtctgtggcaggaggattacttgagcctaggagtttgagacaaacctgggcaacacagtgagaccttgtctctacaaaaaaaaaaaaaaaaaaaggtagccaggcgtggtggtatgtgcctgtagttctagctgcttaggaggctgaggtgggaggatcgcttcagcccaggagtttgaggctgagtgagccgtgattgtgccactgtactcctgatgggtgacagggtaagaacttgtctcaataaataaataaataaataaataaaagaaaaaataaaaagttctggagcttcttgatggggatggttgcacaacaatgtgaatgtatttaataccattgaactgtacactttaaaatggttaagcaggtttaaaaaatctgggcttgcattttggatgcttgtttttaaattttaattttttctagtaattaattttgattgtattttacagaaatttagttttgtgattggggataaaatctgggtcttttagcacagatgcttgagaactgaggaggatttgatgttagctaaaagacaaataattaacttgtagtaaggaaaggaaggcagagagagcatcaaagcagagttacaggttcgttggaagtcatggtgggtgctgggaacttgtagatgttctttttggtttgtttgattttcttgtgaattagaagcaaaatcatcagctaaatgagatgagggaggaagtgtcggaggtttgaagagacaggagacttgaaatagttatgtagcaaggtgggagagtgtgtgaaactggagaaatgtggtagggtagccactcattatggcctcttgagaataatgatctcaaatttacggggagtcagtcaaccacttttggctttttctccacccactccattgctggagttctgtcagtacaaagaaagcagagaacgactagagaaatgaaggtaatactgaagaaatcgacttcatgtacctcatgtactcactttcttccccaaacagcttagattctattagattccatttcatgacggacgatagaatctaagctgtttcaggaagaaagtgagtacataaggccagcgtggggaggaatagcgaaaaggtagttggatcaatggatttggggtcttggagttgaagtttttggagttggagtattatcagacagagtgagctagaaaggaagaaggttgtggccgggcgcagcggctcacgcctgtaatcccagcactttggaaggccaaggcaagcggatcacctgaggtcaggagttcgagaccagcctggccaacatggtgaagccacttctctactaaaaatacaaaaattagccgggtgtggtgccgggtgtttgtaatcccagctactcgggaggctaaggcaggagaatcacttgaacccgggaggtggaggttgcagtgagccaagatcgcaccactgcactccagcctgggcaacaagagcgaaactccatctcaaaaaaaaaaaaaaaaaagaaagaaagaaagaaagaaagaaaggaagaaggttgcaatgggagttagaggattaaaattgagattgtagagaagttacaattattcgtatgagcatgagagtgagaggctgagccaagaatgatccctagagaagaatctgagaggccagaggattggaagaattaagcgaattttgaaataaccaagagttatgacaatagtagtaatgaatgacagtgaaccagaagcccaaatcttagagaatgatggtgaatgacagaggagtctataggtgaccgaagtgagcgatgctctaatctctcgtcatgatgtaatatttaaagcttttcatattttgaagggatgctaggatttgggggtgtgtggctcctttaagggcctgggagggggagaagctggaggtcgggctggggggggcgggaccccctcgtctgagtctgcgcattgagagcggaggcgggtccaggcgcgggctcgcgcgcccgggcgggtcctcgcgggggcggagtctgcgctctggttcgggctgcggctgcggctgcggctgcggctgctactgctacgctcctagcttgagggaaagaggccgaggcctgggccaagcccggagccgccgctcgccggagcctcctggagcctccgcgccggctcagcctgggggcgggctccggtccggcccgccgccgcacccaggacggaggctgcatgcccgaggaccaggccggcgcagccatggtgagggagcaaggcctgccctagc

SEQ ID NO: 1537 - DNA, 2300 bp, Homo sapien
tgcctcagcctcccaagtagctggggttacaggcatgcgccaccacacctgggtaatttttgtattttttgtagagatggggtttcaccatgttcctcagactggtctcaaactgctgggctcaggcaatattcctgcctcagcctttcagagttctggcattacaggcattagccaccgtgcccttttcactttctttatggtgatctttgaagcacaaaagtttttaatttttttgaagtttaatagatatacattggtgtcatatctaagaaactttactgatctaaagcccggactttttacacctatgttttcttctaagagaaacaatcttagctctactatttaggaccttgatctattttgtggtaatttttctatatgatgtgagataggactttgtctttattcttttgtatgttgatgtccagtggtcccagcatcatttgttgaaaagcctattctttttttttttttttttgagacggagtcttgctctgtcgcccaggctgtggagtgcagtgacatgatctcagctcactgcaagctccgcctcctgtgttcacgccattctcctgcctcagccaccggagtagctgggactacaggcgcccgccaccatgcctggctaatttttttgtatttttagtagagatgggatttgaccgtgttagccaggatggtctcgatctcctgacctcatgatccgcccacctcggcctcccaaagtgctgggattacaggcgggagccactgcacccggccaaaaagcaagcccgttgaattatcctggcattcttgtcaatatcaattgaccacgaatgtaagagtttattgctgaactctgaattctagttcattgatctatgtgtctatccttatgctggtgccatacagttttgattactttagtaatcaaagtctttcaactttgtttttcttttccaagatcgttttggctattctaggtgttgcatttccatatgaatcttaggataagcttgtcttttttgtttgttttatgagacggagtttcgctcttgttgcccaggctagagtgcaatggcataatctcagctcactgcaacctctgcctcccaggttcaagcagttctcctgcctcagcctcccaagtagctgggattacaggcatgtgccgccacacctggctaattttgtattagtgtttagtggagacagggtttctccatgttggtcaggctggtctcgaactcccgacctcaggtgatccacctgcctcggcctcccaaagtgctgggattacaggcgtgagccaccacacccggctttgtttgttttttgagacagagcctcactctatcacccaggctggagttcagtggcataatctcggctcactacaacttccgcctcttggattcaagtgattctcctgcctcagcctcctgagtagctggaactacaggcgtccaccaccatgcctagctaatttttgtatttttagtggagatggggttttgccatgttggccaggctggtctcgaactcctggcctcaagtgatcctcccacctcggccctaccctatttttaaaaaatagctctctcagcttcatactcatgtctgaacagcatattgtgatgctttagttggttacaagcttcctaagctctgaggtcttccgctcaccatccctgactgattagaaccccctgctgtgtgcttacttaatacccagtgtgtcctctattttaatactaaaggggctgtatgtaaatgtttgtttcagtgtttcacttctattgcttcttgagaacatagatcacagattgtattccactgccttacacagtgtctagcatatgatagacactaaagaaatacttgtgaaatgagtaaatgaatgttttgttctctgcttttctggaaactaactagttggtttttgtgtttcttttatatttttccctgggctccaaggaggaggcgtctccctattccttacttgatatctgcttgaatttcttgactactcaccttgagaagttctgttcagccagacaagatggaacattgtgtctgcaggaacctggagtattcccacaggaggtggctgatcgactgcttcggaccatggcttttcatggtaaaaaaataaacagaggaaacaaaaattatgtgctgttaattagatttgattttgaagtgctacagtagccatttaattattttcttagaaataactgagaaggccaaatgagcctgattccaggactatgaattcatttatttttacctatcttgcctcttactgt

SEQ ID NO: 1538 - DNA, 2300 bp, Homo sapien
caagtgctctccagctgtgtggagctagtgactatgtattgggcagcacagctctaaaatgtaatggagttcttaatatgtaattagtcatttttgtccactttggcaggttttgcacaggcctttcttgattttaactgtgtaactgtaattaagtctgcaaaactcattagagaatagtgctcccttttaaaaacacctcatttctaatttaagggtgactggctggcagcctagctgcattttgagtatgggccagctaagatgccgccttagagttcctctcatgacttcaggctatttatttacctgtcctcaactgctcattcaccccatactattcttagactacctgtttttggcatgattgttacttctttcacagtcaatgttgtttagttgatatgtgatatgttgatgtgcctccagagtatcatatgcttgtgacactgttgattggtagacaggtagatctcgaaggcacttcaagaggttactgtgtcgacttcatttacattcatctgcaggagggggagtgtggggggaagctgtaactactatatatatatatatatatatttttttttttttttcagagacaggttctcactctgtcacccaggctggtgtgcaatggtgcaatcataattcactataaccacaaactcctgggctcaaatgatccttccatctcagcctccctagtagctaggactataggcatgaccactgtgcccaactcgttttcagttattttgcagagatggggtcttgctatgtttcccaggcctagatcgctttaataaggtttgagatctggctagtggtttattaatgaattacaaggcattaagtgcatgctaaatatattatgtgtatatgtgtttgtataataatatgttaaggtgaatttaaaggataggctagaaatgtattggtaacaaatcaaataccttaacacaaggtttatacctcacttgtggtacataaactctgcaagtccatagaggattctgcttcatggtcaccctagggtccaaactgatggagggtttctcctcatataactatactctctagaacgtgaagtctcctcgtttgtcatagcaggaaaagacagcatggaaaatcatgcactggctctcaggtgcttcaacatatagtgcattggccagaactaggcacatggctccagctaactccagggatgggctgggaaatgtagttgtctggtaaggtaagaactagatgttagtggatatcaataatgtctgccacagtcctgattctgccacttgctagccctgtgatcttggaaagccactctctgagccccagtttactcatctacaagttgtaaacaataataatctcacctaaatgaattgtgattatcagacgagatactgttacatgggagcgctttggaaatgtaaagtgtgatggaaattttggctattctttaactgttttttgaatttaaaacgctgcttgtttttccacaggtctattgaatgatggaactgtgggtatttttaggggcaaccagatgcgcttaaagcgagcctgcattcgcaaagcaaagatctctgctgttgctttccggaaagctttctgccaccacaagttagtggaacttgatgccacaggtgtgaatgctgatatcacgattacagacattatcagtgggcttggcagtaacaaatggatccagcagaatctccagtgcctggtgctgaattcattaactctctccctcgaggatccttacgagcgctgcttcagccggctttctggccttcgagctttaagcatcacgaatgttctcttttacaatgaagacctggctgaagttgcctcattgccaagattagagagcttggatatttctaacacctcaatcacagacatcactgctctactggcctgcaaagaccgactcaagtctctaaccatgcaccacttgaaatgtttaaaaatgacaactacccagatactggatgtagttcgggaactcaaacatctgaatcatcttgatatctcagatgataaacagtttacatcagacatagctcttcgcttactagaacaaaaagacatcctacctaaccttgtttctctggatgtttctgggagaaagcacgtgacagataaagccgttgaagcctttatacaacaacgtccaagcatgcaatttgtaggtttgctggctactgatgctggttactctgaattcctcacaggcgaaggacatttgaaggttagactttaaaaatgtattattttgtcaggctgaccaa

SEQ ID NO: 1539 - DNA, 2300 bp, Homo sapien
aaggagctaagaaggcagtgatcaatgtgtcaaagaaaccacctcaaaggcagtgatatttgatctgagtcttaaggatgaaactgtgggtaagataatcagatgtattccttgacctcatcttgatttttctccttgtatcccacattgagttctttggcaaatccagctctatcttcaaaatttatccagaattcatccatttctcttcacttccatttctatcacgtggagtagactaaaagtgatttctctcctgaattactgcagtagcctcagaactgctctcctgcttctgtccttgccctcctggagttgattctaaacacagatgatcgagtagtcctgctcatgtcatattcctgctcagaagccttctatggctttccctctcattcagagtaaaagctagttccttaatgatatggtttggccctgtgacgccacccaaatctcatgttaaattgtaatcaccagtgctggaggtggggcctggtgggaggtgattggatcatgggggtgttttctaatggtttagcaccatcccccgagtgctgtcttgtgatagagttctcccgagatctggtcgtttaaaagtgtgtagcacctccggctttgcccttccatctccttcacccatgtaggatgtgccagtctcgccttccaccatgattgcaagtttcctgaggccttcccagtggtgcttccttacagcctgtggaaccatgagccaattaaaccttttttctttataaattacccggtctcaggtagttatttatagcaatgcaagaatggactaataactagactccatgtgatctggtgcctctgttacctctcactttatctctcagaactcttcccttgttctctctgctctggcctcactgacctccatgctatttgttgacatttctatgcccatacccacttcagggctgttgtatttctcctcccctctgcctggaatgcttgtcccctaaatgcccatatggttctttcttacttcctcaaaagtttcaatgaggccttccgtagccaccctacataaaatttcaacatttcatatcctcttttcctgctttatttttttccgtagcatatggtcagtacctaatcatactatatattttacgtatttatctgatttattacctgtcttcctcactagaatgtaagctctatgaaagtagggacatttttctgttttgttcactattctatctccagcactaagaacaatatctggcacaaagcaagagtttaatatatgtttgtgaatgaatgaatgaatgtttctgttgtgttaggtgctatgaggaacccaaaaaatacttaaattacaactataatatggaaatcactataatttagaaatacagaatagaaatatgttataattctagaagatgaaatgccaaatagttggaatgatattttccaaacccttctttctttatgaaatgttgtcagaattaatattatggcatcatctctaaaacactaagtgtaattgttactctctaccagttaagaggaattttcccttgccttttcatatatttaagttgtagcatcagttcctagctggaactctgaaattgtgcctgggcctccacgattaattcatgaaaccctttttgtgttttcaggtttgaagcagccaagcttgtcatgcagtggctttgcaaccatgaggatcaaaacatgcaaaggatggcagttgctatcatttctatcctggctgccaaggtacctgaactcttgctgaataattttctgtagacagctgtttctcactacatttactgtttccccccaaaagctgtgtgccagaaacattagtaaatctctctgccagcctgcttattcaagctacattcgatattgcagaatttggctgggcacagtgattcacacccataatcccagcactttgggaggccgaggcaggcctcccaaaaaccgatatgcagcagaattccaagttgatcagagattttagtctcacctttggagtgaggtacagtgaatgatattaaactcacattaatgagttcttggacattgaatttgttttttacttgcttgcagctttctacagaacaaactgcacagcttggtactgagctcttcattgtcagggtaagtctataatctcctccattcaggccactagatattcatgtttattgttttcaggcagtattgtatattttctgacattttttatatatatataattatatataatatataattatatatatattatatattatatataattatatatt

SEQ ID NO: 1540 - DNA, 2300 bp, Homo sapien
gggattacagggatgcgccaccatgcccaggtaatttttttgtgtatttttagtagagattgggtttcactatgttggccaggctggtcttgaactcctgacttcaggcgatccacccatctcggcctcccatagtgctgggattacaggcatgagccaccgtgcctggcctcatgtgttacgttttaaattaattggtttaataataagagcttaaataaaatattttgtcagaaaagtgaaaaacataatgccttttatttagttcatgtgacttgggtaatctttgggaaataaagatgggtttaaagattattgataaaatacaaatgtcttcaaaatgtaaacatgtggtcaaaattatgttcaaatattaggtttgctaaatgctttaaggtcataaactgcttccttggcttttgaaaattgtttaacttgcctgttttctagctcggtaaggcctgggacatatgcagttggccacacctctagatatgctggaaatagtcaaaccttatgagaacataacttaccaggttctatattaaagttaaaattgctgaaattcacacttcagctgtaataggaaatatcctctccattgggcaaaagccgaggaaatgactgtaactttccttcatcctcgtcatttacatagggcataccccaagtagagggtatttaaactcccaaaaattctgtaacggggtctttgagccccagtgctcgggcccactcccacattgtggcattgtggagtgtactttcattttcaataaatcccttcattccttccttgtttgtgcgttttgtccaattctttgttcaagacaccaagaacatgaacaccctccaccgttaacaaaagcatattggcgggggcacggtggctcacgcctgtaatcccaacattttgagacgccgaggcgtgcggatcaccaggtcaggagatctagaccatcctggccaacatggtgaaacgctgtctctactaaaaatacaaaaattagccgggtgtggtggcgcgcgcctggagtcccagctgcttgggaggctgaggcaggagaatcacttgaacccaggaggcggaggttgctgtgagctgagatcgcgtcactgcactccagcctgggcaacagagcgagactccgtctaaaaaaaaaaaaaaaaaaaaagcatattgattggacttgcagtaagaaaactcaattttgactcccaggttggccactcatcagctggccaaaaaacgtgttgtctattcaacctgtcagttcttcagtttccctgtgagaaaaatggggatgatacctacagcacaggattttttttcttcttgtagtaagtggattaaataaaagaataaataaatgaaagaaaagcattaggcaaagtacttaaaaataattttaacatctgaatccaatccacttatcaaggacttactatgtaaaaagcattgtgatgtgttttacatacattatttaatccttacattaagtctgtgagataaagcattctcattctattttactgatgaggaagttgagcttcagagacatcaagaatcttgctccaggttctcaaacactagatggctgagcgggcattctaattcaggattcaaactccaaggctcatgctcttgagaactttccttttccaaggtattgctttctcttaaattagctaatgtgtactaacttgtggagtttctttcctggagaaagttagaagggtctctcggggtttctttcttggagcaggttataagggtcttctcgagtactttttaagtaacaagaaagctaaatagattttttggtagatacttgccaatattttgtattcgttttatatttgatttatccagatactctaaggagttgaaacagagaggaccgttagagaggtgctgttgccagattttcaggggcaaagtctttgaaatatatattttaatgtatgaaagctttaaaaaatatatacatatatagaaataatgaatatgtgtgtgtgtgtgtgtgtgtgtgtgtgtgtgtgtgtgtgtacatgtatatatatatacagtattccccaaacctacacagccggtcctcggggaatatcctctcaagccctgaggtgcagggctgggaaggagtgggtgagcggctgggtcgtggcaggttggtctggggaggctggggaggctggggaggcgggaggagaacggttggccccggcagcggcgtgtcggagggcggatggggctaggaggccgcccggggggtggggtctgcggcgggccggcccccgcg

SEQ ID NO: 1541 - DNA, 2300 bp, Homo sapien
tcagcctcccgagtagctgggactacaggtgcccgccaccacgcccagctaattttttgtatttttagtagaggcagggtttcaccatgttagccaggaggatctcgatctccagacctcatgatctgcccgcctcggcctcccaaagtgctgggattacaggcgtgagccaccgtgcccggccacgcccagctaattttttttttaattttatttattggccgggtgcagtgcctgactcctgtaatcccagcactttgggaggccgaggtgggtggatgacctaaggtcaggagttggagacaagcctgaccaacatggtgaaaccccgtctctactaaaaaaatatatacaaaaattaactgggcatggtggcaggcgcctgtaatcccagctactcgggaggcggagggatcacttgaacccaggaggcagaggcggcagtgagctatgatcatgccattgcactccagcctgggtgacagagcaagcctctgacacattctacctgtctgcagttttcaatcagtcccactcttagctgtccccatggacagctcagaatcaccctaactttaggaaaatctctaacacaatggaacaaaataaataggaaaaaaagcaacttgcaggaaacagtagccttggacgaacaggaaaacttaaaaattaggctgggcatgatggctcatgcatgtaatcccagcacttttggaggctgaggtgggcagatcccttgaggtcaggagtttgcgactagcctggccaacatggtgaaaccctgtcactactaaaagtacaaaagttagctaggtgtggtggcatgcagctgtagtccagcgacttgggaggctgaggtgggaggatcacttgaacccaggaggtggaggatgcaatgagctgagatcacaccactgcactccagcccgggcaacagaccgagtctcaaaaaaaaaaaaatcttttttttaaattggccaggcatggtggctcacacctgtaatcctagcacttcaggaggccaaggcaggtggatcacttgaggtcaggagttctagaccagcttggccaacatggtgaaatcgtctctactaaaaacacaacaattattgtgtttttacaggtgtgcattaccacacctgtaatcccagctacttgggaagctgaggcaggagtatcacttgaacccaggaggcggaggttgcagtgagctgagatggtgccactgcactccagcctggacaacagagtgagagcctatctcaaaaagataaaataaaataaaataaaatttaaaattatcattattacgttcaaagagaaaaatagatatagaactatgaaacaaaaacaggatattatatttttagaagaggattcagaacaaaaaagataaatgagctagatatgaaaagatgagtctgggaaggccaacatcccagaaaaaaatgattaaagaaatgtcccagggaggaaatgagcttcctgactgataagtactcaacaaaatatatgaaaataaacccacaaagaagaaaaaaattaacaaaaaataaacaaaaaaatgaaaataaacccacagggtaagccattgtgatttctgaacactgaggacaaaggacaaaaaccttaaagcttaaaagaaaattgcatgggagttctcaacagtgatcctgacaagtaaaagacaatgaagcaaacatttttaaattatgaaggaaaaatatttcaaagctagaattctatacccagccatttgatcaattaaatgtgagggtaaaataaaggcctttttaaacaggtatggtctcatttcaagactcttttcttaggaagctactggagaatatggtccaacaaaaggtgggagtaaaccaagatacagggaggcacataagccaggaaacacggaatccaacacaagagaggcaaagggagtccgaggatgacagcagtccaccatatacggtgtacaaaacaagcagaccacatggaaggaatgcaaaggtaagaaagtcctgagaaggtgaagtgtacagaatatgtatgaagatttataccttgagtatacacttagaaaggctgtgcatagaaacagtgagaaaaagaatcttagtttcccaaagtgggaaaatgaattgatagattcctaaagcgataaagtcaagaacagcagcataatatgttatttagaaataaggaagttggctaggcgcgatggctcatgcctgtattcccagcactttgggaggccaaggtaggcagatcgcttaagctcaggagtttgagaacagcctggc

SEQ ID NO: 1542 - DNA, 2300 bp, Homo sapien
cacctgtaatcccagcactttggaaggccaaggtggacaaatcgcctgagctcaggagttcgagaccaaccttggcaacatggcaaaaccccgtctctacaagaaatacaaaaattagccaatgttgtggcatgtacctgtggtcccagctactcaggagggtgaggtggaaggatcacctgagcccgggaggcagaagctgcagtgagccaagatactgccactgcactccaatctgggcaacaacaacatcctgtgtccaaaaacgtataacaggtcaaaccgtaaaacttgtctctcttacccttattcccagcctctcggttcttcttccctatccttccaaagatgttttatgtaaatacaatcaaatatacacatgcatactcttatcccccttgttaacacaaatttttgttttctttattatttctttcaatagaggtggggttttgctatgttggctaggttggtcttgaactcctggcctcaagcaatcctcctgtctcggcctcccaaagtgctaggttcatgagcatgagccaccagacccggccaaattttagctttctttacacactattctgcattttgacttgtttcatataccaatagattttgaagattgtttcatatcaatgcataaacagtttcctgtgttttgttatagctgcatagtattcagattattgatgtaccttttttttttttttaagtagagataggggcttgctatatttcccaggctggtttcaaactcctggcttccagggacctacctgccttggccttccaaagtgttggaataatagggtgagccaccacacacagccccataatttatttaaccaaccctctattgatggatattgagactgtgatatagtttgggtgttggatccctccaaatctcacgttgaaatatgattcccaatgttggaggtgggccctgttgggaggtgactggatcatggggacagatcccttgtgaatggtttagcaccatccccttggcgataaactgggacctccccacctaattttcttgttcctattctcgccatgtgacatgctggatccctgtcaccttcagccatgattgtaagcttcctgaggcctcaccagaagcacatgacagcaccatgtgcttccagtcttttgctattataaacaatgctgcaatgtacagccatgaacacgtgtcatttcacagctgtgtggatttatctgtaggttaaatttctaaaattggaatttctggggcaatgagcttgtgcatttataattttgatataaattaccagttgcttttcatttaaagacattcacatcagcaatgtgagagtgctttgtatatactgtgtttaagagaataatttttttttttgggacgcagtttcgctcattgcccagcctggagtgcagtggcgcgatctcagctcactgaacctgtgccttccgagttcaagtgattctcctgcctcagcctcccaagtagctgggattacaggcgcccgccaccacgcccagctaatttttttgaatgtttaacagagacagggtttcgtcatggtgaaaccctgcctctactaaaaatacaaaaaaaattagttgggcgtggtggcgcgtccctgtaatcccagctacttgggaggttgaggcaggagaatcgcttgaacccggaggcggaggttacagtgagccaagatcaaggcacagcactccaacctgggcgacacagcgagactccgtctcaaaaaaaaaaaaaaaaaaaaaaagtgaggcgcaaatgggaggtgaagcagtgaggttcgcaagtgtagacacgctcaagggactcattaaatgtcatttcatttaaaaaatgaaattgagcatatgtgcaagcaaggttcacacaccccatttaatcttcacaccaccacggggtagtcactattatccccattttacaggattaaaacactgacgctgggaggttgacagagttacaccaaatcacacagaggagctgggcttcccccgacctcctccgctcaagtctccctgtccccgggaggtgcggaaggaggcaacagacgcttggcccataggtggagcaattggcgaaggcttcgcccgacgccggaactgcgagctctcagcgggagccgagacggtgcagggccggagaagcaccttcactcccagcctgcgccccgatgctgcgcgttctgtgcctcctgcgcccctggaggccccttcgggcccgcggctgcgcttccgacggggcggccgggggctcagagatccaagtgcgc

SEQ ID NO: 1543 - DNA, 2300 bp, Homo sapien
ttctaacatagcttgcttaaattcacaggtcgactaatgtttcatttcatgtgcatgctaagtgaagctggttagtgatgaccataagcaggtggagaagctttcaatattttacttattttatcagtactcctgattttataaatgatgaggctcattaaccccattcctactcaaatctcctgataaacttggttataatagggcttcatggggatccaaacatttttaataatgttttgaagcatcttggtgtgggacaaacagctcaggctaccccagagccccacatccaatgacttagaaaagtctgtgttttatagtgggaaaagtttggattatttagtccttcacattggaaagggaagtgttttttctcagtcttttcggtattaacaaataccttttatattactatctatcccctctgccctctatggactcttattttgaaagcaatatccagtggacagccaggatttgttacataacaattaatcttgaccttaggacttgttgttctattaggttggtaactttgtctgatccaccaatcatattgctgtcttgtcagtccatcagtttcaagaaacaactgtacatgtcagtgccctgatttgtgtttgtttttcttttttttttttttttgtttcgttttggttttttagagacgtggtcttggtatgttgcccaggctggagtgcagtggctattcagaggtgtaatcatagcacatttgtagccttgaattcccaggctcaagtgatctttctgccgaagcctcctgagcagatgggaggcgtgcatcactgagcgcagcaattttactaagttggtctagtcctagctcagtagttctttacttagcacagagggggcttcttagaatctcctaaacttgatcttagccaaatggccaagaagcaatccttagaatcttctaggagagcctttctaaatgctgatactgcaaaccgaaaagtatatgaaacggatctcaattaatttagaagttaattttgccaagtttaaggacgtgcatcatctttggagacaggtccgtgcctttctccaaagatgattttgagggcttcagtttttataggggaaggggcagatattggggaaagatgaataaattttaaaaagatgtgggtagataagaggcaaacggttgcattcttctgagtctttgatcaaccttcacatgtgaggggggtagagaaatagtcacttatgcattcatctagctcaatgaatctgcatttttacataagataaaataaaccggggagccgggcgcggtggctcacgcctgtaatcccagcactttgggaggccaaggtgggtagatcacctaaggtcaggagttccagaccagcctggccaacatggcgaaaccccatctctactaaaaatacaaaaattagcggggcgtggtggcgcgcgcctgtaatcccagatactcgggaggctgaggcaggaggattgcttgaacctgggaggcggaggctgcagtgagccgagttcgcggcattgcactccagcctgggcgacagagcgagactccggtctccaataaacatggaaggctgtttctccccggtttgctggaataaagtctctgtcttccaaattccttttcggagaacttttgttcacaagattaaaaaggtcacgcagctggtgacggagcctgggttttttgatttagacattgtatccatgtgtgagatcctgcccatccccgctttcttggtgtcctgtgagtttaaattcatgaattcactctcaactgccaccgctaacaggacacaggccaattccaacacgaaccccaacggctctcctcagggtcacctttcatgagtccgctttccggccaacccctcctctcagtcttaggccccactgcaagcctactcccgctcaccgtacagaacctaagcacaggatcagagatggggacaggttgactcagtcccatgcccaagtccgcaaattagggattcggctgcctaagggctagagaacgctccccgccccacaggacgcgccccaccccgccccctcctcctgcccctacgcacgcgcactctcacgcgcctgtgttgccgcccgcggccctggcttcgggcttcagggagctctggtgcagtctccgcctgtcagtgccggcagtcgtccgcggcgcccgccccggtcccgcactggtgcagccatgtcctcttccccgtgggagcctgcgaccctgcgccgggtgttcgtggtgggggttggcatgaccaaggtaaaccgag

SEQ ID NO: 1544 - DNA, 2300 bp, Homo sapien
tttgatttttatcaatggtgagattgagtattttctcaaatagttgtaaattgcatctgttcttttgtgaagacaactagcagcgtatctaagaccagtttgaatattttttgtcttttttgtcttacatattcatttataaaggcagatttccagtaaaactgattgcccccaagtttgggtataatagagtcatttcactttgaccttcctcattaatttctaaattgttcacaattcaaaaagttattaccagttgtggagctacctttttttttttttttttttttttgagacagggtctccccctataatcttgccctgctggagtgcagtggcatgattataactcactgcagccttgacttcctgggctcaggccatcctccttcctcagcctcttgagtagctagggctacagacatgtgtccccatgcctggctgatttaaaaaaattttatttttaggccgggtgcggtggctcatgcctgtaatcccagcacttggggaggccaaggtgggcagatcacgaggtcaggagttcaagaccagcctggcgaatatagtgaaaccccgtctctactaaaaaaaaaaaaaaaaaaaaaaaaatagctgggagtggtggcgcatgcctggagtcccagctacttgggaggctgaggcaggagaatcgctggaacctgggaggtggaggttgcagtgagccaagatcgtgccactgcactctatcctgggcaacagagcaagactctgtctcaaacataataaataaaataaatttatttttagtagagatgaggtcttgctatgttgtccacactgggagctacctatttttaaatagtgtttaagatacatggtctgtaaatatatagacactgcttagaaatgaaaagcagcagttaaatttcttggggaagttggggtttatacaggaaattgtcacaggtactcaggaattggaagttgtggctggggatgtgtatggaagaataggcactgtaagtagtagacctgcagaccagtctgccctgatagaacattctttttttttttttttttttttttttttttttgagacggagtcttgctctgtcgcccaggctggagtgcagtggcccgatctcagctcactgcaagctctgcctcccgggttcacgccattctcctgcctcagcctccctagtagctgggactagaggcgcctgccaccacgcccggctaattttttttttttttttgtatttttagtagagacggggtttcaccgtgttagccaggatggtcttgatctcctgacctcgtgatctgccctcctcggcctcccaaagtgctgggattacaggcgtgagccaccgcgcccggccctgatagaacattcttaacccagctctccttcaatagctggtccgatagaaaggcaaacaaatatacatctggagtcatgggttctaaccttacctctgaaattagcctgctttgtaaccattcacagattaacctttctgtttctcagtgtttacatcagtaagttcctttcagctctaaacatctttgattttattattcaggggacagaatgttatccttttgaatccagaacctttcttgtgaatatctgtgaataggtctggaaaacaactcattgttgttgggaactacttggaggaaaataataggaaaaatttcccataccagctaaacttttagggaatgtgaacttccaaatccttgtttattttcttttaatacattaaaaatggtaaaattaaattatttttatgccattttccctggactagagaattgtagattcggtgttttctctttcaacatgccagaaaacgacaggttaagttgaaagagtgcaggaaagaaatttagagagaaaataactagctgcaaaacccttcggtgttttaagagaagttactatttacacaaacgtggcctcggcttaatcaaatgctttaatttaaagtcacaaacatcccttttctggcttgagaaagctggtggaagcagctcagtgctctgtgttcgatttgttaggtcttgctcagtgtgcagaactctgctggcagctgagaggggaagccggaaagaggcaagttcctggtgcaaaggtggctctgcagcataatttaggcattggaggagctgtggttgtaacactctacaagatgggttttccggaagccgccaggtgagtgacattcagagttttgtgtgtcagttaatccttctgacttttcacagttgatgatgttttacatgtaaaaatttcttattttattgtc

SEQ ID NO: 1545 - DNA, 2300 bp, Homo sapien
gttctgtacttgcattctccaatttagacatactgtgaagtgtaggtactatttttatattcatttgaacctagctaggatttgaacccagctccaagcttaaagcttgtacttgacactatgtacttcagtaatatcaaacaggagctgaaattgaggggcagcatgaaggaattgaagcagcacaagtagattcaggaaacctcaatttcaaactctgcctttacaatccttctgaaagaggatttgcttctagagcaccaaggttgcctccatttttccaccagagacactcaaagtgattcctcctgcagcttgtatctatagtagcagccaaccacaaagcacacatgggcatttgctcagcattccatagaaaagcctatttctctgggaggtggtgggtactgggtgtgtggtgtgccgtgtagcgggcccctgaaacaccttggccttagcagttataagtatagagaatatcttccccacagggctaggatgattaagatattttaaggatttaggatggtgcctgtcatttattaggcactcaatatgtgctggctctcattgtcctaaaagatttttagtccatgagtattcaagctagtagaatcctgtccttttagctctacttgaatctaggctcaatgttcaggagaagacacgagatgcatctctgttggtccaggtccaatgctgtgaatcacaccaactcttgtgagtttgagctccaaaaggactggaatttgaggccaaagaaggcaaaatattttccctccccattcttgctaagttcttgggttgttggtgtaatggaaacagacagtcctgggttcaaatctagactctacatttgcctgctcaagttacctgcctgtttccatcatgggaagaacttgggctgtggagaagggtaaacctggggtcaaaaccccagctctgccagtgaatgggcattttactcagtcaagtatcctttctgaggccatctcttttctataaagtggggcagcagcagttcttcctttgcggagttgtgaagcagagcataatgcatatggtataacctcacgggggcggcagccagtgaaaagtctggagctgctttacaggggccattcattcattcattcattcaggttaaggttgagcaaggggtcccacgtgtgacttatgcatccttctccctcttcagtgggaggacagccaggtgaggcagctgtggatgccctgcccacaggccagagcaggtaaggggaggaggcttgctacacagtggaggtgccaagtaccacctaagcccagccgcattgcctgttccaccgccgaagcccctggcgccaaacagtgttgcttcagctggtagtagttaatactcctttacttggaaacattttcagttcctgggagcaatatggtggtgtgaggtctcactgttcacccgccctgtttctctgtgactgggatctgcatgtccccgactccggcccaatttaccattcttcaaggctcaccaggctgtgggcccagggccaacagggatgggagtggagggtggggtggagcgtggggaacttttccgggaagaggcccagcagggtcttggctggcggccccattagccacggcccaggaccccagggtgggagagtgaacggaaaggtactcgtgcctggagcggttgcaacatcctctgtaatgaggaagatacagctcagaggcactgggtcgaaggacccctctccccagccctcctttcaggtgtcggggcctaaagggggtccagttccagtgcggaaggctgggaactaggaagcgtcgcggaccagacagcccgccttcccggtctcccgggtgggggttcggggggcgtggtgcggcggccggggctgagaggggtcggtgcggcggctctgcctccccgggaagtgggaaccggccaagtcccgagcggggaggggcaggctttctcctgcccgcgcctggggggaccctacgcctgtgtccgaaggaggccggcgtccagcagatgctcccggggcgggtggggagtgggggaagggggcgggagagaggcggggaggagaaaacccacaacaaaacttgcgtcgcggagagcgcccagcttgacttgaatggaaggagcccgagcccgcggagcgcagctgagactgggggagcgcgttcggcctgtggggcgccgctcggcgccggggcgcagcaggtacagggcgctggcagccggggtgggccgaggggccgggggctgagcccgggcagcgcactcagacgtcccc

SEQ ID NO: 1546 - DNA, 2300 bp, Homo sapien
agggagggctgcccaggcgcactgtgtagactctggcgttgttgggcctgaaatgggggcctcctgaaggcagggcgggggaaggagtggcagaggttgtctggagctggggcggtggaagtaacggtatgaaggacgccatgtgctgagcctgggccgggcaccttggcagtctcgctctgtcctcgcaggagccccaggaagctcagggggaaggccgcgcagcgatgcggggctggggccggggtgtgtctgcctgcctggttcctgagcctggctgccccgccgcccccaggtatttccccttcggcattgtgttcctcattgcgggtaagatcctggagatggacgaccccagggccgtcggcaagaagctgggcttctactcagtcaccgtggtgtgcgggctggtgctccacgggctctttatcctgcccctgctctacttcttcatcaccaagaagaatcccatcgtcttcatccgtggcatcctgcaggctctgctcatcgcgctggccacctcctccaggtagccccggggacgggcaggacggtggggagctgggaggggctgagccctgtccgtctgtccagccatcattggttcatagccacagaaccaccaaaacgccagtgtggcccacctcacaaatgcggggacggctggtgctggggtaacaagactgacgtgggggacttttggcctttgtcgaggcctctccttcccccacggccccagtcctcaagctcactgagtccgcatgggggcggcctcgacgcgccagggcagacagcacagtagagtcagtgggaaatcacattggcaacgcactgctgctgccttttgccccacaaggtgcttctcctggagtcgggccctgtgttgctctaggagctcggcctgtccactgccgctgggatgtcctggctgggtgccctgtcacaaccttggcagtgtccctagacctcagggacttgagccatggctctgtcactcactcgctgtgcctgggcattgctttcctcatgcacagactgggggagactccagcttccagctcacagggttgcagtggaggtcgagcccctccttgccaggctgggccaggtgaaccagcacttggccttaaggatcccaaacctcagcccagtgcagagacctcaggaatttagagttgtgcaaaccatgtcgttggtggagggggcaggaaggaagtggtcccttatggagcatctagtgctgtgaaggcagtttggctctccccatggcaagtgtctgagctccacattaagggagtcgcaggaacttaagccacatctttctggcactgaaggcctcactcttccctctagccctcacttgggtctcagtttttccatctgtaaaatgccctgcaggcctctgtacccagcagtcatatgacacccacccctggcagcagatgcacctcctgcaggattcaggagcagaccccagtgaagaaaagcccaggagccattgccaggaacaccctcccgcagatagggggtcagagggcaggacaaagccccaaacatgccagctcccatgccaggggccaagccagccagagccagcagccccctggccatctcctgccagcaggaaccgcagcctcaagcccagcaggtctggagctcctgagaggctctggcgagtagaaccggccttccaggcagaggcccgggggagaggaagacacaggggccacaccggcctgttttagtcccagcactgccactgggaactctcatgacaaacatagtaataataatagtcatggtcaccattgactgagtgggtacaatgggccaggtgctgtccaagcccgtagtcgtttaatcctcctagtagctctgtgacccaggtctttttgggacaaagatgctgaggcacagggttcaggaacttgccaggaccacttgacaggaggctggaatctaagcccagacagcctggcccagggccctgctgctcagacctccatatccctcggcacagcagtgtgacatgggtcagccccgccctctgggcgtcagcttcctcatctgtaaaatgcacccaaacacctccctcataggaagaaccaagtgagagcactgcagtgcccgcggtccttacctcctgccggagcagcgctgcagaggcacaaacactcctggcggggtggctgcctggggaggggtgagcttcccgacagaggccccagccatcctggaggagggtgctgggcagacaccggcccctctaaccgtagctcagccacactgcccatcacctt

SEQ ID NO: 1547 - DNA, 2300 bp, Homo sapien
cagcagtaactagctgatacagggaacgagagtttctttagacagtgggtgggagcctgtgtatgggcatctatccccacgggggaggaaaggaatgcttctccacaaccttaagccaagagaactattcagagaccttggcttgagtctcttagaatttgaggaatgtaggggctggtgcctgactcatgtccaaaggccctgggaaaggccagcacttccaatagggatatgtatgcttcccatgggccagacatgacccaacagggtcacccagaggggtgaggtgaccccagcagaggagtcaaccagagccctggtctaggggatgttgtaagtagccagatggaataaattgcctgagtccaggggacagcaggtgagagatgcgagagagaagaggggctccagagaacccatagaagtagtcctggagagacacaacgagggagcacctgctccagctcacccctctcccagtctgggcagcccttcctagcccactccctcacctctcaccagggagcaggcagagcaggaaagagaaacaaactcaccacgaccctcttcccactgcagctttcccagtctgagtcagatccaaaaggctaagacaggcttagtttaaactgcaggagtttggagttttaatgttaggcctagacttcttagatctgaaattgaccaggaagtgagaggtactagaaggtgttccctgagcgggcttagtggggtagcctgtggagcccagcacaccattcctgggtggggcttcccaggctccatcccaatccctgctctctcaccacctgtcctgcaagagcccctctgccactagggtagcacctaacacctctccctggcgatttccaaacctccgtctccagcttagactcccccatgagattctcatccactggccaaccatcagttgacacctaccccaggatgcctgcacctgctccagaccatccatcgcttggtgaccacaccaccatccacttggatgcgtgggccagaaatcttcatgctgggtgatcagcacacctcacctcctactcacccacctcctgctaaggatccctcctgagcagccctgccatctgcccccttccccatccccagggccaccacttggccctgtccctggctctgccttcccctcctacctcccctgcaactctgatccctggtcagattgaaccttctgaattggatcatgccgcttctctgtataaaactcattttctgtggcctttaggatgcaacttagcttttggcctggttcacggtgcactttgaggccggtccccacctgaattctccagcaggggtttctgcctgcctctcaccccttctgctgtgtcacactgatggtgctatgccttctccccgcagacggttccctgcagctcaggaccttcgcacagctatcgcccccaggcctgccctccctgcctccccatcttcccctcccttagaagggcagtggcttcctgctctcaccggcagccccagcttccccattgcagccccaggcccccatgttgtccctgtctgctcgtgggtctgaccactcctccagggcaagggctggctctgagtcccctggtccagggcctggcacagaactggcactggtgagggagcgaatgcacgaaggacaggagcaggggtgacctgcaggggacccggggaaagggagtggaaggtggctgtgccgctgggtctgcagtgcttccctggagagggagcctaggtctgagaagcaaggttagctgcactgctgtggctaggatgtggcactgccattgctagggggtggcaccacagggcaaagggcattgtccttggagtcagacaggactaggttgaatcctgtctccactacctacctaccggtgactctggaaaagtcacggcacctttttgagccccatttcctcatctgtaaaaagaggaccaataaacaaagggaggggccaataacagccagcctcccaccctacaggctgggcatcagcaaatgctcacagatgtctgctctgcgcccatccacaggcagagaggggcagaccccgtccaggctgcaaggtgcttctagcctggtggggcagacgatgcagcatgagcccagcgggcagcccagagctcaacccaccagggtgatcatggactccgtgatcacccccatctccacaccccgtcctggcctctgggggacctggcagggcaggctcgggcctggcgttcccaagcggggtgtgggtggcaatagttaccggatgaggtccaacagg

SEQ ID NO: 1548 - DNA, 2300 bp, Homo sapien
ttagtgtgaattagtccgttcttggggtctctccactttcttataagcttcctgaaggcagggcaggtactgtctgattcactgttgtgtttctagtacccagggggtgtggcacactaaatggtgctataagaacatttgctagagtgagttgaaattctcctgttgaagaccgtaggaacagtggaaagaatggctgtagtctggtaggcaggtagtggtaggctcagcctgtgggagagaggagtcagtggtggctatagggcacgtcctgggaatgggagtcatggagctgtggtagaaagcaagactcacctatatcatggcacagctaaaggccaggtctgggctgggtgtggtggctcatgcctgcagtcccaacacgttaggaggccaagatgggaggattgtttgagcccaggagttgatcaaaacccaaatccaaatacctacttagcatattttctcttctgggaagtaactaaccacctgattatttggaaaatgaggcatttgttggagttgaaggtgtagcaagaaacttttggttttaagagtcaaagtcagaggaaaaaaaactctcagacttgtattcacccccaccccccaccccaagctactgcaaagagcaggggctttggaagattggtttgttgaaatgaagttcctttgacaaaggtacctgggcccatttctctcattctaaaaaggacaagactgatacccagagacggcaaggtcacagagctgattaaattgggatcagaatcttctcagtcaggagctctgtccatggcttcagagcctgtgccccagtcccctctccccacctctcccctatgccccacttggcccgtcctcttcatcctctgcccctgtctcctatgtcaggaggaggaagcccctgtgtgcaccccaccctttacctcccaccctcactgcagactgcacttcccattccctgctgcctgctgcctgactgctcctaatgagattacagatctctggtgaaatagacgagggttaattcccccaggctttacagggcagggcaggccaggccacaagaaatagcaaaaagacacctattctccaaagcactaagtgtgataatgaccctaagagtccgttcccctgttcagcacaccagggttcacactgcgtttccaaataccctctgggtggaattttgtaccagccctaacaaagtagatgctgttatcatctctattttacagatggagaaactgaggcacagtgagatgaaatgcttgtctgaggtcacacagctagtaagtggcagagctgggacccgaatgtgggtctcttgggctctgtcatctttaaaaaataataggcccagagagcctgcagggtgcccagcaccaggcttgaaacagccctgaagcatctacgtcccatttcccggtgagtggcacagcccacctttgaactcaggtcccctggactcgaatctacattccccacaatactgccaagcacccttgaacctatctgcctgttcatgtggtggaaacagactggcctagccctgacttctgacctctgtgaccatggccaagggactggcttctggggtctcagcctccctttctgaaaaatgaaggtgggaaccctgggatctttgggacaattccctatgattggcatagctaaggcagccagcacaggcctggcccgcagcacatgcacccacccacctcagtttctttatctgtaaaatggtgatattaatagtacttatttcttgggattggtgttaggattaaatatgccagtacatgtaacactcttctagaatggcacctggtgcatagtaaatgcttaattaatgttgagggaaactgatatcttactgtcttgtttttgattctttctggaaggaagcaggggtaaagatcaaaccaaccaagcaaatgttcctcttgttccttccagtacctggtccactcaactgtttaagaggaacgcttggctttgaggcctgaactcctagaccacgtggtctgctctaatttcccaggccctaatctgctcccagctcctaatgatgcagctggtaataggattgtggcttccctctaaggcggccacacgggcatggccgtggggctggcgactggtgtttagcaactccgaccacctgcctgctgaggggctagagccctcagcccagaccctgtgcccccggccgggctctcatgcgtggaatggtgctgtgccccttgccagcaggccaggctcaccatggtgccgcatgccatcttggcacgggggag

SEQ ID NO: 1549 - DNA, 2300 bp, Homo sapien
taccagctcatggttattcttaatgtgatccagaccccagggccatccccaggaaaaggaagcaaagcacctccccacagtaggcctgtgctagacacagtggacacacagtggaaacaaggtccctgcccaaagacctcaaaatttattgtgagagatgaattggtaattaaatagctgattattttaaaagccctaatacagttgtgtttcatgtacataactgtaaatgaatgtaaaaagtgctgtaaaatcacagtgggagggattcattcttgcagtgaggaagaaggatgaggattgaggaagacttcaaagaggtgagttttgaaatagggtttgaaggacaagtaagagtttactaggcagagatgcatggaaagaacattccaggcagcagagacagctaaaataaataaataaataagtcgcagagtaaggaaaaggatgggaatgagaagtggttcagtgttactacagcatagagcaagcttgtccaacccacagctcaggatggctttgaatgaggccaacacaaattagtaaactttattaaaatatgagatatttttacaattttgttttgtttttgcttattagctatcattagtattagtgtattttatgtgtggcccaagacaattcttcttccagtgtggctcagggaagtcaaaagattggacacccctggcatagagtattttggggtgacatgatgggagctggagaagtaggtaggggtcagaattcagaaggccttggacaccagcctaaaggcttagagttgctcccattggccatgcactcaccaaaggtgttcacgtccctcttttggctgttagattggatgggctcaatcttttggccctctgtctctagaatagagccgctgcttttctactgggcccactatttcttcctggtcctctgatccccttagcactacacagatctcgatatttgcctcgggtatcaaggctctgaaaatgatcaggatttagaggagatggctcattttcagaaagagttttatattctccctctggccttatacactacaggcaaatggcaccgatgttttggagttgggccagttgggccttttctcccctcaagagaggaggattcgatattcagtgtttctgaatttcatgcttagttcttaagccatttcccatttgccctaagaaataagagctggcagcaagctgcgctgtttttttctaaacgggaaatgggttaagcatttgtgatcaccactgaatgagtgccagagctggttagtgatcttcctgttcaatccgaggtcacctaactagataacaaagagctgaaactaaaagtccggtctcctgactcccaatccagtactctttctggtgtgctccagcttctggctctgcttagccaattatggaacagacagaatgtacttggctgccccaaacggctaaagggcagttctgttcccaaaatggaattctgttgtgcctcaagctaggcagcataattgtgtgtcttttggtaactccctgtcttcttctgtaaaatgggagtagagcctacttaatcctgcagctacttctaagatcagggattggggcgtggtgggctgttctgcagctgttttgtgatggatgagggatgatagatctatgttcaagtagcggaatcttagagtcaggagttggaaggaatcttggaggtggtctgtggtgacaggaagcctcttccaatagactgaacacggaagacttcctagagccggaggacaagggtttctttcctcttagcagtgagcttcttgtttttggaaatgctcaagccaagaatggatgttcaggcagaggggattccgctcggaaggggctttctgcactgaagtggtggccagcgggaaactccaggtttccaactcctgcacaaatcctttctaatatccatccactcaggtgagctggcagggcagtagctgtgcagggttcagggtcattatatgtcaatgaccttcagcacggattactaacaacagtaacatccgttaccgtttactgctttcctattaagcaccatgcactgtgcataacatgttatctttatctcatatctagaattttgggaggtactttgaatcattacgatctatctacttcttaggtgaggaaatagaggtttaaaatttagtccacagtctcgcaaggatggagcctggatcaaattttgggttatcagattccaatcacgtttcttagcttttcttttttttttccaactccagtttctgtcttgctccaaaaaag

SEQ ID NO: 1550 - DNA, 2300 bp, Homo sapien
catatatggctggcccttggacagatctgtgtttcactcttatataattatttgttgtaaaatgcagaagaaaatttaaaaaatagaaccttttcattttatcctaggggagaaaaatgcagttgttcaaactaagggtagaattaaatcagggccaatacagtgttagcacaggtgttatcattgtgaccagaaaacaggaattcttggggcagcttctgcttccccattttgaatctattattgttatttaaaataattatatttgtattttacttaaagatttagttgttattttacttaaaagtagagttaccattgatatacttggcattagtaaacccattgattctgatttgtcagtcgcttctgattattggttttgggggaggaaattaatgatctagtaatcagttcattagcttgtaaagctaattaacctcttccatatactgtcagccttacactgaccctgctttctccccaggctgcctattcccaaacttgaagacaccattaggagatacctcagtgcacagaagcctctcttgaatgatggccagttcaggtaaacactgagaaccttgggtgagcatagttggggtggttcaagacaggctggcaagtagtggtggaccaagcttcagggaatgtctgtgacgtggctgggtctccaggaacccagaacctagttgtacatctgcaagttcaggaaatagattttcattcatgaaggactgaccaagccccgagagttcctctaaacaggctcaacaggagatagtttataagccagaatgccaaatgtgtactttcccttagcaggtgtacctgggaggctcgctggtcctggtcatttatagagagcatgtacccttggaagggaggtccattgaggagaccatacggcagaccagaagtctgcatcgtgagcatgtttattgagttggatagcatgcctccaaaatttatgccctttttcatgaaatttagtatatgatcttatttggaattagggttgtggcagatgtaattagttaagatgaggtcctactggagtattgtgggtccttaattaaatatgactggtgtccttgtaagaagacacagagacagcggtgtgaggacacaggcagagattgtgtcctctgcctgtgtcaacaagccaaggcatgccagggattgctggcaacaccagaatctaagagaaagccatgcaacagattcttccccagtcttcagagaagatatagtcctactgacacctggattttgtccttaaagcttccagaactgtgagagaataaatttctgttgttttcagccacccagtttgtggtgttttgttatagcagtcctaggaagcaaatacagcatggaattggaaaataatatcaaatattgtcaaaaagtggattgcattaagctcttatagcctagtgtagtactctttttccataatggaaatttttctgtacaggtaactggcattgttgttggaatcacagaactcttcactggacagtgatggagaagcagatgaattatccataatctaggcctctgttttcaaatatttgttattagtcatttaaagtttctcttgatatggtaatagctaccagttattgagtattatgttttaggatattctaaatccttagctttataaatatttttaatcttgtaaagtggtattattatccattttacacatcaagaaaccgagactcagatcaagtaacttatccaagatcacacagtttgaaaagcaacagagctaggattcagacttaacttctgttgactccagagcttgtgtccttttctccatgccaaactgcctcctaggatatggattattttgtgagatgttgattgattttcctaatcattcattttaagaaggtagtctagattatcaattttagattgattcctgttctggttagaggtactttctgatctcattccaggttttagggctatgctgttggggacccaaaactctattatgagttcctcgccatgaacctaaaaatcatgtattccctaccatggtttgattttgtcttttcttgaatgttttaggaaaacagaacaattttgcaagagttttgaaaatgggattggaaaagaactgcatgagcagctggttgctctggacaaacagaataaacatacaagctacatttcgggtaggtaggctgggctgtgggtatgatttctcccagagccctccataatgaaaagtaaggcatattctctcctgttttggtctcagagatatttttggtgag

SEQ ID NO: 1551 - DNA, 2300 bp, Homo sapien
caggaggcagaaggagtgtctccctgtggcacccacggctgggaatgcgggagggtcgggcaggcgtggggctgcgcaggcacggctgacgcagtcgctctggccctccccctcagaaaatcgcgctgcaactcaaagccacgctggagaacatcaccaacctccggcccgtgggcgaggacttccggtggtacctgaaggtgcggccggggcggggcccggggagaggaggcccgtcctgatctcagtgctgaaccggagccttctctccggcagtatgagaaaatatttaaccaggcacattaagtgttcggggttttcctagttagaattttacgtttgctttctattaaagtgtattggtttatctctaattggcagtcttggaaagcttcattttgtagttcttccctgtgttaaatatttcgtggtctgtaaatggacactaaacgaaatgctacttgaagggacgcttgtgattatttaataaggtgaatagttcgcctttcgtttattgatttggttttctttattgtgaaatagtttaattttgtgcgtaatccacccttccttagccctcccacactggtaaagctggtaccctagtggcatggtctacagaggcctccccttccccagcagttcgaggctcttcactcttccagatcccagagcttctgctctgttttactcctggtcaaaaatcccagcatccttctgtacctctcaaaagccctgtttttcgggaagctgcctccggactacttttgtttcccaggattttgaagcctgaataccagggcttacttgggagaatctgttctttggcttgaagaagcggaatcgagtgaaggagacagaaaaatagagtaacaatagagtgataagtgcttataccagtgacatacagggcctgtgggaacataaagctaaccaagcagagtgggtcgggggcctgctgaggccatttctctttttttttcttaattgacacagaattgtacatatttatggggtatatagtgatgttccgataaatgtaatgtattgtgatcagatcaaggtagttagcatattcacctcaaacgtgtatcatttctttgtgttgggagcatttaatatcctagctatttgaaactatatattattgtcagctatagtcatcctacagtgctatagaacactagaacttattcctcccatatagctgtaattttgtatcttctaacaaatctctccatattcccccccctcacctccgctgaaaccatttctgcaccacaggtgccttgaatccccggccacactgagcacttcatagaggagggtgggcacgccggcataggaaacagccttacctatcctttgcccagagatagttctagttttgtccttgttggggcaggtgttagggatgaagtgagattgccatcaagaaggtagatcatgagcctgcccacctcccactgttcttaccctttccttggtgtctgtgcagcagagccagctgctttactaacattctttttccccaaagatgaaatgtggcaactgtggtgagatttcggacaagtggcagtacatccggctgatggtaactgttccccgcccaacccccaacataaacactcacaaacacacatacacttctgggcagggatttggggaaactggccttcatctctccagttctttgctccctgctttttgtggtttgggagggtaggtgtcagtgtgatcagcactggattcaataggcatctttgaggtatgaggcagagttcaaaatcaaggggaagccctttttttattttcctcaggaagccttcccaggagtcttgtcctagtaagttaccctttctgggtcttggtctctttaagtggacaataaatggtgggctcgatctcctcaggactgtacatctaattcatatgtgactgaaagttctgtttgctttttgccaggacagtgtggcactgaaggggggccgtggcagtgcttccatggtccagaagtgcaagctgtgtgcaagagaaaattccatcggtaggtcaggctgtgcgtactgagttctgccagggtggcccacagcttcctggcaccaggctgaaagtagactcatgttacctgagggtggagtcaggcctaagatgccgacacctgtacagcgtgatctttttcagggccacatgtgggcacctggctggggcgagggtatggactcaagtcaactttgtgttctcttttctatttcagagattttaagcagcaccatcaagccttacaatgtaagtttgct

SEQ ID NO: 1552 - DNA, 2300 bp, Homo sapien
ctctgtgggcactagctgaattctgccctgagttgctttccactgtgacagggcaaaactcagttccaatgcaaagtcccataagcacacagattctctctctatgccaggcagccaggtgctgccagaggatgagggaggggtggtggtagcaattcaagactgtctttcctaccctcttcattgccttgttcctttttttttcttcttttatgagatagagtctcactctgtcacccaggctagagtgcaatggcatgatctcagctcactacaacctccacctcccgggttcaaacaattctcctgccttagcctccggagtagctgggactacaggtgtgcactgccatactcggctgatttttgtatttttagtagagacagggtttcactatgttggccagctaggtctcaaactcctgacctcaggtggtctgcccgcctcagcctcccaaagcactgggattacaggtgtgagccaccgcacccagccattgccttatatcttgatgtgacgttacaaccagctactgtgattgctacctgagttttggttctcatgaaggtgctttcttgtgtggatagttgttcagtttggtgttcctgccagggaagaggaggaggaggatcactggagggttctatttggctatcttgccccacctcctagaagagtcttgaatgtgctgttccttttaccgttaatctccacagctcctgcatggtctcagatgtagcctggacaggaggccaggtaaaataaagttcaataaacgttatgagagaaggataagccaggtgggctcccaaaaaagagccagctgaaggggaatgtccagtcgcaaggaccacagtgagaaggatgtggacacagggcaaactctggagaagggcctagaaaccaggtctcttgggtgaaacaggaaagggcagtttgaagaaaggcatcatccccaaatctgataaaccaatacattctactttttaaagcgtattggtttatctttatttggcagtcttggaactcttccttttgtagcttttcccctgggcagagggagctgacgtgatctgagaagttccagggcaggcagagtagtgaagagcctggaaagaactgagggtcaggaactgtcctgttcgcttaaagcaggcacaaaattggcgttcagtaactgtctgtggcaccaccgaatcctggagtcaggcttccgctggcctgagcacaggttgctcgcggacctggctgacctccactggccccagatccccagatgcgaaaagcccagtgggccaggcgagcagcggcgcgcagaagtccctgccccgcggcccggccccggccccgccctactgagggtgcgcagacggcacccgccttttacgacgcgccggaaagcaacggcaagggccgcagccagcaccgggcggagagggctaccatgggggtgaggggaggccgcccgccgcggggacacggaggggaggtggcgagggtctgggaggcaacagctcgcgccaggaggagatgaagcgagtgggtgcgcgctgaaggagcaggaggcagaaggagtgtctccctgtggcacccacggctgggaatgcgggagggtcgggcaggcgtggggctgcgcaggcacggctgacgcagtcgctctggccctccccctcagaaaatcgcgctgcaactcaaagccacgctggagaacatcaccaacctccggcccgtgggcgaggacttccggtggtacctgaaggtgcggccggggcggggcccggggagaggaggcccgtcctgatctcagtgctgaaccggagccttctctccggcagtatgagaaaatatttaaccaggcacattaagtgttcggggttttcctagttagaattttacgtttgctttctattaaagtgtattggtttatctctaattggcagtcttggaaagcttcattttgtagttcttccctgtgttaaatatttcgtggtctgtaaatggacactaaacgaaatgctacttgaagggacgcttgtgattatttaataaggtgaatagttcgcctttcgtttattgatttggttttctttattgtgaaatagtttaattttgtgcgtaatccacccttccttagccctcccacactggtaaagctggtaccctagtggcatggtctacagaggcctccccttccccagcagttcgaggctcttcactcttccagatcccagagcttctgctctgttttactcctggtcaaaaatcccagcatccttctgtacctctcaaaagccctgtt

SEQ ID NO: 1553 - DNA, 2300 bp, Homo sapien
gtacccaagttgcaagaccaactcctttttaactctttcctctcttttccttaagcagaaggagtctctccctgtggcaaccattactgggaaggcactgggtcacacctgaaggcagcacagtactgggcctcacccagtactgtggctattacaaatgtttattcaaggcccaacagctctttagtcagcaggtgatgaatcctgccaggactgggtcctttccttcaaagcagcgggttcccttctggcccatggtagctctagaaatatctgggagatagagcctggcaagggggcttcgggactctgcgtggtgttttattctactgtggctgggatggtatccaagctgtaagacaaagtcctctttactttcccctctcctttcctctaagggaaaggagtctctcctggagccgtgagctgtgctgcctggggttgggggactggtgacataaacactcctttggctccccaactggtatctcactaggctgtgtgcaccccaagtccacgggctctgagctcagcacagcaccaggacttgcccaggaattgcagtctttgtggcctagactgcctttcgaatttatttaggaccctgaagcactttagccagtggtggtggggctcgccagaacctgaccactgggatggatgattcccctctggctagggtttctctaagtgcttcctctgtgggcactagctgaattctgccctgagttgctttccactgtgacagggcaaaactcagttccaatgcaaagtcccataagcacacagattctctctctatgccaggcagccaggtgctgccagaggatgagggaggggtggtggtagcaattcaagactgtctttcctaccctcttcattgccttgttcctttttttttcttcttttatgagatagagtctcactctgtcacccaggctagagtgcaatggcatgatctcagctcactacaacctccacctcccgggttcaaacaattctcctgccttagcctccggagtagctgggactacaggtgtgcactgccatactcggctgatttttgtatttttagtagagacagggtttcactatgttggccagctaggtctcaaactcctgacctcaggtggtctgcccgcctcagcctcccaaagcactgggattacaggtgtgagccaccgcacccagccattgccttatatcttgatgtgacgttacaaccagctactgtgattgctacctgagttttggttctcatgaaggtgctttcttgtgtggatagttgttcagtttggtgttcctgccagggaagaggaggaggaggatcactggagggttctatttggctatcttgccccacctcctagaagagtcttgaatgtgctgttccttttaccgttaatctccacagctcctgcatggtctcagatgtagcctggacaggaggccaggtaaaataaagttcaataaacgttatgagagaaggataagccaggtgggctcccaaaaaagagccagctgaaggggaatgtccagtcgcaaggaccacagtgagaaggatgtggacacagggcaaactctggagaagggcctagaaaccaggtctcttgggtgaaacaggaaagggcagtttgaagaaaggcatcatccccaaatctgataaaccaatacattctactttttaaagcgtattggtttatctttatttggcagtcttggaactcttccttttgtagcttttcccctgggcagagggagctgacgtgatctgagaagttccagggcaggcagagtagtgaagagcctggaaagaactgagggtcaggaactgtcctgttcgcttaaagcaggcacaaaattggcgttcagtaactgtctgtggcaccaccgaatcctggagtcaggcttccgctggcctgagcacaggttgctcgcggacctggctgacctccactggccccagatccccagatgcgaaaagcccagtgggccaggcgagcagcggcgcgcagaagtccctgccccgcggcccggccccggccccgccctactgagggtgcgcagacggcacccgccttttacgacgcgccggaaagcaacggcaagggccgcagccagcaccgggcggagagggctaccatgggggtgaggggaggccgcccgccgcggggacacggaggggaggtggcgagggtctgggaggcaacagctcgcgccaggaggagatgaagcgagtgggtgcgcgctgaaggagcaggaggcagaaggagtgtctccctgtggcacccacggctggg

SEQ ID NO: 1554 - DNA, 2300 bp, Homo sapien
gaaacatcccaagcactttttggttttcagcttctttgcatgctgtctaaaatgccttcttgactcttcttcgtctcctaaccaattcctcacatcccctcctcccatcattttatgtaggaagcctcctctgaccctcaggcttggttaggtgcacccttctctgctgcgagcctcctctgtttctttttaccacaacacctaatgtgctgttttatcactgcttacaaatctatctccctcacagtcgaggcctgtcagattcatctttgtgccccacttagtggatgtcttctgtcatctttgattgctctttccttcaccacagtgcctctgccaacaaaatcctatcaacgatcaaagtccagttggttctgcctccaacagtttcctaaatctttctctccatttctactatctctgtagtcccaaccagtatctttttttttttttttttttgagacagagtcttgctctgtcacccaggctggggtacagtggcactatctcagcttgctgcaacctccgccccaggttcaagagattctcctgtctcagcctcccgagcagctgggattacaggcgtctgccaccacacccggctaatttttgtatttttagtagaggcggggtttcaccatgttggccaggctggtcttgaactcctgacctcaagtgatccgcatacctcggcctcccaaagggctgagattacaggcttgagccaccgcgcccggcccccaacatctttcgtgtcttgacaactgcaacagtctcctaatcaatagccctgtttccactcttgcccattccgcacccaataaccagaatgctttttcaagaagagatcacatttcttctctgcttaaaaccttccaagcccggccgggcgcggtggctcacacctgtaatcccagcactttgggacgccgaggcgggcgtatcacctgaggtcaggagttcgagaccagcctggccaacatggtgaaactccgtctctactaaaaatacaaaattagccgggcgtggtggtgggcgcctataattccagctactcgggaggctgaggcaggagaatcacttgaacccgggaggcggaggttgcaataagccgagatcgcgccattgcactccagcctgggcaaaaagagcgaaagccgtctcaaaaaaaaaaaaaaaaaaaaggccttccaagtccaaactttttaccgtggtctataaagacctaagaggtgccgctcctacctacctatccgacatcatctcctgctatctcccagctcaccactcttcaaccacactgaccacctgagacacgcctagctcattcccgccctgcagccttgacatctggtattccctttgtgtagaatggtcttccttatgagcttcacaaggctgagcccttcttgttaattaggactcggctgcaatataccctttacagagagctctctaatggccaacctatctaaaagcagcccatccagcaattattctaccatgttattttttgaccactcactgctatctggaatcatctttttgtttatgatctctctcccggcagtaaaacacaagttccacgagaggggaagtttgtctaccttcgctgccgtattcccaaagagtggaacagagcctggcacacagtgggcgttcagtcaacgtttgctgaatggatagaaagaccccgtggagcagacacagtggcgttcctttaagatctgcactgcacaggtctcagtccctccctcctctagttccccacagatttccgaccctcggcctccccactcgccggcccccaggcctggtccccgctcccggcgggcggcaggctgcttttaccgtccggtcgaaactcaaactccaggaactcgtggccgaacttgcccttgtgccccacgtagtaacgcagataaaagtcactctccatggctcccaaaagacaaccgagcctgaacttccaagagcaagccgcactgccgccgtctgcgcccgacactgacgtttgcggcggcgcgcggaagtgacgtcaggtcccgtcgtcgctgcgtggaggggttccttctcgctaacctcttcgcccggaagtggcaacaagactgcaacatcccctcacgcctagtctgtaaagaactttgtttaacccggaggcggggccagccagctccgcccctccagctggacgcgggagcgaggttgaggttcatacccctgggttctctccaggcctgaggcggagagccagccgcctgcctacctctgggctttgaaccccgggtctggtgacttcg

SEQ ID NO: 1555 - DNA, 2300 bp, Homo sapien
tcccttttctttttttctctttttttttttttttgagacagggtcttgctttgtcacccaggctggagtgtaatggtgtgatcatggttccctacagcctcgacctcccaggctcaaattatcctcctacctcagcctcccaagtagctaggactacaggtgtgcaccaccacacctacctattttttaaattttttgtagagacagtctcctatgttgcccaggctggtctcaaactcctgggctcaagtgatcctcctgcctcagcctcccaaagtgctgggactacaggtatgagccactgtgtctagcccccttctcgtttatacaattcccttgttaccacccatatccagtgttttgtaataaaaatgtcttatggttttacagcaatttagtttccgagacattgtttcttacaacagttctgctaggtgtacattattatgctcattttaaagagaaggaaactgaagtctaaaaagttgagtcggttcacctttggttacaatgagtcattgttacacagggattattttaacctgtgtccagtgatttttcccccaccacacctactctacactctgctgctaatgcttttgcagggagaaaaggactccgtgttaagactgagggccgggcgcggtggctcatgcctgtaatcccagcactttgggaggccgaggcagacggatcgcctgaggtcgggagttcgagaccagcctggccaacatggtgaaaccccgtctctactaaaaacagaaaattacaaaaattagctggacatggtggcgcatgcctgtaatcccagctacttgggaggctaaggcaggagaatcacttgaacccaggagtttgagaccagcgtgggcaacatagggagactttgcctctacaaaaagtttaaaaattaggtaggcgaggttgcggtgaactgagatcactccattgcactccagcctgggcaacaagagcgaaactccgtctcaaaaagaaaagactgggaataggaatcagagactgctgtcccaacttacagaatcgtatacagttctagccgccaggacccaagaatgatgtcatctcggcactgtctctagaaccattcattctttctaagcctggaacttagatgagtgaaagcaggttcctattacataattatgatcttgattgccctgggcctactcaactgtaaattttttccagagccagaaaggcttcacagaggacaactttaccctgaaaagaaaggacctctttggtcagtggtcctcaactctgactcacctgaaagctttacaaaaagtaccaatgcccaggtccagcgctggagattttaactggcttggggtagagccctggcatcagtatttttagaggcttcccaagtgattgcaatgtgcagccaggcagagaattactgctcggtaagtgggatgactggggagtgggagatcaaatactctaacgtctcccagcacctattctagagatcagtggggcagaaaggtagaaataaaaggtggaaagggatgaaatgggtaagtgtgggtgaattagttccaggaaaacggcaatctccactgtggattcagggaaggcgtcactgaggagggctttcttaacagttcaggtcagtggaagccaacttgaggcacacatcgtgcgcggcatcctccggggaggtcgggtcatttcaccccattttactgccgagatgacctaggtccagagacggtaaagagcggtgtacgactcacacaagtcgggggtcctgtgaaccgaggttgagcctggcgggccttcggcccgaggtctttaagcgaagtcaccagacccggggttcaaagcccagaggtaggcaggcggctggctctccgcctcaggcctggagagaacccaggggtatgaacctcaacctcgctcccgcgtccagctggaggggcggagctggctggccccgcctccgggttaaacaaagttctttacagactaggcgtgaggggatgttgcagtcttgttgccacttccgggcgaagaggttagcgagaaggaacccctccacgcagcgacgacgggacctgacgtcacttccgcgcgccgccgcaaacgtcagtgtcgggcgcagacggcggcagtgcggcttgctcttggaagttcaggctcggttgtcttttgggagccatggagagtgacttttatctgcgttactacgtggggcacaagggcaagttcggccacgagttcctggagtttgagtttcgaccggacggtaaaagcagcctgccgcccgccgg

SEQ ID NO: 1556 - DNA, 2300 bp, Homo sapien
ccaagaggtgagctgtctctggtcctaggtcccaggtcccctgactgtgtcactgtgtcctctcctttcaccaggcaggctgtgttcacattcaggtcacaactcagcaaccccaggaataataacaacaatccctcttgttggtagagtactttttcatcatatattttgtctcattttacctcaagttctttgtgaaataaggctgggtataaatgaatacataactgtcctgtttttgccaatcctacaaagtgtgggtattactcttctaacagttgaggaaacggaagctcagagaggtaaaataatgttagcaggtggcagaactgaaacctaaacccaggtctatctggttccacagctgctttcaccatgacacactgcatctaacttgctatttgtagccattctgcagtagtataagctaatgtatccgagggccatataataagtcagcttattggttgggaatagaatctaggaatcctactactaggttgtcccctcctctatcactaggatacattaattctaactgtaactgaagtgttggctgccagggtgaaagagggagagcaagggagtgtaaggagctaagattggtgcctgattctagacctagaaatttaaatgagagacatagtatgtggcacagggaaaaataaaaaccgcgggcttatgggctttggagcccagccgacctcaatttaagttctatctctagtccagacatggtggctcatgcctgtaatcccaacactgagaggctgaggcaggaggatcccttgagcacaggagctccaggcagcagtgggctatgattgcattactgcactccagcctgggcgacagagcaagacccctacctcttaaaaaaaaaaaaaattcctagagtataggtttgacgaatttgttctctttgagcctaggtgtctttatttgtcagtctgggatgtaacgtccccacctctcagaattgttgcaaggattaaatgagagtgtagggataaaacactaggtatggtgctggaaagtacccaataaaagtagtagggaggccaggcatggtggcttatacctgcaattccagcactttgggaggccaacgcaggaggatcacttgagcccaggagtttgggaccagcctgggcaagaaggcaagactctatcactacaaaaactataaaaatgacccttgtatggtggcatgcgcctatagttccagctactcgggaggccgaggtgggaggatttcttaagcccaggagtttgaggctgcagtgagctatgattgcactgctgcacttagtctaggcaacagagtgagaccctgtctcaaaacataaaacataaaaaaaattgaaaaagtagaagggcttcacaattgcagagatgtggaaccaacctaagtgtccatcaactaatgagtgaataaagaaagtgtggcatatatacaccttggaatactactcagccataaaaaggaacaaaataatgtattttgcagcaacttggatggagctggaagccattattctaagtaaagtatgatagtagtggaaaaccaaaaactatatgctctcacttataagcaggagctaagctatgagtacacaggggcatacagagtatagctaagctatgagtacacaggggcatataatggactttagagactaaaaatggagaaggtaatagcggggctagagatttaaaaaaaaaaaaattacacattaggtacaatgtacactacacttgggttacaggtgcgctaaagtaccagaattcaccactatataattcatccatgtaacaaaaaacgtgtatcccaaaagctttgggggataaaaaaagaaagaaaaagaaaaaaaatgtgaaaaaaaaagtatagggcaagctttttgagcaagccaggtgggagaagcctcatcctcaggaggcaggaagacctggcatgtcctgtctgtgccccagctgtctccctctctgccattagctccagatgcctgtgagctgagtgtccagcctaatggaggctgtgaatacctgtgccttcctgctcctcagatctccagccactctcccaagtacacatgtgcctgtcctgacacaatgtggctgggtccagacatgaagaggtgctaccgaggtaagcagaccttccaggagggatggcccctggcagtgtcagaccctaccctgctgaaatcttcccttggcttctgggacacagtatgctgctggttttcttccatcttccctggttacttgttgccttttgggggtttctctttttt

SEQ ID NO: 1557 - DNA, 2300 bp, Homo sapien
tgctaaaagagaatgaaccagcggcagccctaagagttctgcattgggtttttttcttgaagttcctgtctctgtcctaaatctctgccattttctttgtctagttttcccattcctgctttaagtccctgcctgttcctcacctagttcccacccaggcttgtgggacctccccttactattagcttgtgtgcatgcccagctctgggcacaaatactacctaatggtgccatcactcgttaccaccaccctaggaaggttgtatagcagtcaaatctgattgggcctgcatatttcttagggatttcccctttgcccttcccctcctcctcaacatgcagctagctacattctgatgggagaactgcagagtgagcagtttctgggcatcttaaggggcattcctttctgcagaggcatttcccctcctctctgctcatatctagcatgaatgttttgggtggtctctaggtgtgagattttctagacttcccttttctcagggactcccccttctgctcatgtccagctgtctgcctactctagcagttgcacacacagtgctcaaaagtgtacatacacatcacacacacaacgcactgcacactaacacccacacagacactgtatagagccacccaatatagcccacagagatgacactcatacaacagaatatgaaccacacagagactacacacacagcatatggagtccacacaaagagcacgacctgggcagacctacacattgatcaattcagccagcagaattaattcattgtattcagttgtttatattgaacacctaacattgtagtagacactggggattcagcagtaagcaaaacagatgcaaatccctgtctgccctcaagggactcatattctaatgggtgagccaggctagaaatcagataaatacataaaatatagtgcatggcagatggcgataagggctaaggaaaaatagaaagtagagaatgggaatagggaagtccaggtgagcagggggttctagttttaaatggaatggtcagggaagccctcactgagaaggtatttgagtaaagaaggtgaaggggggtgggtgtggtggctcacgcttgtaatcccaacactttgggaggcctaggcaggaagatcacttgaggccaggagttcaagactagtctgggcaatgtagtaagaccctatatctaaaaaaaaatttaaaaactagccaggtatagtaccatgcacctatagtcccaagctactcaggagactgaggcaggaagatcccttgagcctgggagtttgaggtcacagtgagttatgatgccactgcactccagcctgggtgacagagtgagaccttttctaaaaaaaaaaataataataataataaataaaaagggagtgagggaggtgagacagtaagctaccatgcaattatctataggaacaagcatttcaggctgaagagacagaaaccgcaaaagccctaatgcaggagcatgcctagtatgttcaaggaatagcaaggaagctggtacagttggagcaaggaaactaggaagagatgaagccagagaggtggcttggggcagcccaaagggccttctagaccattgtaagagccagctctggatttcactctaactggggggaaaccattgagggctctgagtagggaagggacatggtgtgacattttattctgactgcagtattgagaacagactgtagaggacaagggagaaggcagggaaaccacttaagaggtcattgcaataatccagaagcgaggtgatggtggctgaacccttattcccacattattactgtgggaataatgaaaagtggacagactgcagatatagtgcaaaggccagccaacaggatttgcttatgaattgaatgtggaatgtggaaaaaaaagttacagcaactgaaaaaataagattgctacgtatgggcttgggaaagatggtgagggaagcaggtttggaggaatcttaggctgttttggacatgttatgtttaagaaaactggttaggtatccaagtagagatattgagaaggcagctggatatatgagtctggagttcatatgcaagttaaatacaatatacaacagataaattataacaatacagcagccataatactgacatgtagcccataaacccaaaaactgtaacacccaaactgtacaatatgtaactcatacattagtatatcacatataacgtgtaacctgttcttgcccccatatagaacacatgtaatacatgacacagattatgtacatgca

SEQ ID NO: 1558 - DNA, 2300 bp, Homo sapien
actcagagccgggcagggctagcaggaaagcgcggtctgctaaccagggtggctcaaaaaggtcttcactgtgactcggcagaaaagcggcgcccgagccccgcctgcacctaccaccctaaggatatgcgcgggggtgtggccggggcggggccggggcagggcagggcggtgcccccgcgcccagggaacccgaatactacacatccgtctgctccgcgattggccgctccggccacgggggcctatggggtggtcctcgcccagccaatcaggggccctggggagcccattcattcacaaaaactgagcaggaaaaggagcgcagtgcggcccggagctgcgtggaactttgaaacacgcgcgcgtcccgcggggccgaggcaagagtccgagagggccgtgtttcgggaagctagacctttgcagggactgccgcgtccccgcccacagctccggttcagtctccccagcatggtgcgccttcctcctccggcacactgcccggggctccgccccggccccaccaggacacgccagctttcctgcccgctccgggtcgctaagagccacccggccccgagggaggcggtgcccaggcggtttcccggtcgcaggctccggcggcaagtcccgcgcaggtggcagcgcggcggctgcagccacgtgcgcgccaagcatggtgccccccaccgttccttttctctccccgggtctgagctccctggcccgccactcacggcagtcgtcctcgtcgctgtggtctaagcagtcatcgtcctcgtcgcatctccacacagaggggatgcagcgctcgttccggcactggaattggtccttttcgcaatccttggccggccctgcgagggggagggagcgtgagctggatcagcggactcggccccactccccaccatgcagtccgggccacccggaaggacccgctggggaggaggaaagggggcgattatggagaccccgggggcttcaggcacactccatccaaagggagggcacgatggcaggggttccgtggatgtcgggccgctcggtggcacggcgagaccaggcacctacttaaagtgtcacacgacctgggtataccctccattcagacgcactcacccgcacacgcgacccatagtcagagatctgctcagatacagcccatagggagtccccgcgcccgcgcgccaggcgcagtgggagccgcaggcacatcaccctggcaggcagccccctctctctccgccgcgcgcaggggtctgcggaaacgcattgtcaagcggagaagccgcccggctctgctcattaccgccgcggagcgcgcgtgtcaaataaaccccaacggcgagaatcacacagctcatccggaaccatgaatggccgcccctccggcaaagttccccgctggccaagcccccctgcacccctcccccaagatccgctgcccagagggcagagccctcaacaccgaggcccgcgggggcggggggccgagggcaaattcaggaatagccgcttcgcgtggagcctgtccgcccgggagcccccgatagccccgggttctggacccctccccgctccggcctcccggccgcgctttgttggtggctagggcggagcagagccgagtcagagaccggctgcacgcaccttggccgccgagcagcggatcagccgctgccgccgcaagatgctggagctgcagcagcagcagcagcagcagcagcagcagcagcgccagaagccggagagggcccggctcggggaggcccatggcgggcccggggctccggccgccgcgccccgcgctccccgcgccgccgccgccgcgtctcagccctccgagtccttgccgcggcgccggggttgccgctgcccccgccgccgccgccgccgccgctgccgcccgccccggctcctcggctgcatttcaagcaggttcggtgacgctcggcggcggggcgggctcaggctgggcgcgcggccccggccctgggcggccgccgccagcgcgcgcgctccctcccgctgccgcctccgccccacgctccccctgccgccgcctcctcgccctcctccctcctgtctttcgtccactcttctctcagcgggcgctccacggccctgctctgggctcgcctgagtgctgggctctgcagacgcagggatgggccaggcgagcccctcaccacggaggtagcaggtccagaggaagcagcagaggcttcctggaggaggtgacaggcggatcagaggctgagggatgtctaggagtgagcctgggcgggagggga

SEQ ID NO: 1559 - DNA, 2300 bp, Homo sapien
gcctgcatttcgttgtctgtgtgctaatggtctgtctccccacaggtcagggacctctccggggctggcaccatgcctgattcaccttggtacccgcaggcccagcacagggttggcacagaacagggcctgaaatgcttgctgaatgactgaatgaacaagggacaggaggggtgatgatggcaggagcaccgtgccgggctctctggggatctaagtccctttctggtggggtggccacagatattgccgctgggctgccctttgggggactacggctcaggaggctgctgaggagacagggtggtttccaggccaagggctaacagcacctgcccatccgcgagggaggtgaaggggcaagaggggagggagggtggacctaacactggctcttggcacctgcaggccggttgttttgagtggccaatgccctggaatctcattctctaaagaaggttgtgtgggttggacccggctcacaagtctgaggctgaaatcgaatcccagctcgctctccgcacccattctccccagtgtgggtgaggcgggctgcagccctccagaggaagaggtgccttctccttcctgcagaagacagcaggggcggacagcgcgggcctaggtgcgcggcccctagcggcagggatggcatcccttccgtgccctccccttcccccccgcccggcccgccccacagacctcgtctttctccatcacagcgaggattccttgtcttccctgcgggccccccctggttgcccctctgactaggggcctggagcgtacttaacgacgatgaatagtctgtgcaccaggcccaatccacctgcctcacgtccccatgatcacatgagcgtgcaacatgcacagatgcacatggcacggaaaccaaaccagccacagggatttataatatcccagccggagcccatgacaggtgcaggggtccagccctgcgcccccagcttctccctgctcatccacatcttgggatctcacccctatccctccctcccccgccccacgcgcacactgcacaggcctgttcgtcctgtaacatcatttcccctcccgcccaggctcactcctagacatccctcagcctctgatccgcctgtcacctcctccaggaagcctctgctgcttcctctggacctgctacctccgtggtgaggggctcgcctggcccatccctgcgtctgcagagcccagcactcaggcgagcccagagcagggccgtggagcgcccgctgagagaagagtggacgaaagacaggagggaggagggcgaggaggcggcggcagggggagcgtggggcggaggcggcagcgggagggagcgcgcgcgctggcggcggccgcccagggccggggccgcgcgcccagcctgagcccgccccgccgccgagcgtcaccgaacctgcttgaaatgcagccgaggagccggggcgggcggcagcggcggcggcggcggcggcgggggcagcggcaaccccggcgccgcggcaaggactcggagggctgagacgcggcggcggcggcgcggggagcgcggggcgcggcggccggagccccgggcccgccatgggcctccccgagccgggccctctccggcttctggcgctgctgctgctgctgctgctgctgctgctgctgcagctccagcatcttgcggcggcagcggctgatccgctgctcggcggccaaggtgcgtgcagccggtctctgactcggctctgctccgccctagccaccaacaaagcgcggccgggaggccggagcggggaggggtccagaacccggggctatcgggggctcccgggcggacaggctccacgcgaagcggctattcctgaatttgccctcggccccccgcccccgcgggcctcggtgttgagggctctgccctctgggcagcggatcttgggggaggggtgcaggggggcttggccagcggggaactttgccggaggggcggccattcatggttccggatgagctgtgtgattctcgccgttggggtttatttgacacgcgcgctccgcggcggtaatgagcagagccgggcggcttctccgcttgacaatgcgtttccgcagacccctgcgcgcggcggagagagagggggctgcctgccagggtgatgtgcctgcggctcccactgcgcctggcgcgcgggcgcggggactccctatgggctgtatctgagcagatctctgactatgggtcgcgtgtgcgggtgagtgcgtctgaatggagggtatacccaggtcgtgtgacactttaagtaggtgcct

SEQ ID NO: 1560 - DNA, 2300 bp, Homo sapien
gcccgcctcggcctcccaaagtgctgggattacaggtgcgagccaccacgcccggcctcttttcctttcttttcttttcttcatctgctgcctctagacttcggcccacatactaatcttacagttggaatgaacctcagaaattccttatctcttccatttcccagataagaaagtgagactgggagataggattgactttcctaagaccacagagtggaggaggaggagggactgagttggataggtcagtttgggcagcaagacgggcttctatctttatcccacagtcccaggcaccattgtgcttgacacagaatccaaactcccagctgtggcctacaaagccctggtgatcagggccttgccaactccctccagcctcacctgaggcacccactccttccctgtcatcaggccccggcccaccttgattgccattccctttgccaagaatgcccttccgcctgatcttcatgggtcaggatccatcttgccattcagtgaaatgtcacctcctctgtgaggccttgcctgatcacctctacagttacccccattgctctcacctgggtctgttttgttttttccatagaagttatgatgacctgaaataatcttttgttttcctgcttttgtgtgtatctcttccaactaagacataactgcaggagagcagggaggaaccttatctgtttccactgtatccttgagccttgaagggcgtttggcacatataggtgaaaggacgcctgcatttcgttgtctgtgtgctaatggtctgtctccccacaggtcagggacctctccggggctggcaccatgcctgattcaccttggtacccgcaggcccagcacagggttggcacagaacagggcctgaaatgcttgctgaatgactgaatgaacaagggacaggaggggtgatgatggcaggagcaccgtgccgggctctctggggatctaagtccctttctggtggggtggccacagatattgccgctgggctgccctttgggggactacggctcaggaggctgctgaggagacagggtggtttccaggccaagggctaacagcacctgcccatccgcgagggaggtgaaggggcaagaggggagggagggtggacctaacactggctcttggcacctgcaggccggttgttttgagtggccaatgccctggaatctcattctctaaagaaggttgtgtgggttggacccggctcacaagtctgaggctgaaatcgaatcccagctcgctctccgcacccattctccccagtgtgggtgaggcgggctgcagccctccagaggaagaggtgccttctccttcctgcagaagacagcaggggcggacagcgcgggcctaggtgcgcggcccctagcggcagggatggcatcccttccgtgccctccccttcccccccgcccggcccgccccacagacctcgtctttctccatcacagcgaggattccttgtcttccctgcgggccccccctggttgcccctctgactaggggcctggagcgtacttaacgacgatgaatagtctgtgcaccaggcccaatccacctgcctcacgtccccatgatcacatgagcgtgcaacatgcacagatgcacatggcacggaaaccaaaccagccacagggatttataatatcccagccggagcccatgacaggtgcaggggtccagccctgcgcccccagcttctccctgctcatccacatcttgggatctcacccctatccctccctcccccgccccacgcgcacactgcacaggcctgttcgtcctgtaacatcatttcccctcccgcccaggctcactcctagacatccctcagcctctgatccgcctgtcacctcctccaggaagcctctgctgcttcctctggacctgctacctccgtggtgaggggctcgcctggcccatccctgcgtctgcagagcccagcactcaggcgagcccagagcagggccgtggagcgcccgctgagagaagagtggacgaaagacaggagggaggagggcgaggaggcggcggcagggggagcgtggggcggaggcggcagcgggagggagcgcgcgcgctggcggcggccgcccagggccggggccgcgcgcccagcctgagcccgccccgccgccgagcgtcaccgaacctgcttgaaatgcagccgaggagccggggcgggcggcagcggcggcggcggcggcggcgggggcagcggcaaccccggcgccgcggcaaggactcggagggctgagacgcggcggcggcggcgcggg

SEQ ID NO: 1561 - DNA, 2300 bp, Homo sapien
cccgggttcaactgattctcctgcctcagcctcccgagtagctgggactacaggcgcccgccaccatggccagctaatttttgtattttttttaagtagagacgaggtttcaccatgttaaccaggctggtcttgaacttgtgacttccggtgatccacctgcctcagcctcctaaagtattaggattacaggcgtgagccactgcacccggcccactaatcatatttttaaaataaaaacttaagtgagaggttgttagagcaaagcagaaacaaacctagtcctccttaaatggatgcagagcaaccagtgaagtcctaacaagccaagtaacacaggaaactttttactacttttactttcttattaagatgattttttttaaagcagaaaaagactttaaaaccttttttcgctttccagatctaataagccccccaatggtaaccatttcctattcccaggcagctagtgagaaacgcaaggtacaactacaatcacggactcaggaaaatcaaggtggacaccaggcgtgggcttctcccattctaccaacagaaagagagaaattcaaagaaagagcaatgaaaaatgcacaagttttagccacatattaactgtaactacctccttaaatgcgactgatctaattagaagcttttcagcttgttagtggcccattttttcctttttttggacaaagaagggaggagaggggaggggagggaaatggaggcagtggggtggtgggggggaggggcgggagagagagacagagagagagagagagagagagagagagagagagagatgcctcagggtgtcacaaatttgtttttaaaaaatgaattaatggccggacgcggtggctcacgcccgtaatcccagcacattgggaggccgaggccggtggatcacctgagatcgggagttcaagaccagcctggccaacatggcgaaaaccccgtctctactaaaaatacaaaaattagctgggcatggtggcgggcgcctgtaatccaagctactcaggaggctgaggcaggagaatcgcttgaacctgggaggcggaggttgcagtgagccaagatcctgccactgcactacagcctgggtgacaaagcaagactctgtctcaaaaaaaaaaaaaaaaacaaaaaaaaacaattaatgccctcgggtaaactatgacgtttgtgctaacttttcagatgtcccaagatttgggttgttttacaaggataacgaagttcatgatgaggttaagcaatcactgaagctagtgctagaaattttttttaatttaattttttagaaagaggggtcttgcagaattttttatttaattttttagaaagaggagtctcgctatgttgctcaggttggtctccaactactgggctcaagtgatcctcacgagtagctagggctacaggcacaggacactatgccaggcttagtgctacaatattctgtctattttactttaaaatattctaagtatgctcactttggaaggcatcaacatccagaaatgcattcctacatcaagactctcaagaaacgggaattactgtaagggcatacccttgagcaaccatcacactgcactgaactcttgagaatattctggaatatcctggaagcatctctgcagggcagagaagtgaactgccacagaaggagcagctttggggagaagaaatacagtttgcctcttacagtatttttctacaccgagagctacattcctcccgagttttaaatttgtggaccgttgaatatcactccgcctttcataaagttacaaataccttccgtcggtggcgggaacagagtttggaaaattacatgcctaagacttcagataagctaaatgacatacatgcaatagcatcccatgaagaatttattcaacccaatccattgcatctaattacccaaagcacagaaactctccaaactgtgcaccccccaaaaggagggaaaatgcaaggttcctgctgcagttcccgggacacactgcgagccgctttgttacaagtgtatccaatgtccccagaacgagggacttgtggggcgcggctcatcccagcgccacttgctctgcagctcccagaggtggtggttgtgttacgaaggctgaccctgccaatggccgacaaaatggtgcgcacccccaagtgctcgagatgcaggaaccatggcttcctggtgcccgtcaagggacacgcgggcaaatgccgctggaagcagtgcctctgcgagaagtgctacctgatctccgagcgccagaaga

SEQ ID NO: 1562 - DNA, 2300 bp, Homo sapien
ctagtgggctggctgtgcctcggaggtagcacagcagttaggctgagtgtatcagggagtgctcctagcctctgatacagtattccccacagacggggcagaaatgacctgtcacagaaatgatccatcacaagggctggaggcctgagtactcacagttaatatgcgcgtgtgtgtgcacgcgtgcatgcatgtgtgtgtgcacgtgcgcatgtacacataatgctagtgccagaaacctgtctcaactccaggaagaacgctactggtactacccagggccttagctagtaaccctgggccccagcccaaaccctgccctggggacctgcagctctcgagccgggtgcctgttaggccccactgttccttggtggaagccaaggctgtaggcagcactagaaggcccagggaacctcactgggatgggtggtggtgagggcccagcgctggaggagagtatgttctccacatctcatttggccaccagcagatgggacatggagcacaaacacatgaaagaagaggctggccacgcctgtttttccaatcgcatgtgcacacagccccgggccctgtggcgtgctaagatatatctaatgcctcagggtgggggactgggcacctagtgagtatgagggcccctctgccacggttcccagtgacaggggcactgaccgtcttgaccaggggccacatccacagcatgggtcctttcctcctcaaccacagggatctcagccagcccagaggacggagtcccaggcggcctctcctggggcactggggtgagtgctgctctgccagaggggctggggtgaggcctggcggccggtgggaactcaccatgcacttgttgggcttctcgcccgagtgcactcgcatgtggatgagcagcttgtagcgggcgttgaagggcttgtagcggcgcacgcagccagcccagaagcaggtgaagtcctcgcccttgcgctggtcgatgtggctcttctcgatgtgccgcaccagctcctcctgctgctcataggctgcacagcagtccacccagcggcacgcctgccgcccggccaccaccctgcctgccaggcccagccccaggcctccaaggcttgggccaggcggcaactgagacaggggataggggggcggcaggccctgctggtgaggcccaaagagctctgaaaactcatccgcgggttcctgcttcaggaagctcgccttccggcaggcttcaagttgcaagctgccctcatggctgtccgtcgatgcagggccaggccgggcccgcttggaagggccccccagatctcccgtcagaggggggctccggagtccatttacacaggtgaccagagacgtctgggaggagcggatgatggaggtgacgtcggaggaggcacagggtgaggaggaggctggggaggtggggggtaggcccaagacgcagcaccgcttcaggctgccctcggggaggtgggtctcgggctggaggcccaggccagagctgggttcgctgcccagaaggtagcaggaaggcgcaggggtggcgaggcttcggcccgggaggtccaggtctgggtgcaggccagtggccagcgggccccgacagtgggcagacagggatgtgcgggcctctgccatggcttggtagtcgggcaaggactcctgtttgatgtgttgtgtggttgggaggctgccgttcacatacgtggcctggggtctaggtgacctggaagacagtgcccagagaggtcatgagaggctgggctcgccacagagggaaggctcaggtgggggcagacagggaagctgaggatcaagggatggacaagcccagggcaggaggcagaggctgagggctagaggcagagaaagagcacctacagactggttgtctggaaaacaagcagagtgtaaaggaaaatggggagagagaggaagagaagggctggggagggaaagaagaggcaggaggccaggcacaatggctcatgcctataatcccagcactttgggaaggcaaggcaagaggactgcttgagtccaggagtgttcacgaccagcttgggctacatagtgagactccatctctacaaaaaaatttacaaattagccaggtgtggtggtgtgcacctgtagtcccagctactcgggaggctgaggtaggaggattgcttgagcccaggaggttgaggctgcagggagccaaggtcataacatgcactccagggtgaatgtggtgagaacaccaggaaggaggaccttgcatcgttttaccaaagctcagcacccccacccag

SEQ ID NO: 1563 - DNA, 2300 bp, Homo sapien
tcacccagcacagagtgaaaagcatgttgagtgaaatcactgactttccattcagactgcagttcctgagccctcagagacatgcgatctgagatccctgcctctcccctgagtctctgctggagaaacactgattatccccatctcagcagctcccttccagggagccctgtcccttcccctcccctcctgtacctcatgactggagctcgggctgctccagttgcagggagccagagatggaggggctggagctgcaaggccatcttgggaaactgagggacaggtgatgaccccacagctctggctgcagagagccccaagacagtggtggtgaatggcgataagagctcccctcaccctgccatccccttcgcagagggctgtcacggggccatctcactcgatctggcagccatcctctgaggtagagagacttagccctcattttacaggcaaggaaactgaggttcagatgggatgaggtggcgtggggtgtcctagccagacttcaggcatagcaccaggctccctgttctgcctagccagccaggggggtgtcctaactctcagccctgcctcactttcctgacctttccccttttcagagtgctctggtgacaggtaggcccttccgtctctctctgcaccttacctggtccccccactcagaatggtggaagcttcagtgcaggaatccccttgtgttatttaagcctggcctcctgcgcagtggtggagggaatgttccacatgtgggagaggccctctgggcacctgtgtaccacctatgtggtgaagacagccacctggcaaaccccagctgtgcccacatacaccaccctcgctctcatggggaggatcctcctgatgtcccagaggaggagagagacccaggatggcaaaggaccttgcccacgtttgcacggctggatgtggctgagcctgatctcaaacccacgtgctcccatgggctgccctgcctggcctgccccatggcttttccccaaaatcgcagtttcatgcagtcacattgtgagggcctgaaaccctgggacccctcagaagcttttcctcagttcctcctgagacacccccaccaggactgcacttcagactcccccatgcactgacattaacagtggaaaggccaggctgcttggggcgaagtgtcatacaattagcatttgtagaagttaagctagattacaaaaattaagaaagatttaaaggacatgtaagtggaatttaatataccctggacctgggtgttcctcaaaatgccagcctcagccttcttcctggagaactcactagaaggccacggagagggagcagggcagccccctgggaagcaggatggcgtggcatccagggctgggtgggggtgctgagctttggtaaaacgatgcaaggtcctccttcctggtgttctcaccacattcaccctggagtgcatgttatgaccttggctccctgcagcctcaacctcctgggctcaagcaatcctcctacctcagcctcccgagtagctgggactacaggtgcacaccaccacacctggctaatttgtaaatttttttgtagagatggagtctcactatgtagcccaagctggtcgtgaacactcctggactcaagcagtcctcttgccttgccttcccaaagtgctgggattataggcatgagccattgtgcctggcctcctgcctcttctttccctccccagcccttctcttcctctctctccccattttcctttacactctgcttgttttccagacaaccagtctgtaggtgctctttctctgcctctagccctcagcctctgcctcctgccctgggcttgtccatcccttgatcctcagcttccctgtctgcccccacctgagccttccctctgtggcgagcccagcctctcatgacctctctgggcactgtcttccaggtcacctagaccccaggccacgtatgtgaacggcagcctcccaaccacacaacacatcaaacaggagtccttgcccgactaccaagccatggcagaggcccgcacatccctgtctgcccactgtcggggcccgctggccactggcctgcacccagacctggacctcccgggccgaagcctcgccacccctgcgccttcctgctaccttctgggcagcgaacccagctctggcctgggcctccagcccgagacccacctccccgagggcagcctgaagcggtgctgcgtcttgggcctaccccccacctccccagcctcctcctcaccctgtgcctcctccgacgtcacctcc

SEQ ID NO: 1564 - DNA, 2300 bp, Homo sapien
cgatcttcctacttccattccccctaaccccagttatttttacgcacgcccccaaacatgtccaaaataaaagatctttaagtcaggattccatttggaaagggcagaggagaataaagggatgggaggaagagcctctttctttgtaccttaagctggtctctctggtgaagcttttttccaagaggtttcacaacttttcttcatagcctcccagtgaggctgttgtggtgggatgtatcccactcatttgaagggtgaggaaactgaggcctgaaggtgggaaagtgtttggtatgtgtagggcagtggttagggaagccacagctctggcctaacctggcctagggagaaagggaaggctcagggtcctgggcttggagaggtttccctgctggcctctgtgttgctataggcaagcttttcctcacagtgcagtcaccaagtggcccgagacaaacccagctttcccccagttcttcagcgtccttaaaaatgctgcgaggaaacggcaccttcttactgcccctactcccaccgaaatagtcccagaccatgtaaccctttgaatatttggtgtctagctccaagttctcaggcttattggaaacagacagaaataccaattgaaaaatatgtattgactgtgctgggaattgtgagaccccaccatctatgatctgtggcacttgggggaatcgattttactcttctgagcctttggttccttcgtttgtaaatttaccctgagacttaattcgcaagactgatgagatcattagtgataaagaatgtgcaagggccacctcagtgcctggttatttttaggattactactgtaacctgtttcacattctcaacctctgggttttcatttgcgtgagaggtaatggtgcctaccttgcagggtaaataaaacaagagttgtaagaatgccttataagctaaaaaggtagaaggaggcacttttattaattcgtgcagggcccatgcaagggtcagtgacacttgagataaaggggacagagtgagaaggaagcaaggttacatttttaaaatgctgaatgtgaagggtgctaactgtggtgtgctagccaggggaggctgagaggtgccaagcttcaggtcttttgtggccacagctgcccagtgaccggagagaagacagtatggctcagcctggggtcaggtttcagatgctctgccgcctgcctcagacagtccctaagcagaggaagagagtgggttcttgaacctagtagtttatccataaatgtctggggcctgtgtatttgatctggaatcgggaggcactgggatggtgtgatgtcatggactaacattgtcatcatttacaataagaatcatgatctgtttatggcagagtcccgtttatccagattccaaacagctggaaaagccaaattgccagatgctgcatttttctttcctattattaaacacccgacactctgcttttataagtcctgacaaggaaagaaggtaaacatctgggctttatgcaggcggacagctttgtggtgatggcctgatgacgcttgttctctgtgcacggtgctttacagtgttcagagcgtgttcccacacatcctcttgtctgccctcacgccagctgggctctgcctgccttgggggctcttgtgagggagcagatgtagaagtctgtaaagtgctgggcagatactggctgttattaatgtgattcccattttatagatgcagacattaaggttcagggatttgctcaaagctgcagacagtaggtggcagtttccaggcttccagctgcaaatatttgattctggttccacaacttgtaccttctacatgtgtgtgttggcggccgagagctggcattcacacgaaggccttctgaacgttcccagagaatttaaaaatgtcttttgcttttggtatttctactgtctcacatctttgggaattggtaactagtatctatgccatagttagaaaactttatagtttaccacatgattccatttgtccagagttgctgttcccacaccaaaccagataatgaggtcactatttaatttacagtgactcactgggccctttcactgtgtactgagactggatgcatccttgcaataaaaaagaggttgatcacgacaaatgtgaaccccgccgttataaaaacagccatcatggctgtaaatgccaaaaagcagtcagtcttgtaacttgaaaaaaaaaaaaaaggaattgtagattgtgcgcatggactcggagtgggggcggtggacagtaagtcatga

SEQ ID NO: 1565 - DNA, 2300 bp, Homo sapien
tttggaagttttcagagtatagatagtattcaaagcatgagactcgatgcaaactcttgaatgtaaatacagaagaaaagagatatccaagaaaggggccctccaatggctaaaagtttgggagataaagaatagcaacagagactgaggtgggtagaaatccaagaaaagaaagagtttcaaggaggagaaggtgggagtgtcagatgctgctgatgggtagcatggggcgggaactaagaattaactgttgagctagaaatgcggaggtcactgagtccttgacaagagctgttggctggagtagtggggacaaaaaaatgcatgagttcaggagagattggtagacgaattggagaccacaagaaaaaccacatttttcaaggaatttgttgtaagtggaacagaaaaatggggcaatagctgggaggaattgaggggtcaaggaacttttttaaaaattttgagatgggttcttggtctgtctgttgctcaggctggagtgcagtggtatgatcatggctacactgcagccttgaactcccgggctcaagtgatcctcccacctcagcctcctgagtagctgggactacaggtgcctgccaccatgcctgcctaatttttttaatttttattttttgtagagacacagtctctatgttgcccaggctgatctcaaactcttggcctcaagcagtcatcctgcctgagcctcataaagtgttggaattacaggcgcgagccaccacgcccagtcatgtttttattttttaagatgggagaaattataacatgtttgctgatggaatgactgattaatagggaatgaatggttaaaggcatttcataaacttcgggatcccatacggctctatatgccattagtactgccgtgtcactttctacccaaccagacacgtgctgcttgctgcagccttctgactagtcatgcagctttgggtgagagtatggtaggagcagattcacttttaagttagttgggttagcttttagctgatactaagaacactttttcccccggaattgtcaactagtagaaaactactttgtgtcttaagatattttttttcctgtaatctcagcactttgggatgccacagtgggaacattgcttgagcccgggaattcgagaccagcatgggcaacatggcaaaaccccatctctactaaaaatacaaaaattagctgggtgtggtggtgcattcctgtagtcctagctacttgggaggctgaggtaggagaatcacctgagcccagaaagcagaggttgcagtgagctatgaatgtgccactgcactccagcatgggtgatagagtgagaccctgtctcaaaaaaaaaaagatttttttttccctgtgagagaaacatactctttttttgggtattaaaaggttaaagggcaggacagttatagagaatcgagaaataatgtggccttgaaaaatatctccagtctgtaatcctagcactttgggaggctgaggtgagaggattgcttgagtccaggagtttgagaccagcctgggcaagatggtgagaccctgtctgtacaaaaacatttaaaaattaaccggacatggtggtgtgcctgtattcccagctacccaggaggctgaggtgggaggatctgttgagcccagaaatttgaggtggcagtaagctgtgatcataaaactgcactccagcctaggtgacaaagcgagaccctgtttctgaaataaaaaagaaaaaagaaaaaagaaaaaaatttcaccaaaaccacttagaattaattaatttttttttatgtcagggctctaatttgggggttaaacgtgtatacatgggaatacagtttagttggctcatcttggttgtccaatttgtagcacaaaggtatttagttacatggcgtattgtttaagtattattattctttgcccacaagatgtgaagtgtttcattttttcatttaagttactgtctggaagaactaggaaatgtgttatatttgaatagaatttaaaaggtaaatgtgttaattcttccttttttccaactcagattaagaatttcttgtcaaaacgggtgctgataatgtattttttcagtaaggtaagaatatgtggttatagcgttgggaatggggagggaggaaatgaaatatgaaataaagtagcagataggatctgacttgtaaatattttatagcttaatcctagcaagctaggcagctttgcatagtgcttcactgaacctccgttttaacaatagttgccctagacacacatctcacttc

SEQ ID NO: 1566 - DNA, 2300 bp, Homo sapien
tgggaggccgaagcaggtggatcatttgaggtcaggagtttgagaccagcctggccaatatggcgaaacgccgtctttactaaaaatataaaaattagctggctgtggtgttgcacacttatagtcccagcaactcaggaggctgaggcaggagaattgcttgaactcgggaggtggaggttgcagtgagctgagatcatgccactgcactccagtctgggtgacagagtgagactccttcttaaggagaaaaaaaaaaaaaaagaaaagtcatataatgaaaatttggtacttgggatgtttaatttcttatatttcttatggtggttttattaagaagatggaatccagctgggcgaggtggctcacatctgtaattccagcattttgggaggccgaggtgggcggatcatgaggtcaggaggtcaaaaccatctggccaacatggtgaaaccctgtctctactaaaaatacaaaaattagctggatgtggttgtgcatgcctgttatcctagctactcgggaggctgaggcaggagatttcacttgaaccagggagtcggaggttgcagtgagccaagattgcgccatagcactccagcctggccacagagtgagactctatctcaaaataataataataataataataataataataataataataataataaaaagaagatggaatcctaatgcaatgtgtttgtttttgtggcttgtgctggagtgacaagaaaagttccttttgtttttgtataacagactctattactaaattggagagtcataagatgacttttgaaaaagctgtttacagatcagatttatagatattctgggcaaattagcctttggtgtgacttttgttaacttgaaagaactttcaggccaggtgtggtggctcatgcctataattctagcactttgggaggccagtgcaggaggattacttgagcccaggagttcaagaccaacctgggaaacatggcgaatctgtctctacaaaaaataaaaaaattagccaggcatggtagtatgtgcctgtgtcctagctactcaggaagctgaggtgggaggatcgctggagccccagaagttgaggctgcagtgagccgagattacaccactgcactccaatctgggctacagagcaagatcctgactcaaagaaaagaaaaggaaagaaaaagaaaaggaaaggaaaaaactggggaaaatggggtaaggttaatatttttttcctgtatatgttcacaatatagatttggtatgttcagtcaagtaatacttaaaatagtaatgcagtaaaactggatagattctaatgcagtaattaaaattgccaattagaaataaaatgtgaattgatgagttcattcaaaattgcttagagttagataaattgacgttgaagatgaagatattcatggggggggaaaaagagagactatatcgatctgacagaagaagatgtataaagctctttgagtggagcttgaatgcagtagtaaaatcgaatcttgagactataatcataaatggaaacaatctactgagctttgggtaaatgcgttaaacaaaaatttggtatgtgtagaatttgaaagcgttgctgctagcctgcttggatcaggttgcctcttcagcactggatctgttgttttacagaagaaactgcttttcagacaccaaaatctagccagatgcctcggccttcagtgccaccattagttaaaacatcactgttttcttcaaaattatctacacctgatgttgtgagcccatttgggaccccatttggctctagtgtaatgaatcggatggctggaatttttgatgtaaacacctgctatgggtcaccgcaaagtcctcagctaataagaagggggccaagattgtggacatcagcttctggtgagaattatatattttttaagattttaaatgtcatgttgcagaggatcagacagcctaagttcttatcttgccttttcttttttaaaaatagatcagcaaatgactgaattttctaatccttctccatctacctctattagtgctgagggtaagacaatgagacaacccagtgtgatttattcatggattcagaataaacgtgaacaggtaggatgatatggttataggatttatatttgcatgtaaaattgagaacattaaggatctcacatgagtaagtcatcaggaataagaagcttttttttttttttttttatgcttcgtgtattgactcaaatgaaacagccaatatttgactggtttgagctatacacattgta

SEQ ID NO: 1567 - DNA, 2300 bp, Homo sapien
atatagtttctgaatactataattatttgctgttcttcagcttctgaaattccttaaggaagaatcagtcgtaatataagcataaaagaagaccagggctgggtgcagtggctcatgcctgtaatcctagcactttgggaggtcaaggtgggcagattgcctgagctcaggagtttgagagcagcctgggcaatatggcaaaaccccatctctactgaaaatataaaaattagccaggcgtggcgtgcctatagtcctagctactcaggaggctgaggcacaagaattgcttgaacctgggaggtagaggtagcagtgagctgagatggcaccacttcacttgagtctgggaggcagagcaagactcttatctccaaaaaaaaaaaaaaaaaaaaaaaaagagagagaagtacatcttttatttttttctttttccttagattccttctaatcatttatcttgttttccattggtattttaggggcagagactgagaaggagagagaggtagacaacctttgtttcagaaaacgtgtagttttttcaagaaaagacattttttttttaatactttaagttttagggtacatgtgcacaatgtgcaggtttgttacgtatgtatacatgtgccatgttggtgtgctgcacccattaactcatcatttaacattaggtatatctcctaatgctatccctccccactccccgatttttttttcttatttgattcctttttcttagatcaagcttgtccaacctgtggcccaacataaattcataaactttctttaaacattatgagatttttttttgcgattttgttttctttctttttgttttttttttgagacagagtctcactctgttgcccaggctggagtgcagtggtgcagtcttggcttactgcaacctctgcctcctgggttcaagtgattctcctgcgtcaacctcccgagtagctgcgattacaggcatgtgccaccacacctggctaatttttgtatttgtagtagagacggggtttcaccacattggtcaggctggttacgaacccctgacctcaagtgacacacctgcctcaggcctcccaaagtgctaggattacaggtgtgagccaccgcacccagccctttttcttttcttttcttttttttttaagctcatcagctatcattagtattttatgtgtcacccaagacaattcttctttcagtgtggcccagggaagccaaaagataaggcacccctgtcttagatcattagaattttcaggttcccactaaggaactatttagctggttcagctttcttgtctttcacataattagagaggaggcatgacttactgagggttgtacagaaagagggagcactagaactcacaattcttgattcctaggctagtgtcttcttcactgcctcccatttttttgcaaagagcatttttaaaaattcagtgcaaaggcagtatgcattatctttaagattggaggctctgaagccagcctgcctggattgatagctcagattttccttttgctggttgataacattggttgttatttaatctctctgtgccttgttttcttcatctctaagatgagggtagtagtaaaaactcccttacagggttcttatgaggtttaaatgaattcaaatatgtaaagtgcttaggacagacagtacctggtacatggtaagcaacaaaaaaatgttagctgctattgttactgtgtttcttgtactttcttcatctgcatagtgcttagtaccaagtatggattgatatggttaattttcttatttctgattttatatcagtgagatgttgaataatataaatattaattttttaacatctgaaatagttgatgtttttgcttctgcaatactctttgtcttcttatacaataattatgttttctatgtagactgttacagtaaagtgcttgctttaaggtgatgttgagtgtatcatttgatttgaatgtgtcatttgattcttttttttttccccacagcaatacaagttcttgcgttttaggagatctctgctcttattagttaaacacagttgtgtggaatcactgttcctggttagaaatttctgcattttatattattttcttggtaagaatttctgctttttgatacagtgatatattatctcatagcccagaaaatgtcagttacaaagtcattcttgtgtttttgtgttttctacagttataggtatgtgattagctcaactgattcattgtttaaattgtcaaagagaatgtatttaggaaaatattgt

SEQ ID NO: 1568 - DNA, 2300 bp, Homo sapien
gcgatggctgatgcctgtaatcccagcactttgggaggctgaggcaggcagatcacctgaggtcaggagtttgagaccagcctggccaacatggcaaaaccccgtctctactaaaaaatacaaaaattagccagcatggtagtatgcgcctgtaatcccagctactcaagaggctgaggcaggagaatcacttgaacccgagaggcggaggttgcagtgagctgagatcatgccactgcactccagcctgggcaaaggagtgagactctgtctcaaaaaaaaaaaaaaatagatgtggcttaaacaataaataattgtctctcttgtgtaaatgaaattaggaggtaaaggcaggtagcctagaactgatatggttgccataaataatcaagtctcctttaggctcagtacttcattttccctacagtgtgaccccctttctgtggtccagtatggtgctagagctgcagccaacacatcccaaatccaggcagctgaatggaggatgggattaagaagaggcaaagaccatcatgcagtagctcccttttaagggggtttctaggaagctaccatgcaatactttgattatattttattggcctgaactcagtcagctggccatacctagctgcaaaagaggctgggaaatataactatatgcccagttaaaaaactgggagttcaattattatgaaagaaggggagaatagatattgaggcagacaacgagtagtctctaccacaagaaccttagaacctgaggtgtctttatgaacacgcatttggactgattttttttttttttggacagggtctcactctatggcccagtctggagtgtgatggcgccatcactgctcacttcagcctgaacctcccaggttcaagcaattctcctgcctcagtctatggagtagcttggactacaggtgtgcaccactacacccggctaatttaaaaaaaagtttgttgttgttgttgttgttgtttttgtggagatgaggtctcactatgttgcccaggctggtctcaaactcctggcttgtgatcctcctgccttggcctcccaaagtgctgggattacaggtgtgagccactgtgcctggcctggactaattctttacaagttttctccaccaccggatagatctcttcacggcagagacttgatctatcagttgtattcccagtttgtcctacagtgctttagacatgattgatagtaacatgattttggaagtgaataggatataatcttaaagcattcaggaagccattgttagcaaacgttgcagagcagtaggtgtgatctcaattcctctcaccagcctatgcatttccttagtcagtaaatcactgaatctatttctgtcttgagtattgcatgttgactgtggcatgtgattgagcataaaaaggcgttagcgatatgcatccagagatctcactgaggtctaaagcactgagaagacttcattaggtgaaacttgggttggtgaaacaccttttttcttactggcagtatattaatgataacatttgtatagcatattatttacatcctcacaacatcaccaggatatttttattttcatccttatcttactgttgaagaaatggaggctcagagaagataaaaatattcaatttagcaagtggcagatctggaagtagaaaccagattttatgaaaccaaaggcatctctagagaattttttttttatttcagtaaaattactgcgtacctattgtggagaagaccaccacatcctttggtttcacttttaggtgacttataaagtaatagggagaaatgagggcagatcattttgctagctctaactgaagaattccagtcaatcaatactgtggctgttatcggctttataaaagactactattcccagcatgcctcaaggcacctccaggaagaccttgactcccagcattctgtactttggaactccgagtcccagaatgcaacattcctcctacttcctctcagggggccgtcgagactacagttcccagcatgcagcgccgccacctgcttctggcgccccgctggaccctgcttcgaagggaccgtttggtcgccagagggcggttcctggagttacagccgcgtttgcgggacgtgtctgcgcggcagtcctggcctgttgagcttgtccagacgaagcctcgcagggatgggttggagcctgggccgggcttcgctcaggcagcgtttgaggcagacccagcagggtcctcctggggccttcctgcctttgaactgcggtggcgggcgggcg

SEQ ID NO: 1569 - DNA, 2300 bp, Homo sapien
ctgattcttcctaactatgagcatggaatgtttttccatttgtttgtgtcctctcttatttctttgagcagtagtttatagttttctttgaagaggtcctttacttcccttgttcctaggtattttattctttttgtagcagttcattcatacaaaagaacgagagttcattcataatttggccctctgcttgcctgttgtcggtgtataggaatactaacaatttttgcacattgattttgtatcctgagactttgctgaagttgcttaccagcttaagaagcttttgggctgagatgatggggttttttagatatagaaacatgtcatcttgcaaacaaaggtgatttgacttactctcttcctatttgaataccctcttcctatttgaataccctttatttgtttctcttccctgattgccctggccagaacttctaatactattgaataggagtgataagagagggcatccatgtcttgtgctggttttcaaggggaatgctttccttggttggggatgggtgttcctttgtctccgtgctgctcctgggtgagccatcgccccaccctgcttttcttcattctccgtgggtcgagctacttgcctagtcagtcccaatgcaagaacctgggtatttcagttgaaggtgctgaattcattcaccgctttcactcctctctgtgagtgctgcagaccacagctacttctaatcggccatccgttttcctttataatgaacaaaaaatatctgcctatagcacctgcccttgtcctgcaaagcagctcagtgttcaccgtactttttgctgtatgaattcccttcggatatctgaagatgacaggcacaattcctggcattgggcatgcattctgccaccaaagagctgtgttgttgggatgggtatggccctcctcaggtgcctcttctcaataggatttttttttttgtcagagtagtaatatttttagtactttagagtgagtcaatatatcagatttttgagaattcaggtggcaatagtagggaggattgtggatggatgggggaggaagagatatttacactgctggatgcagtggctcacgcttgtaatccccgtgctttgggaggctgaggcgggagtatcacttgagcccaagagtttgagaccagcctgggcaaaataatgagactctgtctctacaaaaattaaacaattagctgggcatagtggtgtacgcgtgtagtcccagctgcttgggaagctgaggtgggaagattgtttgagcccaggagttcaaggctgcagtgagctatgattgcactactgcactccagcttgggaaagagagtgagacgccatctcaaaaaaaaaaagcgaaaagatatttacactgactgccttctgtatgtgttgtatgtgtgtatatgtatttattattgtacataattctatatactgttgaatctagataagggaactaagcccagcaggagtctagtgatttgccaaagctcccctcagtggaggggccaggatttgaacccttttggtgtgacttcaaaaccaatgcttgtttttctaatcaggctgagagttgcgaattggctatttcagagttggttattgaatgtggaagagcctattgtttcaaacgttttgcttttccattagatcagatccctcctgcaccccacgcagctggaattaagaaattgcttatgtgttcattatgttttattttatttctgacagttacttgctggacagaagaaaagctcccccttctggacatttgaatactaccaaacattctttgatgtggacacctaccaggtttggaaaccaatttcacctttccttttacgggtaaaggagacttgtttctttaatggttgaacaaccaaataatgtgaaagcctttatatactgaaaatggtcttacaaaagtaaagggttattagcatttgaaaatactatcataaaagctctaatgactgagtttcaattttgtagtagttgaatttattaaacttaaaaaacttcagtagaattactgctatgatgttttccaggtctttgacagaattaaaggatctcttttgccaatacccgggaaaaactttgtgaggttatatatccgcagcaatccagatctctatggtatgtttagtactgatttgtttaccgtatttcagttgaacttgggtgagtgtgagggttgcctggaaatgtggagaactgcactattggtggggcatgccatgtattattagacttttctgaacttcagtagcaacccttgcaagtaattt

SEQ ID NO: 1570 - DNA, 2300 bp, Homo sapien
gccattccaccatcctattaggccacctactattggatgactgagtcacatggtaagaccagtgggtaagacccatggttatgtgtcactgttgcatgttctttacaattaaattggtcccttagtccaaagcaatgttgtgcaggtaatcattgcaggatccgtaagcaagaggactttgctttcctttaacaagggggaaaggactacttctgccacagccacctttcccttgaaagattcaagggaaactggaaacgagggatggtcaagtctcaggctttcctacccaaatatcctcatcccagttctcaggttcccattcattttctgacaatgccccagctttgatggaggagacctacagaggctgtgcattcagtcttcgttgaaactttgccacccttacaattagatcttgggcctgattttcagtccagtctttctcaaggctatagaagaataagaatcttcaaagctgccatagaggctctctagctttcacaaagtgcctcaagttgacagttggctgttctaagtctgtcattttattttcaaggtttccaatggagttaagaacacccagtccattccatagtccttataattaccattgtcctcttaatgttcctgtgccacagccactagataactcagcaccttatcttctacctgcacgttatcccaatcaactgcagacagacaccttagtaattgtgatgccattctattctaagtgttatcacaccaccaccacccccctccttctctctccccttaacaccagcaatatatttgttgttgccatgtgactggtgcgcagttcagttagaaaatgccaacctaaggttttattttctggggccacttttggtaccaacatgccttcatattgcttcctcatatgagtagtttattggcaagtatgaatccaagcaccaggagtgaagtacagggcttgtatatcagggaaggaaggagacccattgcgaagatgcattgtcaaatgcgtcacttccaaaggcatttggttgcttaatcctgctaggtagtttgaaagctatatgaaagggcgcctgagggggaaaaacaggaaaagcatatattcatcaagtgttgaccccattggtcagagatttgcctcatgagacattaacaactctctacccctacacttctgggatgcacctgtctgggtgctgattggctccagcaaggtcccatggccccatcgcatgaagaaacaagcctcgaagcagaaagtgagaagcctgaggcatagactggaggcaagctcactcaggttatatctgctgacgctggaataagatgagtggcggtgaaataagcagcaggtgaggccaagatgatctgaaatgggacataagaggtggctgatatactagcacagctgaattcatgaactgagattcattcctggtacatactcaaccaaaagtgccctgcacatgctctaagcctcagctttctctttgtaaaatgaggataatcaccccaagatagcaggattgttctgagaattagagatcctgcatgtacaaagcctgatcatgatcatcttggggaaaaaaatacactatatatggctattattagatgtaaagtctttccaagcgctcacttactgggggtgctcatacgaacagacatcgcgctttcgatcactcattcagaatgtaattgactcatcatgtactttctcaccagtgaaatttttgtggccaaaagaaactgagggactggtgacgcgggtgacttaattttttctttcacaatcgtctttcatcacccgattttatatttccttaggaaaagaggtataaacacacagtaagaaaaccctaaactcgagaattttctacgttccctggagcaaggccagcccaagtagtcacactcagcgaccccaccactccgccctcgcctgtctctttaagaactcgaggctcagcctcgggagaagggcgggcgggagcgggctctgcgcgccgcagcacgcaggtttctctgggagctgctgtctctttaaggaggcggggctcttcccggaggaggcggagaggttccgccccccggatctccggcttccggcaactgggctggaccgaaaccggcgcggagcaactgaggcccgagccttctcgggacccgggggacgcctaaccccgcgaggtgaggctgccgagtttgcgggacctgtacgaggctaagggggttcaggatctcctgcccgcccgggccgccgcggcccagctcctctccctgaaacactgcctctg

SEQ ID NO: 1571 - DNA, 2300 bp, Homo sapien
gaaacctacacacatagaatgtgtgcctcctgcgtcacaagtttaagttctgcttggttggagatcctggtcccagggaagcagggaaggcggagagagaacacttccattccagttacagttccactgaattggaagctgtaactaccacttaggcatttttggcttctcataccactgcaccagcaggtaaagaaaagagtgccggctgggcgcggtgtctcacgcctgtaatcccagcactttcggaggccaaggtgggcggatcacctgaggtcaggaattcgagaccaacctggccaacatggcgaaacccatctctactgaaaacacaaaaattagctgggcatggtggcacacgcctgtaatcccagctacttgggaggctgaggcaggagaattgcttgaacctgggaggcggaggttgcagtgagccgagattgtgccactacactccagcctggacaacagagcgaggctctgtctcaaaaataaataaataaagagtgacacatggtggggaaaatcagccctgattactttaagaagttgggggctgggcatggtggctcattcccataatcccagcattttgagagatcaaggaaggaggattgtttgaggtcaagagttcaagaccagcctgggcaacataaggagaagctataacagtcacaaaatttgccgggtttgggtggcactcctgtagtcctaactactctggctgaggtgagaggatggcttgagccaggagtttgaggctgcagtgagctatgatcacaccactgccctccagcctggtgacagaggaaggaaaccccgtctcaattatttaaaaaaaaaaaggtcttgggtgtattttaaaacacttcccaactctgagctctatgattcttctttcagtttctccaatgagccatgctgtctctggcttctgggcctttggccatgtggttccttccaccaggacactatccccactttagccagctgactgcttgccgtctttctggtttcagcatagaaatcacttcctcagtgaagtcctcttgacttctctaaccagaattagcttccccttctccctgctctcgtagcccacgcacaccctccgcctctggacttcatttaggaaatggtagttttttgtttacttgtctattccccgcactagaccatgacttccttgagagaagagggtgttttatttgtcactctatgcccagtgctaaggggagttgcaggccccaggttttgttagaaatggtcccatttctgtctctgccctgggaggtttgagatccatatcccctggggagggctctgactacagaaatagtcaaccaccagctagaagccatgattgggggccgggtgcggtggctcgagcctgtaatcccagcacttttggaggccaaggcgggtaggtcatctgaggtcaggagttcaagaccagcctgaccaacacggtgaaaccctgtctctactaaaaatacaaaaattagccaggcgtggtggcaggcgcctgtaatcccagctactcaggaggttgaggcaggataactgcttgaacctgggaggcagaggttgcagtgagccaagatcgtgccactgcactccagcctgggcgacagagcgagactccatctccagcaacaacaacaaaaaaccatggatgtttgttgggaaaacaaagatctttgttgggaaaaacatctttcattagtaaaagaagagtttgtgtataaagaataactaatagccaaatctactgacttgtgagagagcatctaacaggttctctttaagtgtggtctttttaagtacttgttttttaaaaaattaatcagagggagaatttaagatgtggaatctaccaatccaagaatctctcaaaagctcaggcaaagaattggaaatgataatgattaaaacagacctttgtgcacctggttaggaattttctatctcatgacagaaaggcaaacatcttctgacctgactccttcccctgacccggggttggctgctcctaccctgcaccttcattcagctccgcccagtgttgcctggctgcagcctctctgcccatagaactcagagcttactctggctttgccgagatggggctgccccagccagggctgtggctgaagaggctctgggtgctcttggaggtggctgtgcatgtggtcgtgggtaaagtgcttctgatattgtttccagacagagtcaagcggaacatcctggccatgggcgagaagacgggtatgaccaggaacccccatttcagccacgac

SEQ ID NO: 1572 - DNA, 2300 bp, Homo sapien
ataggaaagaatgtactctccaaatgttcagttcttttcttacctcacattcttaagttttctgagagaagcaaacacatgctttaatacaaaactcatttcacaccttctatattcaccattacccttcctatttcctgttttgggtagaattacttaagtagaaacggcagagacttggttttctttaaggttctttgttgcagttaatgagaagaggcaaccaaccttagagaaatccatacaatgccaggcctggtgactcgcctgtaatcctgacactttggaaggccgaggtgggcgaacagcttgagctcacaagttcaagaccagcctgggcaacatggtgaaaccccaaaaccctctctactaaaaattcaaaaattagccggacctggtggcaggcgcctgtaatcccagcactttgggaggcccaggcaggcggatcacttgaggccagcggttcaagaccagcctgaccaacatggtgaaacctcgtctctactaaaaatataaaaattagctgggtgtggtggcaggtgcctgtaatcccagctactccggaggctgaggcaggagaagctcctgaacccaggaagcggaggctcagtgaggcgagaccgcgccactgcactccagcgtgggcgacgagcgattatgtctccaaaaaacaaaacaaagtgcaggtttgggaggtagtctaatcccccacccctttagagcaaggcaatttcctcagggccgcagtttaccaaaggtggtacactctggggtgctatcctttccattttttacaatccctgaccctggtattccctgatgccttatcctgtcttctaaaccagtgccactggtttcgtccccagttcaccctttcatcgctagctcacatgccctttgtggtccttctttccccaaacctcttcaggtcaagtccttagaggaccttctccctgaccagctcccttggttctggtgctacagctggactcctcacgctctttcttcaagcatcatccattgggaacgtggtgtactttagaaaacacggacccggcctaaggcttctgtctccgaggggccagggccacggcttccaaggcaaaccagccctggcaccaccttctcacctccatcccaaaccctcctcctcagttcaaggccctaaagcctcagacttgtggaggcccgccccaaattatgtaaagaatatataaatgcccccgaccttaggtacaatttatagctagatgtgttacgttgcggctgacagcttacattacattttggtagactaattaatttcgatttacaactggttttcccttttggggggtcaagacgctatttctggcctcaaagagtttcgtgggctggtagtggcgcttccagggtctagaggaaaaggcgggcccgcgtcagacctcccgccgcggcccttccacgcctcccgccgcgcgtctcttcaccacccctccactgttgctcccttcccaccaacatccccgtccttctgccttgcccggccaggcccccataccctctggtgccagcctgcctaccccgctacccgctcacctgggactcccgttagctctgggcgccggaccttccgggctcgaaacctcccttgcgccccgccccacgcagagcgtcccgacccgcagctccgcctgctcgccgcggcctccgtggagtccggggtcgcgcgcgctccaactctgaaatcttcgcgccacgcctcccacaagccccgtcccaccctcagccccgccccttcgccgcggccaccgctgagtttccgggcgcgcgctcctaccccgagctctttgcgccacgactcccacaggccccgccctgccctcagccccgccccaccccgccaccgcggcctccaccgagttcccgggcgcgctcgctccaccgagttcccgggcgcgctcgctcctaccccgagcttttcgcgccacgcctcccagaggccccaccccgcctcagccccgccccctcgcggcggcctcggcccctcctacccctagctcttagcgccacgcctcccacaggccccgcccacaatcggccccgccctctccggctcccattacttcgcgggccaagatgcgaaaccactcctgtgcgcctttccccaggccagtcccggggcgcgcgctgcctaccctcccccagctcagctctatccccggggcccgcaggacccaggggacccaccctcccgcgagcacgcacgcgcagggcccacctctgcgagttccaaaccctcggccctcgggtcgcctgcc

SEQ ID NO: 1573 - DNA, 2300 bp, Homo sapien
ctgaacccaggaagcggaggctcagtgaggcgagaccgcgccactgcactccagcgtgggcgacgagcgattatgtctccaaaaaacaaaacaaagtgcaggtttgggaggtagtctaatcccccacccctttagagcaaggcaatttcctcagggccgcagtttaccaaaggtggtacactctggggtgctatcctttccattttttacaatccctgaccctggtattccctgatgccttatcctgtcttctaaaccagtgccactggtttcgtccccagttcaccctttcatcgctagctcacatgccctttgtggtccttctttccccaaacctcttcaggtcaagtccttagaggaccttctccctgaccagctcccttggttctggtgctacagctggactcctcacgctctttcttcaagcatcatccattgggaacgtggtgtactttagaaaacacggacccggcctaaggcttctgtctccgaggggccagggccacggcttccaaggcaaaccagccctggcaccaccttctcacctccatcccaaaccctcctcctcagttcaaggccctaaagcctcagacttgtggaggcccgccccaaattatgtaaagaatatataaatgcccccgaccttaggtacaatttatagctagatgtgttacgttgcggctgacagcttacattacattttggtagactaattaatttcgatttacaactggttttcccttttggggggtcaagacgctatttctggcctcaaagagtttcgtgggctggtagtggcgcttccagggtctagaggaaaaggcgggcccgcgtcagacctcccgccgcggcccttccacgcctcccgccgcgcgtctcttcaccacccctccactgttgctcccttcccaccaacatccccgtccttctgccttgcccggccaggcccccataccctctggtgccagcctgcctaccccgctacccgctcacctgggactcccgttagctctgggcgccggaccttccgggctcgaaacctcccttgcgccccgccccacgcagagcgtcccgacccgcagctccgcctgctcgccgcggcctccgtggagtccggggtcgcgcgcgctccaactctgaaatcttcgcgccacgcctcccacaagccccgtcccaccctcagccccgccccttcgccgcggccaccgctgagtttccgggcgcgcgctcctaccccgagctctttgcgccacgactcccacaggccccgccctgccctcagccccgccccaccccgccaccgcggcctccaccgagttcccgggcgcgctcgctccaccgagttcccgggcgcgctcgctcctaccccgagcttttcgcgccacgcctcccagaggccccaccccgcctcagccccgccccctcgcggcggcctcggcccctcctacccctagctcttagcgccacgcctcccacaggccccgcccacaatcggccccgccctctccggctcccattacttcgcgggccaagatgcgaaaccactcctgtgcgcctttccccaggccagtcccggggcgcgcgctgcctaccctcccccagctcagctctatccccggggcccgcaggacccaggggacccaccctcccgcgagcacgcacgcgcagggcccacctctgcgagttccaaaccctcggccctcgggtcgcctgccctgggcctggccccgcctccaggtccggccccgccttcgtgccggggcccgcgcacgcgcgcctccccggcccagccttgctcccgcccccgccggtcccgcggtcccacggcgcctggttgcccccagccccctccctcctcccaccttcactgtgtcccacccttcctagctttgtgcccggggtgctgagcccttccccgtcagccgggccgcgggaggagggagccgtcaccgaggagctgccgctcgctgccccgggcaggggcacaggtaggtggcggccgcgggccgggccgctcgcggggccccgggttgcgtgtgggagcgggggcggggtgttagggaggggcggggtgggggaggggacgccccagagggacggcggggcgcgggttgaggggaggatgaggtatactggtgggggcgatgggtttaagggtggcgtaggggtgcgggggcaggctatggggacgtgtgagaattggggttcggggcctgggtgggacagggagcaggattagcctgggtggactcggggagaggcatgcttggggagagagcgggaagaaggaagggggaagg

SEQ ID NO: 1574 - DNA, 2300 bp, Homo sapien
gctagtgggaacacagccaggacatttacaacgaggcctcccttcttccctcagccaggcccaaaatgagctacatccatataccaggagaacatctgccaacccatggccttcatcccaaggctgcagacacttttggtttatctgaaaatgcagtattcttgggaaaatttctaacataaaaacctaaacagaaactaaactatgggtagttctaaaccaccaataaccaacaatccaccttcattgttctgtgtgtccccattcttcaattttcaactttcctcactacttttttcctataatatgcactttcctacctgccttctcacccataccctttcaggctccctacttccctccaagaacatgccagtctctcccacaacgtgacactcttaccaattctagcgcttctcacaccaaaaatcctaaccccactcccttcgcccaccccagctctcctgcccctttcaaccttcagacccttccagcccttccgagcccctggtgaaaggtggcttgctgtcccacagacccaaccttccaacctccgatctcccaaccttcacctgcctccccttccttccccacactcctccaccccccactcctctccttcaccatctattcttcccttcttcccactctaggggcttccctctcctaggaccccaatctctccatccctttccttgccttctgttctcaatcttcaagaccctcttccttcacgcctcactatccccaacttggcattccacacccccaacttttcttccctgcccccaagaccccaccctctctattcctatcctatctcgtttcctccttgaacccctaaaatcccattcccttcccccttccttcttcccgctctctccccaagcatgcctctccccgagtccacccaggctaatcctgctccctgtcccacccaggccccgaaccccaattctcacacgtccccatagcctgcccccgcacccctacgccacccttaaacccatcgcccccaccagtatacctcatcctcccctcaacccgcgccccgccgtccctctggggcgtcccctcccccaccccgcccctccctaacaccccgcccccgctcccacacgcaacccggggccccgcgagcggcccggcccgcggccgccacctacctgtgcccctgcccggggcagcgagcggcagctcctcggtgacggctccctcctcccgcggcccggctgacggggaagggctcagcaccccgggcacaaagctaggaagggtgggacacagtgaaggtgggaggagggagggggctgggggcaaccaggcgccgtgggaccgcgggaccggcgggggcgggagcaaggctgggccggggaggcgcgcgtgcgcgggccccggcacgaaggcggggccggacctggaggcggggccaggcccagggcaggcgacccgagggccgagggtttggaactcgcagaggtgggccctgcgcgtgcgtgctcgcgggagggtgggtcccctgggtcctgcgggccccggggatagagctgagctgggggagggtaggcagcgcgcgccccgggactggcctggggaaaggcgcacaggagtggtttcgcatcttggcccgcgaagtaatgggagccggagagggcggggccgattgtgggcggggcctgtgggaggcgtggcgctaagagctaggggtaggaggggccgaggccgccgcgagggggcggggctgaggcggggtggggcctctgggaggcgtggcgcgaaaagctcggggtaggagcgagcgcgcccgggaactcggtggagcgagcgcgcccgggaactcggtggaggccgcggtggcggggtggggcggggctgagggcagggcggggcctgtgggagtcgtggcgcaaagagctcggggtaggagcgcgcgcccggaaactcagcggtggccgcggcgaaggggcggggctgagggtgggacggggcttgtgggaggcgtggcgcgaagatttcagagttggagcgcgcgcgaccccggactccacggaggccgcggcgagcaggcggagctgcgggtcgggacgctctgcgtggggcggggcgcaagggaggtttcgagcccggaaggtccggcgcccagagctaacgggagtcccaggtgagcgggtagcggggtaggcaggctggcaccagagggtatgggggcctggccgggcaaggcagaaggacggggatgttggtgggaagggagcaacagtggaggggtggtgaagagacgcgcggcgggaggcgtggaa

SEQ ID NO: 1575 - DNA, 2300 bp, Homo sapien
atcattccttgcccttcgggaaagcggtggcccccaaggagcaaaaggaaaccaagcgataagtgaatgatggcagccacgtgcagctgtgcactgaggcttgctcagaagcttgaaaacctggatcccaggaggaacagccgaagagcttggggttctgcaacttgagaggcctctggggagatgatcagctgttttcagaggaagggctttcctagggcagagggaacaggtatgttttctggatccaggactaattaaagcaagacagagtggattcagtagcagagggaattttctaaagtcccagaagccaagaggagtagcaaggcccttgtcttcagaagtgtgcagaggctaggtgtttatttggcagggctggtacacagacgatccaaacctcaggtcggggttggattccatgacctttaaggtcccttccagagttaggaatatctaatacttatcagatttctctgtcatcttgaagggttttgtgaaatggtccaaaagactattgtgatgcattttattttttaaaaatcatgctacataaggctcatgaggttaggggtagaaacggatagtgcggcttaaaaaaatagcacatctagcaagtattatacctcttaagaaggaaatcattgactagggtttggatcagtggttcccaaaggtcacttgagggcagataacctccacccctctattttaactctaagagcccaggttggacccaaggtgggcccaggaatctatcttattttattattttatttttttgagatgcagtcttgctctgtcgcccaggctggagtgcagtggcgtgatctcggctcaccgcaagctctgcctcccgagttcaagccattctcctgcctcaacctcctgagtagctgggactacaggcgcccgccaccacgcctggctaatttttttttttttttttttttgtatttttagtagagacggggtttcaccgtgttagccaggatggtctcaatctcctgacctcatgatccgcccgcctcggcctcccaaagtgctgggattacaggcttgagccactgcgcccagccctatgttttaaataagcaacagtgctccacctccaacaaaaatctgatgtggcagatcccaggactactcttttgagaaactgggtgatgacggactgaggatagcaacaatcctccaaataaagtgctctataaatggcgatgtgctttgcggttgggaaaaacaaggctcagcagtgtggaatgtgtgccgggacaggctggaggcaagtgtaaatcccagattgacctcaggtccaggtatttccccttggcattgagcaggctaaatggagaattttgcaggccttgatctcattcactttcatcactcccacctgggcggaacaggcggctcaaatcactgcctcagtctgctggtctataaaatgaaataatggtgattgggcctgtattctccacgaatgagggagaacaaatctgcaaagtatggacccccaggactgagtggggctggaacactctggagaaagctgctatggactaaatgtttgtgtccccctgaaattcatgttgaaactctaatccccaacgtgatggtatttggaggtagggcctttgggaggtaattagggtgagattagatgatgagggtggagcttccaagatggaattaatgcccttataaaaagaggaagaggctgggcgcggtggctcatgcctgtaatcccagcactttgggaggccaaggcaggcagatcacttgaggtcaggacttcatgaccagcctggccaacatagtgaaaccccatctccactaaaaatacaaaaattagccaggtgtggcggtgcatgcttgtaatcccagctactcgggaggctgaggcaggagaatagcttgaacccgagaggcggaggttgcagtgaactgagatcgcaccactgcactccagcctgggtgacgagcgagattccatctctaaaaaactaaataaaaagaggaagagacacagtgctctcttgctgtctcctcctccacccacctcctcctcctccttcccccctacttctctccctccctgaatgcttgcaccaaggaaaggccatcggaggccataaccaggaagagagccctcacgaagaacctgaccatgttggcaccgatctcagaattccggcctccagaattatgagaaataattatttgttatttaagccaccaagtgtttggtattctgttatggcagcccgaactaaaacacatgactatttgctcaaagg

SEQ ID NO: 1576 - DNA, 2300 bp, Homo sapien
actgtaattttcctttatctacccaaatcctataaaacggccccacccttatctcccttcgctgactcttttcggactcagcccacctgcacccaggtgaaataaacagctttattgctcacataaatcctgtttggtggtctcttcacacggatgcgagtgaaagccatcatgtctgatacccctctccactcttacacccatggcaggcatcactagtcaatcacagttctgacctcagaatccttctgaggcccatgttccagagagccttttgcaatcaattgcagctgacatgccagataaaatctagttagtgtctttagtagggaccatgggtgccctgcccatgctatcagcgctttccatttcaggacatattagcttagcgtgcagctgctaagttgccatcactgacatctccttgcctaaggcagcccagtggtacaaggaattaacaccctctggctagtctctttttttttgagacgaagtttcgctcttattgcccaggctggagtgcaatggcgcaatcttggctcactgcaacttctgcctcccaggttcaagcaattctcctgcctcagcctcctgagtagctgggatgacaggcgcctgccaccatgcccggctaattttttgtatttttagtaaagacggggtttcactatgttggccaggctggtcttgaactcctgatctcaggtgatccacctgcctcggcctcccaaagtgctgggattacaggcatgagccaccatgcctggcctcctctggccattctcaaccaagactggcaggagctggcagattattaccccagttcccctcaccttgagtgggataactctgaggggcatcttctcccctagcttccccgagtgccccagcagggctaaattccacttgcccacagcggaaacctgcttcataacacgactgttatcggatccttctcttccatgtctcatttccctcaccccccgaccagcatttcctgggatcactcccaattaactctacttgccctcaaatcttgtcttagagtctgattctggggaaccttaaactaaaacacccccttcatctagcttatatctttattttctggatgaaggaactgaggcgcagggaaggggagtgagtcacccgtcagagccagtggtagggccctaatgagagtcctgttctcccggcctagggctcagctcttcacaatgttacttgctgcctcccaagggctgcccctgtgtctgtgcctcctacttgcacccacgtggattcatcattttatttcccaatgcaaaagaaaaggctgattgcaggttggaaaatctatgggcatcagaggcaggtgcaagaactcctgagctcatttctggaggtagacacctctcctcccttggtccgggtccttggacctgtccctcaagattccagggccttggtttactcagcagtgggacaggctgctagggaaacccactcactggggacatagaaggggttgttcacgcaagcaaccagccccccgcctcttccctacctcagcaccacctcaggggcagtaaaaattcacattgccacgtttctaaatgaaacaatttaaaattatatttgctttataattttagtggaaaatgcatattctttcaatctaggtcacctatgtagttgaacagaagaacatcaatgagaaaatgacccctactttctagccaccgaaacgtcaattctgggagtttctgcctgcatcttcatacccctggaacctgagctcctccggttccatctctgatgtggaggaaaatgcactttctgaaaagtttctgggtttcactcctcccatgcactgtgagacttggggcagtttctccctctctgaacctctggctcttcatctgtggaatagggatgaggattccagcctcgcaatgttgctgtcagatggcagatgagggaatagcctggccggagaggggccctcctgcctttgcctctgcttggaaggcagctgacaggggcctgcccacagggagggtgtggcccgggcaaggcctcctgcttgtccctcctccaggttggccttggtgacaatgcagggaacccgtgctgagctctctgcacacagccccagtcgggcagcaggaaaccgaagacatgaacaaggtcttcccccaggtgagagctgtccccaggtgagagttgtctccaagtaagagctgtccccaagtgagagctgtccccaggtgagagctgtccccaggtaagagttgtctccaagtaagagctgtccccag

SEQ ID NO: 1577 - DNA, 2300 bp, Homo sapien
ggacacctttgtttaaccaagcattctgtcagacaaatgcagtataattaccctactcacaattcattactaccttttcacagatagtataattttcctaaacctttcaatcataagttcatcgacttatctccaagttttttactgaatcaggcctttgactcagtatttaatagcatattattcattggtcaggccattaaaataagtagccagaggctttgtcatctgttaaaccacttttctttctttttgctgaaagcaatatgtttaacaaaagaaacctataatcaggacacaattgacgtttaactttttaaataactataatggaatattctccactcgttacactgtttattagtgtagaaggaggcaccttttcccctatcactatgccatggctcacatacagtcttctttgatatcataaccgtatttttgcggcttagtctcctaactgatcatctttatatatgcataatgctgtccagtttattatctagcacttctgagaagtgtattacaaatgcattactgagttgggaaaaaataaaattaggatagtggtaaaatgttatatcacaagaaggaaatggatttaatgaactaaatgagagtatatctggtagagacccatttcaacattagaattatctgctgtagaacattttctagttcaattttcttagactttcagatgttaggctgattgttttatttttcttttgccatgtgcatacccttacttcttaactgagtgatctggttcttaacaataataccttatatttgtataaatcattaaaatatattatttcattcaaccctatacaataggttgtggtatttctattttacacatatagaaatcaatagtcagaggttaaactgctcagctcaggtcacacacaccaacaaatgatggaactaaacctttttgagtggcatcttcaggatgccaatccagtgcattttccaccacacaaggatcctcttatatgaatgtcatcatgtggccagagcctgggtgtataattaatagatttgtatctaaaacatttgacttgtaggagggagacaatatggagttctgttaaagatacatttcctactactatattaccaaatttggaaattcacattgatgaaacctttttaagtataaaaatttttttaataaaatgccaaatccttttctttcctctttccctttctcttttgtttcttgtaatttgactatttttctcttacagcatgtacagaagcatattcccaatctgatgagcaatatgcttgccatcttggttgccagaatcagctgccattcgctgaactgagacaagaacaagtacgaaacaatactgcctttcaaactagcctgcttagatggcactgacttgtattgcttgaagtgtttatcacccacttgatcctattttagtgttatattttatatttggctttcagcaaacaaaattagtttgcaaatagaaaagtcagttgaataattgcttttgtataatgctttactattaaaagttatgcttacgttcataatcttattttgtttcttctcacattccagtgaagatattatcctcattttacatatgaaaaaaccaaggctcagaggaattatttcagagttctttttctccatcccaactcccattggacagttgccattgccttaactcagataatcatttcttgtctgtatttttaaattaacttccaaactgtttttctaatttaaccctgtctaactccatcctttgctgtgtccagatttttttttctaaatttcatcatgccattctcctgtcttatataatcagtagctcccaattacatatagatttaagtccaaactgtttatcacaacctactcctgattactgctccaatgccatctcttaaaattcctgacaagggaatttcatactctattctccagacatactgggaaaagtttcttaattttattgatttttgcacaggaaatagtcacatgtacaaactcaaaagataaaaagagtatacatatagtgaaaagtctcccactcctgtctcttagccactcagttttccctcttgaatgtagccaaggttactaatgcatagatatgttatgcgtatacaaggatgtacacatatattttgtaaatataagtatacataaagagcttctactaatttttttctactacataatattctgtgtagatatattataattttttaggcagtcccttatttgtgaacatgtaggttgttcctaatctttttcttttgta

SEQ ID NO: 1578 - DNA, 2300 bp, Homo sapien
atgctcattaaatatgtctgtctattagatagtactacatagtagtaatgctattgtagatataaatatataattctcctaatagtgaagattgacactctgcaattatacaggcagtagaaaataaatgaatagtagttaggattgatgtaagagtattgtccttattttacaactgaggaattagattaagtaacttgtcaaaggttgtgcagaataagtggcaagtctgagcttcaaaccagggccgattcctgaaacctcggctcttttcaccatgccatatggttttccgaaattggtactggatgacttattaaaggaaagcatatctgagaatgaaatggcatgtggtatagctcatactaatgagcttatgcttcctttgtgcaatataaggaaatatgtggtgctccagagacataaaataattctttaactgttttacaaagcctgcaacagctactcagatatgaaatctatctcaattgttaaaattctttcaatttcatcttaacagtaaatgcagttggaactgaggtccaaaagtgtgctaccttcaaagttgtatgataaagtatatttaatattagactgcaggcatctcttcttgatggattgttgctgctgcgtaaattttactaatccttttgctggaaagaaatacatagcttgtatttcattggttgctaactggtatatgcacatgctgtttccttattaggtgtctgccagtttgtacacagtggatcacatagtaagtcgagggggctcccccatatgcaatagctttttttaaatacttttattttatcaaagaaaaacagctgaagacattagtcttattaagcagttaatattttacagtaatgaagaaccagatgtccatcctgtcttaagctttcacacgtatacattgatgcctgtaattgttttctattttaaaaatctattaacactattaccatttattaagcaccttctacatcccaggcactatactggaaatagcttccaaattattgaggaatttggagataatggctgttctctccttttttgatgagaaagctgagattcttagacaggtaaaataacttatgcactcacccaaaaggtttgatctaggtctggctgattgcagtgtcctttcccatacaccacactgttgctcctgtgttttcatttaatgtaagcccagttttaaaaaatcccttcatataaacatttttatagatgtataccttactttatcaggcccttgtgtcaccatttgccatgtgaagctagtctgatacttttcctgataagcctggtgattcatataaacagggatgtggcagaagtatgccattggtcctagggtacttgcttactcctatcgctgttaaagttctagttatatcaccgttgtgttttttgttgttgttgttttttaagcaacagggtctcactttgtaccccaagctggagtacagtggtgtgattatagctcactgtaccctcaaactcctgggctcaaacaatcctcacacctcagcctactgagtactaggacaacaagtgtgcactaccatacccagttatttttgtgtgtgtgtttgttttggtacagatggggtctcgctatatagtccaggctggcctcaaactgttggcctcaagcagtcctcccacctcagcttcccaaagccctgggattacaggtgtgagccactgcacctggcctgtcactattagttttatttttaatttttcccccccacagattgtaaccaaagaaaatggaaaaagggtggtggttttacctactaggcttttttcttcgtatcacttttaaaataaggaactaaaacctctatatggcaaaggtcttgagtatcaactggctcctatcatttttttctttcagttatgaaacttactggacgatttgtaataaactttactaactgctttcttcctaacctgttttcccctgaggaaaaaaaaatactattttttggtaacccttcctgttcttgaactccctaggaagaggagttgtacgcatgtcagagaggttgcaggctgttttcaatttgtcagtttgtggatgatggaattgacttaaatcgaactaaattggaatgtgaatctggtaagatgctatgctaacgacatcagctgtatgtaacattgttttctttgtgataagcttttgaagtattttctttaggaaatggaaaacacactgttgaaactagtcatctaacatattgtaattattatggatctaagagttttcgtagctgctgcta

SEQ ID NO: 1579 - DNA, 2300 bp, Homo sapien
ttagaaaatagtggacattattaaagtacctacaacttccaggaaggtatcctttcaaattatttgattattttcccaacattctggtttataccacaaaattgccgagaaaatcccaaaaaaggaaacaaaccctagaacaatagaaagtaagtctcaacccaattccaggccaaatcaatattaatgagcttcttcatacaatcctcttaatgatgagaagtttacaagaggtggagaaaaataacgtggttagaagcagtattcattgatttaagtctgaagttaaaacttctcacttctttctcgattgttacataaatctctggaaaaatttagtacagtcccttctcccacacttttttttgaaaattgataatctccatgcagtttaaaatccagccgtaacaaaatctgagaagtgccggcacttagaacttttcatttcaaagacctgaaaatactcgccaatatggaacatcctaagcttcactggaactgtctccgtagccactccagttttagagagcaaggaggtccagccacaatggttaagcaaatagcatagaggagatgaaggaaaaacgaagaggaaaccaccagcaacatcaacaaaagctctcataaaacaacgtgggggagggcatatactcaaatcatacatgggaaaggtgtggtgggaatcatcaagcaatttagaatgttgagtaaacagagttcttaggctgaaaaaccaacgtgaagagggttaggtatgtaattaaaagaaaggggggaagcatagagaggagggccattcctctctgtaagctgcgaaccccctcctgtccacagtctcatttcttcacccactccacgaattccccgttttctgcactgagtggtcagtttctggtaggcagacacctaattgcctcttctctaacccagtccctcttggcagcgtcttggacacagtaactcaacataggcagacagcattcctgagcgtctcgctactccctgagctgccttcgtgacgctttttataccacagtggaatcgtctacttgtctgactccccgaagactgcgctcctggccccgagaggcgcttagtaaacaagggttatcaatcaatcatttgtggactcgcgtatctgcgcctccctttctacaatccccccttacgctcccttaggtgaggaccccgcattaatcatccatatcctcccctatcctcctccgagtgctcgactcccctgcagcccggcaagctcccagaggaaagggatcgcgtctttctcatctttgtgtcccccagcctatcacagggtagtgcaggacaaacttccggtaatgacagcagaaatggggtgcaggcaggattagggaggaaaacaggagctacacagatgggagacagcgattgaagggccgatttaacagccaggttgccagagccgacatacgtgtggggagccgagaaatgggctgcaagggaagggtcgcagcccgctccggacgggccctaccttagggtaggtgtgcaaggggtaggtcaactgacaggcccggtggcaagacgccgtatcacccaagaccgagtcaaatgcttcagccgaagcggtccccgaacctccggccaaggccatggtcagcagcagcagcggcgggagccccagttgggtcctcacccagaggctccccttcggcgccgccatcttgttcccctctgtcacagcagctcagcttgttgctgttttctcggaagggtttcctcctcctcctggggccagcccccttctccgccccaccgaccgttgcttccgcctccgctgtcacttcagctccgccctcacccgccagaaactgccgcctcctgcctcacctctgggactacgaacttcttctcctaggctggcgtgaggaggggaattcaaccatcgcaagcgttagcgcgaagcggggcctcctgacttcttcccttcgcggggcaggctggggcatgtagttctccgtaggcgggaggcgcacggtgctgtcgggaaagttggtctcggaaaactacagccgccctcagcgcgccttccgcccgcatttcttcgcagtgcattctggggaatgtggttcgctgtggcccagaggcgcgagggccggcggagtttcttcagaggaactaccgccctgggaggaagcgtctgtttagtttcaacacagacgactgggcttgggagcctacgaggttgcagtctggagggcgccaacagcagctaccagggctgcttttcctggtgggtctcacgtcagaccgttgttggg

SEQ ID NO: 1580 - DNA, 2300 bp, Homo sapien
gtacagggtaggtatatagaatcatatttggtactttaacattcctaacagactacattttgcaaaagaataacaacgaaggggacttgtcctacgagctagcacacatggtgtaaaccggagtaattacaagggtgtagcaggggtgtgcagaaatttataaatgtaagtctgtacagctatgggcgaaacaaaggaggagtggtcaggtacactttgaggaggaggcataacaagaaataattcataggtctttccacaacagaacctctagcaccaccttgctatcagtcctttgcacatttcctctagccccagatcccctctcaccttcagagattcaatcgtggcctgcttgtaaacctttcctccagaatctttcttctgagggctattctggattctaggcgttcgaatgacgaatttatccattgttaggggactccgactaccttgacgtgcttgcagcgtgttctggtcaagaaagagggcagattctaaaaccccactaaagactgccatgatattttttccccaaagtaacacaattgagttctctggaagaattcatgaattatggggcctcgagtggaattgacaggaagtaagattttctctttaaaagaaagatcttccgaagaattgaaactgtaatcaatcatcagtctacgtcctgagttaggaggttcctagcttccagaagtgcacgctctagcgaggattccaacattgggggaattggcccaatattggaatccccgctagagcgtgcacctaagccctcttccaaataagattgggctgtgaaagggttaggattacattaggctcagtgacgccctcttaacaaccacctcaccacagccataatcccaagggttgccctggtaatcagcaaccgacaaccacctccagaactcagcagagggtctcacaatacgcagcatcccctagaacaaactgctcggtggtcagaggaccctacccacggctgtaatctctggatccccgaacaaggagaaaccccatcctcctcgttcccagcactcaggagcccgggtaggggcacccaacaacggtctgacgtgagacccaccaggaaaagcagccctggtagctgctgttggcgccctccagactgcaacctcgtaggctcccaagcccagtcgtctgtgttgaaactaaacagacgcttcctcccagggcggtagttcctctgaagaaactccgccggccctcgcgcctctgggccacagcgaaccacattccccagaatgcactgcgaagaaatgcgggcggaaggcgcgctgagggcggctgtagttttccgagaccaactttcccgacagcaccgtgcgcctcccgcctacggagaactacatgccccagcctgccccgcgaagggaagaagtcaggaggccccgcttcgcgctaacgcttgcgatggttgaattcccctcctcacgccagcctaggagaagaagttcgtagtcccagaggtgaggcaggaggcggcagtttctggcgggtgagggcggagctgaagtgacagcggaggcggaagcaacggtcggtggggcggagaagggggctggccccaggaggaggaggaaacccttccgagaaaacagcaacaagctgagctgctgtgacagaggggaacaagatggcggcgccgaaggggagcctctgggtgaggacccaactggggctcccgccgctgctgctgctgaccatggccttggccggaggttcggggaccgcttcggctgaagcatttgactcggtcttgggtgatacggcgtcttgccaccgggcctgtcagttgacctaccccttgcacacctaccctaaggtagggcccgtccggagcgggctgcgacccttcccttgcagcccatttctcggctccccacacgtatgtcggctctggcaacctggctgttaaatcggcccttcaatcgctgtctcccatctgtgtagctcctgttttcctccctaatcctgcctgcaccccatttctgctgtcattaccggaagtttgtcctgcactaccctgtgataggctgggggacacaaagatgagaaagacgcgatccctttcctctgggagcttgccgggctgcaggggagtcgagcactcggaggaggataggggaggatatggatgattaatgcggggtcctcacctaagggagcgtaaggggggattgtagaaagggaggcgcagatacgcgagtccacaaatgattgattgataacccttgtttactaagcgcctctcggggccaggagcgcag

SEQ ID NO: 1581 - DNA, 2300 bp, Homo sapien
tacataaaatgtgacagaactctgaggagaacaaacattaggaacctagtggaggaagaagaattggtaaaagaaaatgaaaaagtcagaaatttaagaggcaaggttcaggatgacaaaggggactaagtacaagttgttttgttttgttttagtaaaataattactttagcatttattgggtaactatgttgattgatacattgtatctactctttgcatcttgcttgcagacatcagactgacttcaatgtagcaagagctcattaaaacagcctctttccagctgggcacagtggctcatgcctgtaatctcagcactttgggagacaagaggcgggtggatcattttgaggtcaggagttcaagaccagcctggccaacatggtgaaaccccatctctactaaaaacaaaaaatagccaggcatctgtaatcccagctacttgggaggctgaggcaggaggatcatatgaagccgggaggtggaggttgcagtgagtcaagatcgtgccactgtactgcagtctgggtgacagagtgagaccctgtctgaaaaacaaaaacaacaacaacgacaacaaaaaaacagcctctttcccagtctcagctgaagctgtaaagctgtttgatacagttctgggcagtgtgacagatgtgagagaacagcatcaaagcccaccccttaataagtttgtacagggtaggtatatagaatcatatttggtactttaacattcctaacagactacattttgcaaaagaataacaacgaaggggacttgtcctacgagctagcacacatggtgtaaaccggagtaattacaagggtgtagcaggggtgtgcagaaatttataaatgtaagtctgtacagctatgggcgaaacaaaggaggagtggtcaggtacactttgaggaggaggcataacaagaaataattcataggtctttccacaacagaacctctagcaccaccttgctatcagtcctttgcacatttcctctagccccagatcccctctcaccttcagagattcaatcgtggcctgcttgtaaacctttcctccagaatctttcttctgagggctattctggattctaggcgttcgaatgacgaatttatccattgttaggggactccgactaccttgacgtgcttgcagcgtgttctggtcaagaaagagggcagattctaaaaccccactaaagactgccatgatattttttccccaaagtaacacaattgagttctctggaagaattcatgaattatggggcctcgagtggaattgacaggaagtaagattttctctttaaaagaaagatcttccgaagaattgaaactgtaatcaatcatcagtctacgtcctgagttaggaggttcctagcttccagaagtgcacgctctagcgaggattccaacattgggggaattggcccaatattggaatccccgctagagcgtgcacctaagccctcttccaaataagattgggctgtgaaagggttaggattacattaggctcagtgacgccctcttaacaaccacctcaccacagccataatcccaagggttgccctggtaatcagcaaccgacaaccacctccagaactcagcagagggtctcacaatacgcagcatcccctagaacaaactgctcggtggtcagaggaccctacccacggctgtaatctctggatccccgaacaaggagaaaccccatcctcctcgttcccagcactcaggagcccgggtaggggcacccaacaacggtctgacgtgagacccaccaggaaaagcagccctggtagctgctgttggcgccctccagactgcaacctcgtaggctcccaagcccagtcgtctgtgttgaaactaaacagacgcttcctcccagggcggtagttcctctgaagaaactccgccggccctcgcgcctctgggccacagcgaaccacattccccagaatgcactgcgaagaaatgcgggcggaaggcgcgctgagggcggctgtagttttccgagaccaactttcccgacagcaccgtgcgcctcccgcctacggagaactacatgccccagcctgccccgcgaagggaagaagtcaggaggccccgcttcgcgctaacgcttgcgatggttgaattcccctcctcacgccagcctaggagaagaagttcgtagtcccagaggtgaggcaggaggcggcagtttctggcgggtgagggcggagctgaagtgacagcggaggcggaagcaacggtcggtggggcggagaagggggctggccccaggagg

SEQ ID NO: 1582 - DNA, 2300 bp, Homo sapien
taacaactgagagtgagaaaaccctagccagtcaaacagcctcactgaagtcggattagcatatatgctacatgtagacgtaggtagcaagaggaaaacaaactcacatctgactcatcagcaagccagccattgtgaacatgcatagatgcccttcacagaggtccccacaggaggacctgtctctactcaaaatataaaacctagccgggcattgtgttgggcgcctgttttcccagctacttgggtggctgaagcaggagaatcacttgagcccaggaggcagaggttgcagtgagtcaagatcatgctactgtactccaacctggcaacctgggcaacagagtgagactctgtctcaaaaaaaaaaaaaaaagaaaagaaaagaaaaagaaaagtgtttatgagcagcttttatgagcagggatggaccaagtgcatggagtgctcacaggagggagtgaagccaggcaggccttcacctgcacctgtttttctctcttcactgtccctccatctccagactcatatctagacttgtttaatccaactcacaactggattttgtacttggatgctccacaggcactcagcatacctgaaaccaaactctcttcttctttcccttaaaactcaacttcttcttgagccttctgtctacccaaaacccaagccagatccgaggggttggatgtcccttctacccctctgtccccccacactccctcacatctagtcagtctcagtgttctgttaatttcctcttcagtatttctctcattgacccctgtcttctcattctgcctgaagctgcaggtctcagtcctcatatcatctcacctggaccatcacaaccttcttctgtttcctgtgattgaagaacgatatgttttgaaaccagacatgccagagttaaaaccctggttgccaccattttagaagctgtatgaaactctgggcaaagctgaactgtagtggttaggattgcaaacaaaggtggcaaaactaggggaaaaaggaaataattatcacctggggaagtgcagttatcaggaagggacacaggtggcttctggaatgctggcaagattctttttacttgactgagtagtagttacacaggtgttcttttgtatttttaattaattttttgtaattgagttgtaggtatatattttactttatcatttaaaacattttagggccagacatggtggctcatgcctgtaatctcagcactttgggagactgagatgagaagatcacttgaggccaggagttcgagaccagactggcaacatagtgagaccctgtctctacaaaatgtaagtaaaaaaaattagccaggtatggtggtgcacacctgtagtctcagctactcgggagactgaggcaggaggattgcttgagcccaggaggttgaggctgcagtgagctgtgatcatgccactgctctccagcctgggcaacagagtgagacctcatctcagcaaaacaaaacaaaacaaaaaatatcttttaaaattcaatgagacttttctgtataaagtgtcagctggcactcagagcacaggaacagatcaggaaaccttggttaccagctctgattgttatgtcctttcttccatatgccaagctatgcttggtgatagaatacaaaaggaataagacaccctcctgtgctcaagggggtcccaccctgctaaaccttcctgaagtcatagagcttatgagtagtagaaccaggtttcctgaagccaaaccctttcctctagtaaagaaagattcacttcacacgagggattgtccttctaaaaccaatgatagtaagtggttaatgctccccaccagacagcacactccttggctgatccatctccatccccagtgcttgcacagagcctggcacctgcaggctttggagaatgtgaggaatagaggagaccagagaataacccccatgttttccctctcccaggctggccaaggagcagggcctgcgcccgtggtctcatagagcctggcctgttctggaagagcacccagttgttccttctaggctgcccaagccccactgatgatggctgagagggaagaggacgacgacactgaggaagcctggatgcagctacggcccacagaacccttgccttcccagtgctgcggcagtggctgctcaccctgtgtgtttgacctctatcaccgagatctggcaaggtgggaggcagcccaagccagcaaggacaggagcctgctgcgtgggccagagtcacaggtgagagaggctgcttctcgatatg

SEQ ID NO: 1583 - DNA, 2300 bp, Homo sapien
ttattctttctgtattctaccaccaagcacagccgggcatatggaaggttccctatgactgctcattcagtttacagatacaatctgggagctaggtgttgggaggcaacagaggtaaacaggtcattgttcctaccttcacagagcctcatagactacaaggtgttagatcaacccaattcatttttattgcatgctatggaccaggtatgcattatgagtgaatgaggtctggttccctctttatgctgatttcttttctttctttcttttttttttttttgagacaagagtctcgctctgttgcccaggctggagtgcagtggcgcaatctcagctcactgccagctctgcctcccgggttcacatcattctcttgcctcagcctcccgagtagctgggactacaggcgcccgccaccacgcccagctaattttttgtatttttagtagagacggggtttcactgtgttagccaggatggtctgatctcctgacctcgtgatccacctgcctcggcctcccaaagtgctgggattataggcgtgagccaccatgcccggcctttttttttttttttttttgagacagggtcttgctgtgttgcccaggttggagtgcagtggtaggatcacagctcactgcagactcgatctccgaggcccaagtgatcctcccatctcagcctcctgagtacctagatctataggtgcgtgccatcacgcctcgctaattttttttttattatttttagagaggaggtctcaccatgttgcccaggctgatctcaaactcctggcctcaagtggcccctcccacctaggtctcccaaagtgttgggattacaggtgtgaacgatgactgtaggacttctccacgttttaacagtcccactttctctgctattttggaaattagcagaaaagttggccacgtcagtcatgaattttaaagagttggttcatgcgtcctctgagctctatcttttcagttcaagaggcaccacctttaatccaggccttgacacatgttgcctcaggctggatgacttttcccaccccgcaggccttggttttaaaggtcacctcccttctgaggtcctccctgaaccttcccctactcattctctataaggcactctatttgtttctgttatacacgcattcactaaacatatttactatgtgccaggcactgttctcagtgctggggatatagcagtgaagaaacagaaacccttgcactcactgagctcatatcttagggtgagaaacagttattaagcaagatcaggatggaaaacagatggtacggtagtgtgaaatgctaaagagaaaaataactacggaaaagggataggaagtgtgtgtatcgcagttgacttatttgttcgcgttgtttacctgcgttctgtctgcatctcccactaaactgtaagctctacatctcccatctgtcttatttaccaatgccaaccggggctcagcgcagcgcctgacacacagcaggcagctgacagacaggtgttgagcaaggagcaaaggcgcatcttcattgctctgtccttgcttctaggaggcgaattgggaaatccagagggaaaggaaaagcgaggaaagtggctcgcttttggcgctggggaagaggtgtacagtgagcagtcacgctcagagctggcttgggggacactctcacgctcaggagagggacagagcgacagaggcgctcgcagcagcgcgctgtacaggtgcaacagcttaggcatttctatccctatttttacagcgagggacactgggcctcagaaagggaagtgccttcccaagctccaactgctcataagcagtcaaccttgtctaagtccaggtctgaagtcctggagcgattctccacccaccacgaccactcacctactcgcctgcgcttcacctcacgtgaggattttccaggttcctcccagtctctgggtaggcggggagcgcttagcaggtatcacctataagaaaatgagaatgggttgggggccggtgcaagacaagaatatcctgactgtgattggttgaattggctgccattcccaaaacgagctttggcgcccggtctcattcgttcccagcaggccctgcgcgcggcaacatggcggggtccaggtggaggtcttgaggctatcagatcggtatggcattggcgtccgggcccgcaaggcgggcgctagctggctccgggcagctcggccttgggggcttcggggccccgagacgcggggcgtatgagtggggcgtgcgctccacgcggaagtcg

SEQ ID NO: 1584 - DNA, 2300 bp, Homo sapien
aaaaactagccgggagtggtggcatgcgcctgtggtcccagctactcaggaagctgaggtgggagatcacttgaactttggtggtcaaggctgcagtgaggcacgatcatgccactgtactctggcctgggcaacacagcaagatgctgtctcaaaaaaaaaaaaaaaagtaacttctggattttgtggtgcagcagaaagagccctggactgggagtcagataaactaagttttagctctgacaccgccactgttccttaaacttgacaatagataaaatattaagactttatgttctatttgcatatgaaaaataggtgataattagagctgccatttactgaaagtcaccatctaccctgtgccaggagctttacctgcaagttagatgggatttcataaaatgaaaaatgaaactcagagactaaggaatttgctccaactcacatactttgtaagtgacaaggctaggaggagaatctgagtatgtctaccctaaagaacatcacctctctccattaccccaaatggcttctctagccctgtatcctgcagagttttattacagcctacagaacctctctgtgagcagcaaaaacataggatacacaatacattttcagcctaggcaaacgaatgtaatcttaacgtctaaaatactgctaatgcattcatccacttggtattgttaccagggtcactcaaggatgccaagtcttgtgagatccttcccactaccttgtaaggacactggaagtgtttaaaggcttgaaaatcagctttcaggaatggaattgagaagcttaagaggctggccaattgacttaagttttctcaaacctaggatttattctctggcttagtcccccaatcttgccagatttgccttttttttcccccctaatcactccttggaaaatactgtttccacttacctcaaccattctgttttcaagacctgccccatccctatcctgatttgaggaagatggaagaatggagaaagggataaacaagcttctccatggactctggaaaataatttctggtactgttctagatagacaggctggttttggcaaagtcattttgatctgtccctagtgagagtgacagaggagtagtcatgggcttaagaggtgacaggcctggagattaaacatcctgctgtctccactataaactctctccaactacttttaaaatatacagttaatctccagaatgtcagacctggaaaggtcaatgtggactgtccagtcaaaaccattcacttcccaggaaatagaggcccaggatggccagccatttgcccaaagtcaaagagagagagccagggctaggcctagaaagcagctcttttcatgctgacacgcaaactctctattactcctgcacagaggcccagctccttacaactcaattctaacaaccctcagaagacgggaatcactacggccccatttcgcagacgaagaaaccaagacccacagagtttcaatgtcttgcccaaagccacagagggtcggggtcggtgctggttagaggaacacggtcccttgccgcccgtcctggggcctcaccctcgagaaggcggcaacggtggtgaaagatatagcaggcctggtctttgtacagcggatgctcgtgaagagggggcgagcggtagaaccttgggtccttgtagccgcggtcccagggcggaaagatcggccgcgccagccagggcacgaagtgcatcttccccgcaaaggtgatgggctccagtccagggatctcgtacaccctatccaggggaggaggctccgacttccgcgtggagcgcacgccccactcatacgccccgcgtctcggggccccgaagcccccaaggccgagctgcccggagccagctagcgcccgccttgcgggcccggacgccaatgccataccgatctgatagcctcaagacctccacctggaccccgccatgttgccgcgcgcagggcctgctgggaacgaatgagaccgggcgccaaagctcgttttgggaatggcagccaattcaaccaatcacagtcaggatattcttgtcttgcaccggcccccaacccattctcattttcttataggtgatacctgctaagcgctccccgcctacccagagactgggaggaacctggaaaatcctcacgtgaggtgaagcgcaggcgagtaggtgagtggtcgtggtgggtggagaatcgctccaggacttcagacctggacttagacaaggttgactgcttatgagcagttggagcttgggaaggcacttccc

SEQ ID NO: 1585 - DNA, 2300 bp, Homo sapien
ctctgaacagcccagctttgctcctggagttccgacacataggagggttagaggaatccaaggaggagctttctccaagaattggtggtcagcattgggctacctggagagagtgactgccaagccccatggctgcactgtctgggttggatggggtggtcctgcactgggtgactcatgaccctgaaggtcccccatccacctccatgtcctgggatcccccagtccagacagccttagaggcaggccttcctgagtcaccaggactctataaaaaccacaaacccccagtgggcagacgcaaaccagccaagtgattcagagctagggaacctggggccaggaagcagggctgggagaaagtgagaggccggaacaactaaaaatccagggattggaaagacagacgctgagcacccccaggcagacggaaacagcaggtgctaaatgccactttgtaggccaggtgcggaggctcacacctgtaatcccagcattttgggaggctgaggcaggaggatcacttgagcctaggagtttgatacgagcccaggcaacatagtgagaccccatcaatacaaaaaatttaaaaattagccgggtgtgacagcgcgtgcctgtagtcccagctcttgggatggctgaggcaggaggattgcttgaacctgggagttcgaggctgcagtgagctgtgatcacactactgcattccaacctgggcaacagagcaagcgaccctgtcttaaaaaaaaaaaaaaacaaaaactaaaaaaaaaacaaaaacaaataccaattctacttcgtgaacatcagatactccctatgccctcacacaatcctctcgtaccttaaccacacatacccgctcccctgttccattctgaagctagggaaatcagtgaacagtctgtcccttcgctttccaccacctcgttccaaaaccggtttgaagttcactattgagctcaaggcaggagagctccccactcagcctcccccacagcagcacagcctgggctgggggcccttgaggacagacccctgtcacagatgcccagcctttgatcagcactgacacctgcagatgaggaaagatgaccagccaaaaggcttttcctctcgaaggcaaaagctcatatttataaagccctaagggatgaggtcctagaagcaaacttccccccagcaactcctactctctttttccagttgcagctgaaataacttcagtctcaagtaaattgcttttcatagggtttcacagcgggtggggcaagtgttcacccaggaaacccgtggcccccgtgtttaccttctcattagtaaccacaccagcaccgccgatggccccagctctggagccgggttctcgtctagtacccctgcccctctcctagtggccacctgtccctctcctagtggccacctgtcccgccccggggctgggtggcatttcctattgtagaagctgatgggatgtgacctgggtgctcacttggctctgcaacctgtgactgggagcccgcaggcctgtgacctcagtttccccatctcaatcctaaaagcctcctcatcctcttttcccctttaaatggggcttcccacagcgataggattttaggtagtgggtgtctcagtccccgtaatttggaagtagagctaaaatgaggtatgtgtctgtgagacaaaggcaagatggggtttgggcagaaggagggagtgggcactgctgcctctgagaggaaggtggttggtgctacagccagagcaagacctagagaacttggtctcctgcctcacttcagagctctgataggtacacagaccccctaccccaagacagcaggatgaggcggtggtttccctcccacagagcccccaaaacaacgccacagttatagctaacaccacttccagctgactggtaggcccggggtaaccttctcccactggcaggcagcagaagtctcagggaggccatgagtggctccacgtgatcacacggggcactgggtgggacaggtagatgcctgtccccatggccagcagctccggagcagctcctcagcttgtgtcttgcatctctttcagcctccgggaggagttcctgggacacagccattgctgcccaattctatggatcccacacgacaacaaggtagagagggcagggtgggcctagggtggctggggatgccaggaggggctcctcctccctccactcctgccatcccatgacgcgcctcctctctcacgcaggccaccccaacatgggaggatcaatgcagagaatgaaccct

SEQ ID NO: 1586 - DNA, 2300 bp, Homo sapien
tgctcaacacccactgtattccctgtatttctttgttgctagattcacagagctgtcccagcttacaaaacacagcccattctgtcactttatcccccacaaccctggtgaggacgtgggacaacagctatctcattttttacaggaagcaaattcagaaagtccgagtggcttgcccacagtcatcccacttagtagtagaggtgacagtgctgaaaaccaggtgcatttgttcccaggtctgttcgtttattttgttgcatgcagtatattagtgagatttgcacattacctcatttcctttcatcaaagttggaagttagagattctggttcctttttttttttttttttttatgagatggggagttttgcttttgtcatccaggctggagtgcagtggtgcaatcttggctcactgcaacctctgcctcctgagttcaagtgaattctcctgcctcagcctcccgagtagctgggattgcaggcgcccaccaccacatccagctaatttttgtatttttagttgagatggggttttgccattttggccaggctggtctcaaactcctgacctcaggtgatccgcccaccttggcctcccaaagtgtcggggttacaggagtgagccaccacgcccagcctctggttcctattttactgccaatgaaaggaaagagagtgacttcttgaaggtggtgatgggaggctgtgtttctaagaggaaaaaaggcgttctgtttcctgaccccaaggggctcattcctctttcagagaatcagaaccctgggagatgattgatgaccaagtttcactttctcagtcatggtggggtttggggaccaccaaggttggaggtgggcttcctgtagaaggagcccctgaaggcctagaatcagtgggaaggagcagggcccggttccaggtaggactgtcagacctgtggcttcctcagggctggggcccagatgtctcagcctcgccccgccccgcctgtgtgagcacggggccaggcacagacgcgccgaccacctgaataggttgcacacagatcctttggaaggaggccaggctggggagagcaatgtctgctcacccctgggaggcatttgttgaggcagatataccaggcaaatgccagaacagcagtgtttaaagagaaaaggaatgacggtccccccacttcgcgaggcccctctctctcatgagacacctaggaccctgcagggccaagaacacgctctgccctccgtcaccctctccagcagtgtttcccagttggtctgttcatttattcgttgagtcatggatatttattgatcttttgctctatatgacatgccagccacttgcagagggcacagaaatttataaatcactggcctgccaagagcttctcagagtagctgggcagacacggcccagggccatataatgccaggagcagcacattggccatgcacccctgctctgcaccgcaggaagtacctttggcactttgtctcaggctgtccttgcaacctccctgaatggtggacattgtccccccatttttttattattattattattattattattattatttgagatagggctgaaccttttgggctcaagcgatcctctgacctcaacctcccgagtaagtggaactacaggcgtatgccactgcacccagctaattttttattttttgtagggacggggtctccctatgttgcccgcgccggtctcgaactcctgggctcaagcgattctccagcctcaacctcccaaagtgctgggattttagttgtgagccaccacatccggccctcccattttagagatgaggaaaaagagcctcggaattcgttgcttgctcagtgggggccggacctgggaattgagtccaggtctgagtgtataagccctacttgtgtcctgtcagtgggaacatgacacttccctgggacgctaggagggctttaagtagaaagtggcctgtgaggaaggtccacggggaatgtggacggacagggagagccaagtccaggggtcagaactctgtgtctctggttgtgggtttggccactaactctctgccttgttgtctccacagagtgcagcagctgccccgagccccgtgcttggcaacattccccccaacgatgggatgccgggaggccccatcccgccaggtttctttcaggtacgtgcggggcccgtgggtcttgtgctccaccttgtattccaggccgaggccctgggcaggtgggagggcgggagagaagtaagtagctcagtttgccatggtctaaa

SEQ ID NO: 1587 - DNA, 2300 bp, Homo sapien
caactttgatgaaaggaaatgaggtaatgtgcaaatctcactaatatactgcatgcaacaaaataaacgaacagacctgggaacaaatgcacctggttttcagcactgtcacctctactactaagtgggatgactgtgggcaagccactcggactttctgaatttgcttcctgtaaaaaatgagatagctgttgtcccacgtcctcaccagggttgtgggggataaagtgacagaatgggctgtgttttgtaagctgggacagctctgtgaatctagcaacaaagaaatacagggaatacagtgggtgttgagcagaccccagatgaagagaatgggcaagccgcacgttacttttcaaaatgattctgcctacagaaaaacagccctctctgcaagagctatcctgctaaccatcctgtaatgtgtacaagtttcaagcatctccaaaaattaggattgtagatctccccatcccccaggtctgaggtcacaggcccctgccttgcccctgcccggcactatctgagatggggcctcgtgagggaatcgccagcttatccattagctgcattactgctggctgcattactgtttttctgtggtcagtggttctgtgaaaatggcaattttgtgattaacagccaacaattactcctcagcagcaagagcaaaaaactttttttaaaaatggggtaaggtaaacatccatctacatttttcttcaggttctttcagagactggtgttacatttaacaatttcattcttcttatgtaccattatttaaccacttttttttttttttttttttttttttaagacacagggtcttactatgttgcccaggctggcttcatgtgatcctcccacctcagcttcccaaagtgctggaattacaggcatgagccaccaccccccgcctattaaccaacgaaataacaggcattaaatctcagtgtctgctaatgtggcagttagtatccctttggtattcggtattctgagttacctcttaggtcattaccttttgaaatggtttgcattggccacttgtagatctaattttatggcaaatcattcatgtcctttgctatttgggtatttgattttttatatattgaggatctagactaagggtaagttataatttaaaaaaaaaattaaaattattattattataattagagacctagtccccaggctggagtgcagtggcccgatcattgcttactatggccccaaactcctaggctcaagggatcctcctgcctcagcttctcaggtagctgggaatacatgtgcacaccaccatacccagctaatttttaaaattttttgtagagattaggtctcactatgttgcccaggctggtcttgaactcctgccctcaagcaatcctgccacctcagcccccaaaagtgctagcattacaggtgtgaaccatcgtgtctggcctaaaaaaaaaattaaatgaaaacttgaacctacaagtactttgtcgccttatttatgaggctcttcactctaagatgttttcctatgagatcaggagtgagtcaatggttctaggaactgaaggtagtggatggtccacagttctttgaatgcaacggccagggtcaccatggttctagtaaatgcacggtgtaattctctgaaatgtggggtggaagatggagttttgctgttctccaatgaaggaggacaaaaaaccaagaccatgttagcattgactaaggggcaggaagctgaggagacgcctttatcatttaaagcttctcaagcagcaaaactaagtcgtcctgcagtgcttaaatttgtgccttgaattttgatagttattgctgttcttctttgattatgaagcaaacatgtgctcataacaaaaaactttaaaaagggcagaaaagtgtgaagaagaaaacgaaaagcagcaaccagtggtatagggcaacaaaagagttaagaggttgggaaaggctcagaaataacttgctcacaaaatctaaaccaaggtaccctccccccaaccacatctatgaacattacgctgaatccctgcaccaaccctcctgcagctcaacggcagcaggggctgtttctcctgtctctgagacccagcacaacgtgaggcatacagcaggtgtattagcaggatctagaatacgggtaagttatactttttaaaaaaaaaactttaaaattattattattataattagagacctggtccccaggctggaatgcagtggcccaatcatgattactacgtgtataattcagagacctgctcaaagct

SEQ ID NO: 1588 - DNA, 2300 bp, Homo sapien
ggtaggtattaactgcgttcccaggcctgtttcctgctcccaaatgccaacatccctgcctcttaagtgaggtttagcttaatccccaaccttacctaaatgttatttctttgattattcagagctgtgggcggaatttccctgtgtcgttgagagcgtaggtggggacacactgctgggatgccctccccacttgcaatcctctcttgcatccatcgtccccacagcgctgtccagctaggatggtactggtctcccagtgttgttcgttcggatgtcttcagaggtcagactgggcatcctcctcactttaccagcaggggatactgaggcccaggggatggaggttatgccatctccccttctcctgtcaagcagctggaagccctggagcaaggtgtgagctgcaaccctggagaaatggtctgtagtttagcagttgtggagttgctcacgaagcttccagttggtcatccagtcagccggcactgggatttgcacagaagccctgagactctgcccttgccctcctggcctcctgagctgggtgggctggttcagcttcaggggaacacctgataagcccccaagagtccaccgtatctaaatactgagggtctgttgcacacaaggtagaaatggagcccggtcagagtatggcattgagttgccagttaagaggtactccttgaggttaggcaggcgtgttagtcttcattttgtatgtgcagtgcctggcacatagttaagtgcccaatgaagataagcttggtggcagcctgcccatctggtgggttaaaatggaaaaagctccttcctttttagctcgaaaatgttcttagagctcctgtcctgtcccagatgctgcagagggctattgaggtgctgtctcagccctgcccacgagtggattaaggaaggagacccttctgtaagaacactgcaccctcatgcctggatggtatagtgtaggtgtggaagtgctgtttgtccatcttcctttactttggagagtccacctttgatgggtcctctggaacctgatgactgctgtgcatgtggaaagactgggaggcaggtgaacatgctagcaaaaatcatccctgctccctgggtgccaggccatttgtggtgtgtcttattacttggcaaagaagacattaggacttcatttattttgtgagagaaaaggtcttgctatgttaaccaggctggcctggaactcctgggctcaagtgatcctctggcctcagcctcctgaatagctgggactacaggtgtgcactgctgtgcgcagcttaggacattaggactttaattcactggactggatttcaccccatgggtcccctgtggatgggggagaggtggaggtggtggggctggctggggagcaggaggatgaggtggcaaggatgtgcagggttgaattttctctcttttcttcacaaatagtgctagcacccttatggtacaccctacccccagcccccaaaaaacttactgaagcactgcccacccccacattgacctaccttccttctcctgcctgcctgactttgtaagtgagcccctagctttttgtcaggagtgggggtgtggatctgtgtgtagcagggtggcctcatttgtcgagtgcccaccctgggccactgtgttaggcagtcacgattgctgcaaagcctttaattagcgtcccaggttgcctggctgccttcctcactcgcactgcctttttccttttctcccttcccctcctagcccctttggccttctgtctcctctcactggggactcagacctctcttcctgtcttccctccctcccttcctaggggcctttccttgattctctggggaaaccagataggcctctgttacccctgtgagccctgttccctccacccagaagatgtggagtgaggtgaggggctctacccccagcggtgagactgtgtcaggcctttctctgcgtctgtgtgattttatgaagtctgtcttgtcaaaaccaagaggctgaggaaagtccctacatttattctttgaagatctcttgaacgctggttgctgagcacaaagcaggtggggcgggtggaggaagacttcctgaaatggagagaaggcgagtggacacccgatgacttgtagatatgtgggtagaatgctggagggagaagcggctcctggggcacccgtgcttggccccctttggatgtcggctccctttgcagctcctaagctctgtgtttggggtgggagcggctgcgaggcggtggggggcttgtttggcagacggcgccc

SEQ ID NO: 1589 - DNA, 2300 bp, Homo sapien
atgagtcaggcttcttgtgagtcagtctgttgacaagccatccctggccattcctagcccattcaaaatagaaggaagtccagggcaagggtatgagcaggccaatttaattagtgtgggctctaaggtaccttaagttagccctattaaattaaaccgcctaggggaaaaaataactgtaattatttccttctctcccctatccttgtattccaactcccaacctccatgcttccctcattcacgaaacaacctttaaaatagggactagcgcacagacgcccataaactaggtctcagcgttccttttttctgcccctttcccctgtgagcgctgggtcctggaagggagcagagtgagtccagaggtgtccgcagggcctggctgtactctaatttagggaggttgttacattgagtagaacattattccaaaaatgcacccagagtctccttcctgaaccaatgcagattcttttgctgcggggcatttcttttaaaagccccttttctctcttctacagatcaaaataagcaaactttaatggtagggaattattgtttattttgttgaaatctagttctgagttttcctacttgaaacgtgttttccccaggacactgacctatcctttaattgtttggtgcgaggcatgttagggggaggggcgttacttgtttattggaacagcgcagttaaaaaaaaaaaaaaaaaaaaaaaaaaaatcaacctaggctaacagtttcaaggctcccctaaagatgtatccaaacaggcagccaatcagcgcttacacagctttttctgcttgactcttttaaagagacagtgccgacagtgttttatcacatttaaagagatccgctctctaaaaacagtctgaaaatgggggagccttcccctatttcgccggtatctggtcttaagagtccctaatgaggggcacgcagtgtgtcttctgggttctcggcgtgggcagaaaggagtcagcagcaaatagctgggtcactctgccagcccccccctcaatttcccattgtacacctgggtcactgacaatggaagcttcccctccccctacgcctgactctcgtcccctcactccccaatttagctccatttatttgaagtttgcagatttctgtggcgagcattccgcgtcgcgggccgcccaggtgacgccccccatctccgagtggcaccctttcccgtgcagaagccgaggggctaacttgccaagactggcaaaccttggaaatttgggagaaatcactctccctcctcttaattcaagtcccctgtccccagcccccctcccccccggctccccaaagcacgccaagggccattttcgcgcggctccactttggggttttccaaagtattttaatgatctagtaaaggagcagccgcgcgcctcggcgccggctcgagccgcccagctctcagcgtggagccccgggcccggcgctcggaagccagactgggcgagagggaggcccgggggcggggcgggctgggggccgggctggagtctggggagggggtcggggtcggagcctagggggaggacaaccaagagcggagggcgagataagggctgggctggtgcgggccgcggcgggggggagctgaggggcagataagggagagggacggggcgggagggagcgagcggcgaccgcttgggggtctgcgccccctcccatcggacgctgccgcagcgcccccctagccccccagtggtccacgccgcggggagcgcgggtcagatccccctcctcgctggggcgaggagaccagggtgcccccagcccgatccacgtcgcccaccgccccggcgacagaaagagaggctcgcgcccccggacgcccccagttcgcctgcaggagcaggcagcggctccgcggaggcggccgcagcggggactgccgcggccggcgctgtcagggcgtccctcccagccggcccgggcccgcccccgcgtgcgccgattggccgaggcggccatccatcgcgggacgttgccgcccgcctcgctccctcgcccgggtagccacgttcggttgagctccaagtagaccagcggcggcggcggcggcggcggcggcagcggtgctggaggcgcagagggcggcgcaggcggagccgggcgggcgcgcgagcgagcggagagcgggcggccgtgcgggcggcggcggcggcacccccaggccgagccggcgcggaaggagttccagggcgatggggccgcggccggggctgacgctttgacagctggaaagagcgcggagccag

SEQ ID NO: 1590 - DNA, 2300 bp, Homo sapien
cagacccagggctagggacaagactacacgagctcacggtgctcacactctacttggcaattcagccaagctagggctgccgtgccctgcagtgaatgccagcatgggaaacccaggggctggagagcccatggcaaggcttcagggaaggggcggatatttcaggggagttcagagtgggggctgggggcagagggagttccaagcaagacccgggcctgccaaccccaagctccttcctggaggacttaacactgtgttgagcagttgttttgaatttccgggcagggggctgcaaaagggaggctgggggaggtggtgctgccgcctgtctggggtgcgggctgctatttaccagggccctttgtgggatgcagctctccaggctgggggctcccacaattgcttccagctgggctgtcagccagctgggaggagttgggggtaggtgaggggggtggcaagagaggaccacagggcacagaggtcccttccagcccagtgtcccctctgccttcctgggcggctgcacttgctgagagtcaggccctggtggagcatccttggatgtaagtgtgtccataaacctggaatccatccggcctggccgctcccgagctttatggcctttatgcacttaatctttcatttcctctccctgcttcatctccctgctcacttcccctctttcccaggaggaattgctcggctccaccacggactcctccccctcccctgcccccccagcttgtggaggctccaaagcccctttgtcagaaggtacccttatggacagctgtcccagcttccatgacttctgcctggggccccagcgttcaccccctttactacaaacactcctggcataacatcccacccctacccggctaaggctcctcagcagcgccaggacaaactcctacgcccagcagtgagaccctccagcctcctctcctgctccggcctcaggcacaccctaggctccagccaaggtgaactgtagctggagtcgcactgctgtcccttgcccatggggatccctcagccagaacctccgtcacgcaggctgaaaggtacacatctttccccattcagctcagacatctctttccagacactctgctccagggtgggtagggacctgtcctcagtgagcccagggtgtcaggccctggtggagccttattttctgtggaaagaggacaatatttggtcttgtttgtcaacgagtttgttgatagataaacagggtacatgaactttgtaggtgatacaggactgtaccaatgtgagggttgggagtctagctcccttccaccatctggggggggctctactttaatggaaccatgttacatttgcctcaagagtcacgttgtgctctttcctgatggaatcctagaactagattccgggagcgtggctgatctttgatatccggcacctggccagggtctagctcaggaaatctctcatgtgggagatcctccattttacccaagggagactaacacccagagagggaaaggagctcacccaacatcacacagcaaatcaggacagggttgggaccagttcctttaaaacacactgaaaaatcagttaatgaaaagagctcttggctgggagccaggagagtgagttttagccccaatttagctcccatcccaatctcgacaggtcacatgactgcagtctcctcagacccctctctggtcctcctcccttatctggtttccttccagctaattctgatcttgggggtagggaatgttttccgaaagaaggctctgctcctttaaggcccctccctccctctcctgagcaaagcctccccagagagctgggctgggactccggggaaggtggcaggtcccagccgcaggatctggtgggtcctgcactcacagaataagtctgcacaggacaaagaatgtcaactgtcccttttgttctgggggtgggagaatgggggtggggtggaggtgggaggcctgcaccaggatggcgagggatgaacaggatgggtctgcctgggccaggatgggtaggatcgggtgtgggtccaaggaggtgaagatgtcagacagaggtagcagtgtggagtctgccctttcaagcctgagagtgcttcgggctcgtggggtgcagtggggggtgatggagggggcatcacttgcttcgtcctttagcaaggtggtggggactttgcagacctcggtcccacagctcacactcactataccttctcattgggtttctctccacccctcacccacagtctgtggggccctccacct

SEQ ID NO: 1591 - DNA, 2300 bp, Homo sapien
ctgagattgtgccactgcactccagcctggggacagagcgatactatgtttcaaaaaaaaaaagaaaaagaaaaagaaaaagaaaaggaaagagattggctaaataaattgaagtagatccacataaagaaatactgtgtagcaataaaaatcatggaaaggctcagcacaatggttcatgcccgtaatcccagcactttaggaggctgaaggggaaggatcacttgaggccagcagttcaagtccagcctggacagatgggtagatcccatctctacgattaaaaaaaaaaaaaagaaagaaaatcatgaaaagataattgtttaatatttgataattaagagaaaaagcagattacaaaacagtgtatccaatatggttaatctgagtattttcaggattcaccacttgattagagtggcacattaaaattaaaccatggtttacacagaccagattcatcttgccagggtgggaattccccttctcagcacagtccacctgccccatatgtttctgggtgttcccacatgtgcctcacttgcacttggaaagtgatctaagatgtccttttgtagtaggatgagctgcagacaaaactccttagacactggattaaagaaggaagaggtttttattcggccgggagcgtcggcactttgctgttgctgacacctggggcctctgctgagctgaggctccaacactgatgaggacagctgagcaaaagatggctggagtggccatccaggctgctgccaaagccccatgcacggggtgttcatcattctgccatgacattgaacccttaccgtgctctcagaggatggtggaagcaagtgacaaagccaaggcctccgtttttgttacaccgagaggccctccacaggagggctgcttgggccccaggtggccaagctcagcacagctgctctctttgtacataaattgcccttttctccccagagttgtgggggcaggatgagttcaggtgccagcctctgtgggtgcctggaatgcctagccccctccgaatccctggttctggtgtgttgaatgtactccacctgccaagtgcctcctcctccggggattcacttccttcttagaagggaccaccactgtgttttgtcaggccccttctaagtttgccagctgagcctagatcccaaacatgacactaatggatgtttttctttttctttttttctttttttttgagacagtttcgctcttgtcatccaggctagagtgcagtggcgcgatctcagctcacggcaagctccacctcccgggttcaagcaattctcctgcctcagcctcccgagtagctgggattacaggctcccgccaccactcccggctaattttttgtatgtttagtagaaatggggtttcgccatgttggccaggctggtctcgaactcctgacctccggtgatccacccgcctaggccccccaaagtgctgggattacaggcgtgagccaccacgcccggcctgatggacgtttttctgagcgactcttctgagcccgtgatcacacattgtagatttcatatcatctcttacataacaatacatacggggggtggggagggagtggtaccaccatctcttaccaaccacgtctgcatctgccagctctagtctagcttctctctgagtaaagacatcttgggtggtatgcatttgctttgtgctgtgcaaaactatccacttttttttttctctttctatcaatacccatgaggacaagcacagcgcatcctgctcagaacctcatcccaggacacagtgcgtggtctggcacatagtaggtgctcagtcaaggtgtgaacgaatagcaaatatccctttggaaggctgagtggccggctccgcatcgcagaaggcggctcaggggcgctccgcccggactttgcctggtgcggccgcccgcgtttccgcctgcgcccagcgcccggggattgacgccttgcgggcggggagcctggcgccggcggggcccaggcctgtgtgatgtgcagcctgggcagccccgggtgccgcacccgcgccggaggggcggggaagggcagagccgtccaggaactctacagcgccgccgcctccgcgcctcccttcagcctgcccgcagcttcccgcctctggctgggctcggggacctcggaggcctgtttctgagcccctccccgcggactcgctccccggacgcccccagcgggctcctctggcctcggccctgcacgccgccggggcggagcctcccatcctttgggtaagagccccttccccgc

SEQ ID NO: 1592 - DNA, 2300 bp, Homo sapien
gttggaggggcacctgttgaaagatctagctctctgctgcttgttcctaacactaagattgattcagcctttctggaagtcctctcgtaagtctaactgaagcctctctcatttcatgccttgctgtgtggggggtggacagggctctggacttgaggtcaggggtgtgattctagccaacttcctcactgtgtgtctttgggagcctcactttcctccgggcctcagtttagccatctgtaacatgcaggggtgagccaaatccagtgagtgtgggacattgcagttgtctggagagagggtaggcttgggagccaggagctctctgggttttcattcctccttctgcagagggaggattctgaaattgccctggctgcctgtcaagttagcttggggacccataagatgagatatcccctctttgggctgacttccttaccatccagggaagtctcatgacacctgtcctgtccgcctcacgtggctttcctcatgtcgagcgtgctcgtcattctgtcattctcacaggctccttgatgcctaaagcccaatgtctggcattcgagccctccatgacaggttcccagctttcctgcaaggccatgctcctcacggcctatgactgcctcctgttctgcgcctgtcaggtcttccacctcacccctcttctcagcctatccaagcccattcagtcttcaggcgagctctagcactatctcctccaggaagtctccaggattgctccaatcctcagggccatccatgggccatcttgcagtctttaaggtgtgacttcaatttctcatttgtagacacagaatggctgaccactaacaagctgtttgagggcaaggcctgagctcatggggatggacattattagagtccttgacttgtggagcagggaggcccagagaaaggagggaacttgcccagagtcacatggtacactagtgaaagaaggagaactcaggcttcttaggcaagacaggcctggaggatgcatgattagatctgtggtgaatgagcgagaggccctgaggatggaaggaaggctgtgccctcggaatccagcgggtctgtcccagctggtctgtgctgtcactggctgtgccacctggggcatgtcacgtacccttcctaaggaatcttcccagtggggttggaggaagaccagcccgaggcctgtcacacggcaggtgcttggttattatggggtgcatgctattattttccatctacttgtccatcccagcccccatgcctgaatcctttccctgcccctccacttcccaccccccacttcccttagccaccaagcactcattgtcctgtccttagtccaacgtgagtgtcaagacctcctgatcaagcctgtgggcagaagtcagagggagaagggaaaaccctggtggtctctcagttggtggtggctagagagaaactggagtgggtgccccaaggggctgaagcctgtgtggccatcggggtggaatttggcaggtgccacttttagaaaagtcacactgcctatttaaaggaagtgaggggtgtgtcctgtccccaaccagcaactgctggatgcctgcggcctggagctgaggagctggtgggcagcgctcccggggtgaagaatcctagcaggtgggtctggtatctctccgggaggttgctggcagctccttggcctcctgccaccttccagcctgaccccttgtggacggatggaagcctcatggctgttttgcccatctgctggctgggatcagggacctggacccccaccagcccccttccctgggagtgatcacagagccaagagacactgttggcaggatgatgagctctgggactgggggtgcctggagtttggctggggctgggtgcccagtgggcgggcacaggccccttgacgtggctgtggcctagctggcagcctcgtccttcctctccgctaggcgggcactggagctttctgtgcagggctcctaggagaaggggggtagagggcagtctgaagagaggcgggacgcggggtgataacagctggctctggtgggcgggcgggagctggggaggaggagcaggagaggcccacaggcttcatttggagtcaggcctggctgttgctcaggtgaccagcttgtgtctctgggagggcgctgctttccccggccacccggcgcgatgatccagaatgtcggaaatcacctgcgacgggtatggagggtgggctggggcagcgggagggctctggaagctgggcacccagaaagagattgatgtttccattttaa

SEQ ID NO: 1593 - DNA, 2300 bp, Homo sapien
tcagcattttcttttcttttttatggccaactcttaaacagaaatttcctctagactttaactgtagagtaaagcatatgtggttgttactcgagatgtagcttctgtcattctgttaactttttgcggctatcataatatcccagttaacacacccttccatgccttattacagaagggatctgggtgaggcccagttagcatttggatcctggagtccggagtgggtggcctgagagagcagccccaataagaaaggggactcacaaaaatgttcctgcttgtctacagcccccttactgtctcctgagcagaccccagagcactgaccctgctccattccagccagcagccctgacacctcaccagggcctggctcctggcagctgctgagtttgttgagttgatttggagaatgagccagaagcccagacagactagatctccctctctccagaggttccaagaactgagaattgagcctgggctccagggctggctctgcctcaggtggcccatcacagtctcacatttccggatatacacagtggtggggagggggtgttgaatggggtcctgtccatctagcagcccacagcttgggtctcgttggatccctgtaggcataccacacatgccccgaccagccaacagaacctccctgtcctcaaacctctccctcattgtcccccttcaccacatcacctcccaaccagcacccccagactcaccactcacaatgcccaccgttccccacatcctacagaatagcaccccctgagcaccaggtcctcctgctcccatcctcactttgtcccagtgcctctccctcctgtaccttcagcctctctggtctttcctggcccctctaaacaggctctgctctgacctctgccctccccactgatccagggaaactgtcctggccagcatcgggggccttgctgtccttacagggctccatctcccagcctggctgaccactcctttcttcttgaccttcccattgacacccctcaccgccctctgctgtcccctttcctctactaatgcctcttcctccaactctccgcctgtcagtggtccccagaagtcagcctccatccctttctctctttgctttggccagaaaatgatgctcatgcccttgtctttggccctgatctcagtcctgagcccacagcctctatatccagttccctcctcgggaaggccgaggcaggaaaatggactcaggaatgacccacgacaagccccatgaccaaaatccctcccaccctgcccctccacccctcagtcccgaccatctgcccacctgggcatcattctagacaccctttcacacacacaatcaaagccaccaactgcccggctctgcctcgggtggcctatcacagcctcacattccagatctctctgtgagccccaatgtgtagacgctgaagtctctgtgcacattacaggtgattcctggactcgtttaaattctggggtcctcagaataggggcagcctctaacttgcttcccataccagggcccccagaactccctctgcatgaagtggtgactcagccccttccccatggactcgctgccccagaaccggcctgcagtaacccatgccagcatgccaggactatccatttctatcccaggtagataatctgttaaccataatctcagatgaaaggaagattattgccccttacgcagatctaatctgtctttgtcaccacccttgcctgataatgcaggattccctgagggcagggcagaaagcctggagttagaaagggaaagaacagaatgttcgggatcacccagtctagtgcctccttttacacggaaggaaatgatgcccagagaccggcagacacttgctccaggactccagaaaagcaacaggggctgggattggtctcctgactcccaagcaggggcagacagccaggggtcggggctcggtccaacattctctgctgcctcttactgtgctcaaaggtcattttagatatggtagatattctggttagcctgttaagatcctgggagggtgtggggaagaggattggggcggggagggaggaggggcttcaggggttatctccagaggggatattacagggctgcagagcagaccaggcccggtggagaattaggtgctgctgggagctcctgcctcccacaggattccagctgcagggagcctcagggactctgggccgcacggagttgggggcattccccagagagcgtcgccatggtctgcagggagcagttatcaaagaatcaggtcaag

SEQ ID NO: 1594 - DNA, 2300 bp, Homo sapien
ctgaagactctggaaagagagcaaaaacagggagaacctaaagggaaaccgacagttacaagaaaataaatagctaccgggtgcaaaggatatttaaaatctcacaaacatgataattgaaccaaagaagtcagaagaaaggagtctgtgttttataattccatttatatgaagtatgaaaacaggcaaaccatattaaaagtcaggatagctgttcccctgacgaggaggatagcgattggaagtaggacatgaggaggatttctggggtcctggtaatgctctatttctggatctgggtgctggtttcatgggtgtgctcacttggtgaaaattcataaaaatagacatgacatatgcaattttttgcttcagtacaaacttaaaaatcaaaagggagcagagacaagatggacaggcaggcagggcagactgtgaaggggcctcaatgccagactaaggagcttgacgtgaccctggcagcagtggaggacgctgaaggtgttaagaggggaaatgagttgtcagggaagctgcctctctgcctaatgcgggtggctaggagaggggaacacctgccctgtgggacattatttacaggactggccagaatctgggctttcaatgacgaagatctgagctaggatggagggtgtgaggttggaggccaaggatttggaggtaaaattggaaggacttgggagtttacatgcaggaggccagagaggaagagggaggagtcaaaaacgatcattggaagaggcttttcactggagataaagagtgagggaggggacgctggggaaagaagtaagtttgagggaagaatttgtttttttttttttaatcagggtcttgctctgttgcccaggctgtagtgcagtggcaccatcttggctcactgtagctcgacctctcagatgctggtgattccccccacctcagcctgctaagtagctgggactacaggcgcatgccaccatacctggttgatattttttaatttttatttttagtagagatgaagtctcactatgttgcccaggctggtcttgaaatcctgggctcaggtgatcctcctgcctcggtctcccaaattgctgggattacagcatgagccactgcacccagccaaaggaaggatttttgctggggaaggggcaagtggaggaggaatcctcgatgacacaaggcctctgaagcagcagaaggagactgggggtgcaggggaccccctgtccagatttggacaggagaggagagaagcagaaaaagtgagatcctaggtggactggagggaattcaggagagcccatcagctgctcactaatgtgaagtcacagtcaagtgtggggactgagtcggatgaggctgacttctaggcagcttgtctgacaacaggttatgcagtgtatctaaggacatcctgacctgggggaacaggaagatgggaagattccattatcattttgtaaatggtgcccagtgaagtttctattagtatctagtctccaatcatcttaattagctgagctattgctcatcatcaaaaggattttctttagaaagatagccgtagagtcttgcttttcttatcaaaagatctagatgacactgctgtgccccggcctgccccaccctcattcctgccctgctccacgcacttatctgtgcctggaacaggagttagggtggagtaggaaaaagatcaaggatttgagtgcacaaggacaggcaggcatcctagctcctgaccttgggccaatattttctcgctatgggtctcagttgcctcatcacagaccacctgatttcaaagcccttgtcaccctgaaatacacagaggtccaaggtcatatggtgaggggtttttatgggaagacttgaattctggatgagaaactcagtgtttattagcagtgaagtcctttccgggaggctgaagagagtctcagggcaggtagttctttgaaaagaccccatctcttctccccactatataggtgggagcaggggtctcattggctgagggacttctgggtcatggtgacctcataaagcccgtaacactggcctgggctggggaagcctaggtaagctgaggggcagctctgggaaagtcctaggggtgggggcagtctccacagcctcccacaagggagttaccaccttcccgcacttctgggtacaagtctcctgctctggctgtattccacagttagaacttcatatctttggcttagagctggattttctgttaccatgtggatgctccaggtgaaggtaacacattgaacttt

SEQ ID NO: 1595 - DNA, 2300 bp, Homo sapien
ctcaatgatgaactggacaatctattgatagttccaccccttgaaggctctagcaacccttgtccagggcctggaagggttaattgaggtggagaagggaggatggcaattggttaatgattctctctgtcttagacagcactagttgttttatgggtgtgctctgacctttccatctggggctccaggattgcagggcaaaggccaacaggcagtttgtggctgtcagcagggagtagtgagctcctttagctcctgtagatcccacccaagcccctcaagagccacggctcctcctaatgcacagtgtctgtttggtagagggcaagccatgggctaccccagtcactgccaggcagctctgaagacttgcctgtctgttgcaggatggaggaggaggactgggggtaggtcagctggggttgagatctgtggccttctgcccagtgacctggtatggtgcatctgctggggtagagatgaagtctttcttcctcagcccaaacaagttaggtctttgaagatcttaatcactgcctcgtaggctgcaacaagccatattttccaggttaaaaatgcctccctttggtgactatggtcctgtgtgtgtgcatgtggcacgtttacacacgggtggcagagatcattaagggaagattcacgctcctccttaagtaagaagagacaaaattatggacatgaaattaagtacagggctttggaaagggactgtgaaatcaaggagcaatcaaattttacattcagggtaaaattgcctctggtgctgatggtaagtgagcatttcttgcttccaaggcagatgcaaagctgtgcaggaactgcttgcttggaacttgcttccaaggcagatgcagagctatgcaggaacttgcttggaatgaaggcagcttccactgggtgctgagtgccttattcctttctgcccacagtgcctggcagagaggaataaaacaagtagctaccatttagttaagggcttcggtgggccatgtactccatgccaggcactgtaactacaatcacccctgtggaaggctttatgtgttccctatcttagagatggggaggacaagggccagaggggaaaagtctcttgcccatgttcacccatactagcaagaggttgagctgggctttaaactcaggactacatgaagaaatatatggtctttccaaagccatgctataaagatacacagcaaaatttgtggagtgagtaaatgattcactgaatgagttagcacatgaatgaatgataaatgaagaagtgatgaaatgagttagtgaaagaatacctcatcaaatgaagaagagtctccccttgccacccattgcccttctcttatttcctcctcctttccctctggccttcctcttccctctcctctttactgcctcttttcttctcccttatccctcccttttcttctcttacctctcctttcttccttcttctcttccctcttgcctttctcctctcctcccttccttccttgttcctctcttatctccctactttccttaccaatgtttagtatttctccctatgcatgttgatcgccatcccgatttttttttttttttgagacagggtatcactttgtcactcaggctggaatgcagtggcgtgatcacagctcattgtagcctcaacctcctgggctcaagtgatcctcccacctcagcctcctgagtagttgagacggcaggcacatgccaccacacccagctaatttttgtatttttttgtagggacagagtctcattatgttgtccaggctggtctcaaactcctggactcaaacaatcctcctgcgtccgccttccaaagttctgggattacaggcgtgagcccctgcacccagctgcactccctgtttcttgcattttcttttctcttccccagctctctcatctccctggcccttcccccaccaccactgtgtggttctgtcctcaccccttgccaaaagaaattaaaaacaaaacaaaaactacaaacaaagaagagagaaaaataatgaaataacacaaacgggctttggacatttactgtgtgccaggtgctatactagacattagaaattggcagagaacaaggcagatgcagtttctgcatcagtggagctcattggctagtggggaagccagataccgtgagccaagagacgggaaggaacaaggtggcctgagaactttcaggtggcccccacctgtctaggggacctggaaggctcttagcatttgagctgaaacctgaaagggtgaagcagcagtca

SEQ ID NO: 1596 - DNA, 2300 bp, Homo sapien
gtacagggctttggaaagggactgtgaaatcaaggagcaatcaaattttacattcagggtaaaattgcctctggtgctgatggtaagtgagcatttcttgcttccaaggcagatgcaaagctgtgcaggaactgcttgcttggaacttgcttccaaggcagatgcagagctatgcaggaacttgcttggaatgaaggcagcttccactgggtgctgagtgccttattcctttctgcccacagtgcctggcagagaggaataaaacaagtagctaccatttagttaagggcttcggtgggccatgtactccatgccaggcactgtaactacaatcacccctgtggaaggctttatgtgttccctatcttagagatggggaggacaagggccagaggggaaaagtctcttgcccatgttcacccatactagcaagaggttgagctgggctttaaactcaggactacatgaagaaatatatggtctttccaaagccatgctataaagatacacagcaaaatttgtggagtgagtaaatgattcactgaatgagttagcacatgaatgaatgataaatgaagaagtgatgaaatgagttagtgaaagaatacctcatcaaatgaagaagagtctccccttgccacccattgcccttctcttatttcctcctcctttccctctggccttcctcttccctctcctctttactgcctcttttcttctcccttatccctcccttttcttctcttacctctcctttcttccttcttctcttccctcttgcctttctcctctcctcccttccttccttgttcctctcttatctccctactttccttaccaatgtttagtatttctccctatgcatgttgatcgccatcccgatttttttttttttttgagacagggtatcactttgtcactcaggctggaatgcagtggcgtgatcacagctcattgtagcctcaacctcctgggctcaagtgatcctcccacctcagcctcctgagtagttgagacggcaggcacatgccaccacacccagctaatttttgtatttttttgtagggacagagtctcattatgttgtccaggctggtctcaaactcctggactcaaacaatcctcctgcgtccgccttccaaagttctgggattacaggcgtgagcccctgcacccagctgcactccctgtttcttgcattttcttttctcttccccagctctctcatctccctggcccttcccccaccaccactgtgtggttctgtcctcaccccttgccaaaagaaattaaaaacaaaacaaaaactacaaacaaagaagagagaaaaataatgaaataacacaaacgggctttggacatttactgtgtgccaggtgctatactagacattagaaattggcagagaacaaggcagatgcagtttctgcatcagtggagctcattggctagtggggaagccagataccgtgagccaagagacgggaaggaacaaggtggcctgagaactttcaggtggcccccacctgtctaggggacctggaaggctcttagcatttgagctgaaacctgaaagggtgaagcagcagtcattagctggggaaggggagtggagatggatgcccagcctgtggaagacccagacctaactgggagagcctgcctctttggaggaagtcaaaagaactctgcaagggtggaacggaaaaggaaagggacatatggaggggcaaaaagggtgaaaaggggactggggccagatacagagggccttttgggtctgctaacaactggaggactctatcctaaagataacaggaagccatggaggggtttaggcaaggggatggcttagagatggtgttggctgcccagaaggccagtggggtgagtgaccttcctctctttgaccttcacttccttatgtataaatattaaacttactctctctctctctctctctctctgtgtgtgtgtgtttgtgtgtgtgtgtgtgtagtgcggagcttgttaacagacgtgcatgcctggcctgtggactgtgcagtaagtgttgaaaaaggcactcttccctgacttgatttctttctgcatctcctcccaggggcccgctcctgcttaaaaacaccatgcatgcaggtgagctgtccctatgattcccacagggagggtagccccagattgagggtaggggtgctgggaggactggggagttcatccagcagttagattgctgtgttaaggcaggtgtttgacagctgccctatggtctcctccacagagcccacttcacccggaac

SEQ ID NO: 1597 - DNA, 2300 bp, Homo sapien
gatggtgagctcgtgggcaggagaggtcagtctggcctcagcctcccacccaggaaatgctcccatgctttctttgaatgagtaaaacaaggcagtgagtgatccacaccttcgggtggttgtttgagagccaaagaactgtgcagagctgtgcaaatggggtgtgctccaataagggcagttgatgtcattcataggaaccaagaagatcagtcaggatggtgagggcccagctggcacatcccagtctcccacttggaagaattaaaccctttctggctgtactccccaccagggttttttttttcttgggtccactaaacagtcagactcataagactactgggggcctcatctgacatccgtcacacaggatacaggacagggcagtgtcaggagctcctccttgcgggggtccttgcagcagcccccacagcaggccaggcagaggcacccagggcataacatttaaggacatagtctcgggtgccaagtctgcacttgtgtgagcctgagaatgagggcttccttcaagttggcaccctggatgcctcactttccttatcctagtcttggccctgagtctaggagctggtctcttgggcctctcaggtgaaagttcaggtgtgacgaaaggagacctatagggtggatataggagctgccctggcttaaatggcacaggcctcacagagaccagtatcttttacatcttggctttgcttccagggtccccacagggacaaaccaagttacaagggtcactgcatcctgggaagctcaatgctatagtgtccccatcagttcttatagttaatttatagttcctccctgtccagatgcaatttaccagtggagtcattattaccataagtaatgttgcctagcaacatagttgacatactgtatcaggttgccaggggaacagagctagaaagtgaatggagggttgaaaccctcttgtagaaggggaaaggtttttgttaaccctttagtacactggcctgccagtgctttcaacaccctatgataggagtttggttgggtgcagatgcttttccttgcctggtgtactgccttttaagggatgggaacagaggctccctgatattatgtgacaagtgcaggatcctagccccaggctgctcaactgcctccactcttgctccttggttagaggaatgagcacaggctttgaagacatcaggcctggccatatctggactctgcagctcattagctgtgtaatcttggactggtaatttcacctctctgagcctcaattcctcatttgtaaaatgggaataacaacactcaccttagggttattgtgagaattcagtgatcttgagtgtcttgaatccttgttcatgtctgtattccccaagatttgcgtagggcctggtgtacagtaaatgctcagctaatatctgccgaagtaatacattgcatgtaaaacgtaaaacatttggcatgatacctgggaaatagggtttctttctttctttctttttttttttttttttgaagatggagtttcgctcttttctcccaggctggagtgcactgctggcgtgatcttggttcactgcaacctctgcctcccgggttcaagcgattctcctgcctcagcctcctgagtagctgtgattacaggcatgcaccaccatgcccagctaattttttttgtattattagtagagacggggtttcaccatattggccaggctggtctcaaactcctgaccttaggtgatccacccactttggcctcccaaagtgctgggattacaggtgtgagccaccatgcccaccaaggaaatagggtttcttgtccttctagcccctgactctttgggagtgttttctggactattccttgcaggtgtgcccatggatgccatttcattggcatcttaccttccccctcccaaaaccatttggaggctgggttagccccactgccttggccaccactaattgcccacatccctgacctctcagcaatggagcagagatgtggaggcagctgatactgtgtaagcccagctgtgatgtccgagacctcctggatctgctcctgggcagcctgaaggagaagcccgtcaccaaggagggccgggcttccatcgtgcccctggcggtgagcacccagtcagccagcccctattgctgcctgtcctgcccttcctctctccttccctcctgctgagctaagcacacccggcctcgagtaccgcactctgccagtaactagttgtgtggtcttgggcaggtctctggctctggctcttgtctgt

SEQ ID NO: 1598 - DNA, 2300 bp, Homo sapien
gtggtcctgtgcagctgagggtcttcagcctggctctcttactgatttgtgctgtgccctcaggcaagtctctttcccattctgggcttcagtttcttcatctgtaaaatgaagcagtgaaaccagatgacctctgagatcccacccaggtggaaaatcctgggaacgcaggaatccaggtgatcctggcttacccaggatttccagtgtcacaagcaaatcccccccacaggtccccctggggctggatacctgaggggactactcccccttcccacccccagggccatggtgcagtactcctgccaggagctgtgccgcatcctctacctgctcatcccgctcctggagcgaggcgacgagaagcacaggatcacggccaccgccttcttcgtggaggtaccaacgggggcagcgggtacacagcgggagctcctcccgggcctcggttcacgtcactggtcatttctcctatgtaaacagtactttatagtttacaaagccttcccatgggcatgacttctcttgactatgatgatcttgttggtctccctccctcccctccctgtctctccaccctttactccattccactcttaaccagactcccctagtgcccagggaaccaccaacctttgctgggcacctctgtgtgtcaggcacgagacatataaatgtgaatttgactctaccctgccctcaaggaatttttggtgtggcagaggacacagaggacaccccagttataacagggggtgataccagtgagtgatttgtactatgatggggccatctaggctgtggtggggaaacaagtgacttgagggagggaggcatcagggagggagggcttcctggaggaggtgacatctaagctgagtgtgtgttggggaggtgctagggagaggtgagtcaggagaagttggtggggacagacccagaagagagagacttgctaataataacagctaatatttattgagcacttaatatcttccaagcatgttctaagagcttgacacacattgattcatttggtctcatactaatcttatgacgcagatactattccatgccccgttttagagaaaaaaaaccctgaggcatcaatttaagaaactttcccaagaccgcacagcttgtaagtggcagatccaggattcaaataaagacatctgggctctaaaaccctcccctttccttttagtttttaaaaaattgtggtaaaatatacgtaacataaaatttgccattttaaccattttaggtgtacagtccaatgacattaatacattcatattgttatgcaaccatcaccaccattcatctccagaactttcgtatctttcactactgaaactcaacacccactaaacacaaactccccgttccattccctcagcccctagtaacctctattctactctctatctctatgaatttgcctattctaggtatcttatgtaagtggaatcatacaatatttgtccttttgtgcctggctgtttccctaaacataatgtcttcaagatttatctatgctgttgcatgcatcacaatttccttacttttttttttttttttttttttttttttttgagatggagtctttctctgttgcccaggttggagtgcagtggcgtgattttggctcactgcaaattccgcctcccagattcaagcaattcttctgtctcagcctcccgagtagctgggattataggcaagcaccaccatgtccagctaatttttgtatttttagtagagactgggtttccccatgttggccaggctggtctcgaactcctgacctcaaatgatcctcccacctcagcctcccaaagtgctggaattacaggtgtgagccaccacgcctagtcaaaatttccttactttttaagactgaataatatttcattgcatgtacataccacattttctttatccatttgtctgttggctgacatcgtaaaacccactcttttaaccaccacgcttgcctagttcttgtgacctgatggttgtcatgaggcaggtctaggctaaactaggatctgtatagtgaggctcagaggcaagaggctcattgtctgcttggatagtgtgaaggttaaggaaggcttcctggaggagatgacatttaaactgaaccttaaagtttgccaaatgaacaagaggcagcatgggcatcctaggtacttttgtcatcttttctgccactgcaggtgggctatgagttgggagaagggaccatgtcacattggtattgcacccccaggtccagctttaggagggcccca

SEQ ID NO: 1599 - DNA, 2300 bp, Homo sapien
tgaaggttaaggaaggcttcctggaggagatgacatttaaactgaaccttaaagtttgccaaatgaacaagaggcagcatgggcatcctaggtacttttgtcatcttttctgccactgcaggtgggctatgagttgggagaagggaccatgtcacattggtattgcacccccaggtccagctttaggagggccccaagaagtggggatgggatggatgaaggagtgcctgaacaaatactgcaggtcaccagcagaatgtgtcacctccagggagagcaaacctggccttggggtcgggagtcctgggttccagccccagctccatccagttctaactccaatttccctgaccatggtgagggaaagagaaagggaaactaccattacttacaggcctactatgtgccaaacacttgtattgacctctttcaaatgttatttcactaatctgcacagcaaccctgcgaagaaggaattgtgatactcatgcttaggtgagttaaggggaattttttaaggtcacagagctcagagagtccagagagattcagaacaggcctgcctgacacggtcctctactttggtcagcctcttggagaggcacttctaagtctgttagtgtctaccacatgggttcttgcaggagaggagggagggtggatcttgccagaccttatggggcattcctgtgtccaccacaaagtcagggactctaggtttaacttctccccaccattccctggactcctgaccagcagcccttccgccctgcagcaagggtcttggcccaggttcagtcttttccacctccccagaagaggtgtctgctcctggccagtcagccccaccattaaagccgtggcactttgatgcagctcagatgcccctttcaccctcgtcccctccgccccggcttcctgtcgccctctctgctgtgatggtgtgtgtgcttgcttctcccagtggaaggtgaactccttaagggagctgtgccatcttggacaagtcacttaacctgcctgtgcctctgtttcctcacctgtagtatggggatgatgacttgaccacctcctagagtggtcaggtttacataaagcacttagaacagtgcctggcacataggaagtgctctctgtgagtcagttaaattgcttttagggttctcatgactcttttccgtgtctccagtgcccagcccagaagctgtgcacagcaggcctgaatattggtggtgtgaattggtggatggcgggtgataggtggagcccctccttttctgcctcctcccccggtgacctgtcctgccccctcctccagctctgcctccccagctctttcctcccacaatacagacacacgggctcaacagtcacaggagatgtcaggcaagggcatggaggggagaagcgtttgtgagagtcatgcagcaggcatcgaagtcctgttggctgccgtgggtggggaggccagtgggggagaggagggggataagggtgaggctggtgtgcagcttggacgatggggggctggtagtgctaaccctgccacagggagtgcaagaggagggcatgcctaaggaggaaaggagccaagtttctttcttttttttttttttggacggcgtttcattcttgtctcccaggctggagtgcaatggcgccatcttggctcactgcaacctccccctcccaggttcaagtgattctgatgcctcatcctcctgagtggctgggattacaggcacctgccaccatgcccagctaatttttgtatttttagtagagatggggtttccccatgttggccaggctagtctcaaactcctgacctcaggtgatttatccacctcagtctctcaaagtgctgagattataggtgtgagccaccttgcctggccttttctttctttctttctttctttctttctttctttctttctttctttctttctttctttctttcttttctttctttctttctttctttctttctctttctttctttctttctctccctctctttctttctcctttcttccttctttcccctttccttccttccttcctccctccttccctccctccttctctctctttatttctttctttatttccttctcttttcaaggtggagtcttgctcttgtcacccaggctagagtgcagtggtgtgatcttggctcactgcaacctccacaccctagattcaagcgattctcctgcctcagcttcccgagtagctggggcgtgtgccaccgtgcccggctaattttttgtatttttagtagagatgggggtttc

SEQ ID NO: 1600 - DNA, 2300 bp, Homo sapien
gggtggcccctaagcacagcaaaggctgatcgactcagttatcggccaagaccactaagtagttttgagttggaaggttcagagtgtgctgggcaagtcactttgcttctcttaggttcccctattgttacctataaaatgggttcatacctcacagtgttcttatgggaatcaaatgagaaaaaaaagaaagcaaaaagactctgtaggctctggactcagtaaaggaaaagatgatgaagaggagaataagggagggaaccaggattagggagcagggctggaggaggaagtgtggaaaaggaggtttggatttggagggaagggagtgctaggaccagatgttctgctgggtgtggaagaatcagaagggaaaagataaagtcctggcactggaaggctcatggtccccatgcgccatccttagccatgctgtctccatccccatatcaaagaatgactaccctgccagctccactgctgggcttcagatctctgtcttaccttggtctcttatcagcatcctccttgtcaatctcttaaccaacctccccccatcaatgcttcacctggcagcccaggccttcctaagacaaatgtgctcacggccattgctcctcttaggtcttttcagtgactcattatcctctgcaggaccaaggtcagtgaggcaggcaggccttctggcccctacccacttgccggccacacctctttttttttttgaggtggagtcttgctctgtggcccaggctggagtgcagtggcgcaatctcggctcactgcaacctccacctcccggattcaagcgattctcctgccccagcctccccagtagctgggactacaggtgcgtgccaccacgcctggctaattttttgtatttttagtagagacggggtttcactgtgttagccaggatggtctcgaactcctgacctcatgaactgcccgcctcagccccccaaagtgctgggattacaggcgtgagccaccgtgcccggccctggacacacctcttaacacttgcagtacccagcatggcgggcctgtgcacacctccatgcctctctccacatatgagctcccactgcctaaaacgctgagtcctctatccatctgcagagaccttcctcagctctgatctcagctctgcatcaccttgaatcccacccctctgagccttcactgagcagacctgtgacccaatgccagtttagattggtgtgcttcctgtctgcttttcattccagaccaggctaggagctccccaaggctgtagccccggtgcagggacctgcagccatttgctggccggtagagaggctgcaggaagccacagcggctgcctaaccaggcctgcagcacctggaccgaagacccttttccatctgaactgtgggagttaggggtggctaagctcagagacagaggtctgatcagtctctcctttcctcgaaactctccaaaaggtcccataccactgaggaaatagccaaatcctcatagtcacagcccttttgtcctcccacctcatcatctccttgcccccttcctcactctgcttcagccccactggcctccttgctgttccccaagcacagaagactctcccgcatcaggcttccggactgttccctgttccttccatgggaatgcctttcccagacccctcctagtcactcccaggcctctggcagaatgtctacccatcctgtttaaaacttttccccaatagctcttgctacccctgacaaactcttacatctcaactattgtcgtttcctccccactgccttagcaactcctagagggcagagatttcatctgctctgcccaccgctatatagccagccactagaacaggccggaagcgcagaaagagctaagtaagtatgtgttgactgactgacgaacaaatgaatgaagtgagatgggggctttggggattcgggttcacgcaccaccccaaaagcattcgaaggccgggcgaggccaggcactgccgaggagggcgggccgggggaggagcgtattggccacgcccggccacgcccccaggccggcggaacccaaggcgcggggacctgcgctgccgggaggattgagggaagggaacccgcgccgccggaaggagccgctcgcttcacggcgctgggacccgggctggaaggcagggcatcagctatggaacaacctgggcaggatcccacctcagacgacgtcatggactcgttcctggaaaagttccagagccagccttaccgtggcggctttcatgaggaccagtgggagaaggt

SEQ ID NO: 1601 - DNA, 2300 bp, Homo sapien
tatgttggccaggctggtcttgaactcctggcctcaagtgatccgccctccttggcctccagaagtgctgggattacaggtgtgagctaccgtgcccagccagaatttctttcctttttaaggctgaataacattccattgttgggattttttaaataaaaaatcacaatatccagtataaagaattacctttttctaacatttgagagtaggatgccagctgatgtcccattacccctgaatactttactgtgtatttcctacacaaaaggacatttttctttataatacccatatagctatcaaagcaggaaatttacattaattcactgttaccatctaaccctcagactccattcaggtttcacaaattctttatagcaaaagggttttgttcagaatcacatactgtatttagtgatcatgtccccttagtctccttcagtatggaagagctcctcagtctttcctccactttttttttttacttaaaaaatttttattcatatttttgtgatcctgtgactcaactgcaggacactttgaagattacagaccacttattttgtagaatgtctgtcagtatgggtttgtctcatgtttccttctgactagatttggattatacatacttgtttgtttgttttgagatggagttttgctcttgttgcccaggctgaagtgcaatggtgtgatctcggctcactgcagcctctgcctccaaggtccaagcgattctcctgcctcagcctcctgagtagctgggattacagctactcagataccacgcccagctaattttttgtatttttaatagagatggggttttgccgtgttggccaggctggtctcaaactcctgacctcaaatgatctgcccgatttggcctcccagagtgctaggattacaggtgtgagccaccatgcccggcctggattatgcatatttggctggaatattacagaagtgatgctgtattctcattgcacctatcagatggtacataatctccatttgtcccattactcatgatgttcactctgatcacctgattgaggtggggtctgccagccttctccactgtacagttactttttctttatgattaataagtgttttatagggagatgctttgaaatggtgtaaatatcccattgctcgtcagatattcaacatatttatttatattggtggatttatagtttcctgtttcatttaatgagttttaatctgttactatgattgtttcttttatgctcagaatatcccagatttggccagtgggaatctcttcaaatttgtttctgtgtccttttgacttgtgtctattttttaagtggttgctttcttacataggatgttctaggttcagattgcgctttccttgccccagctctggaattagctattttttcccaagaagccctggttctttctagtgaagaatggtatttagaagccgagatctctgtgcaataagtgtataagtgtatcgattaatacaatgggggtagagaggcaagcttactgcctcaatgccttctcagtgccacagcttgggggagaaagagagagaaagaaagaaaggagagagagagagagagagagagagagagagagagagagagagagagaagaggagaggagagagaagagaggagagaggagagagagagagagagaccatgaagtctcattggtatctccaactcttaattcaacatccacaggattttttctccctttctatatttgtaacaatgactttcttcttgttctttttttgtttttgtttttttgagacagagtctagctgtgttgcccaggctggagtgcggtagggagatcttggctcactgccaagatcaacctcctgggctcaaacaatcctcccacctcagtctcccaagtagctgggaccacaggcgtttgccaccgtgcccaactaatttttgtatttttagtagagatgaggtttcaccatgttgcccaggctggtcttgaattcctggactcaagtgatccacctgcctcagcctcccaagtgttcagattacaggcataagccaccatgcctggcctgactttattattcttaatatagttatttgtttgatcagttcccctcctgtcatcaccactggcccctctcctatgtggagccttcctcaccctacttggactcttgactccacatgttacgctgctgccccagcgtgggcgtctttctcaccccgcacagactctgacatcccacactgctcaacgaccctacatggacatcctcctcatcctgcttg

SEQ ID NO: 1602 - DNA, 2300 bp, Homo sapien
ggggaaagcctctaccacagctctgggctataaaggctgagcaaggctcttagagacaaaagagctcaggtccaccccagccctgcctggcctcctagctggtaggcaaatgcagtcgtgtgctccacccaagctgtgttttcttcaactgtaagaccaggataataacatggcatctacccctgccgcctccaccactaggttgtccagtgcctttcctctagggctgcagatctaaccccggtgcacattagaatttcctggggaactataaaataataatgtctgcacaaccagcatcttgggacagagggtggcagtgggtgcatataatgactctaatgcagtcaaggttgagaatcactgctctggcctgtgtgccaagctctgtgtgaggagctgggagaaataaagatgtaaaccacaccacaccccatgcttccctcacactggctcatcatttcctgagctgtgcctttgaatgtcctggtccctctgcctgaacattggcactccactcccactgccattcttgtctgggtagaccccattcatccttcaggtccagctcaaaggtaacctcctcagtgaagccttcttttcccacgctcccgcaggggtttgctcagcccctatcacaccactgatcacacggagttgttcctggaagatcctgtcgtactgagagcttcttggggccagtatcggaatcaccagtgtcttgcattgggtctggtatgttttaggcattcaataactgtagttgttatcaggttgagttatataacatgcagttcccacttcaggacatttgcatttcttgtttcctgtgtctggaaatttcttcccctgcaaggctctgtctctcacccccttctggtctttgctaaaaacgccacctacttgatgaggtttttcctgatcctcctattttaaattgcaaacacttggctgggcgcggtggctcacacctataatcccaacagtttgggaggccgaggtgggtgtatcaccacctgaggtcaggagttcaagactagcctagccaatatggtgaaaccccatctctactaaaaatacaaaaagtagtcggacgtggtgggcacctgtaatcccagctactcgggaggttgaggcagaagaattgcttaaacccgggagaaggaggttgcagtgagccgagaacgcgccattgtactccagcctgggcgacaagagcaaaactccgtctcaaaaaaacaaagaaaaaaattgcaaacacttaactcccccactccattctccttctctaattttttctttatagcccttatcaccatctgactgacagattcttttaaattttgatattttgtttgccatggattttttgcattttgtttttttaaaaaaacaattgtattaaaatactgtttatcttggttactgagttctttgctcccattccctgccctgcttaaatttcgctctattggtttattgactgtgtcctctctagaacacaagctacactgaacgcagttaattttgtctgtttggttcacttcactgtccccagtgtctacagcagtggcttctacgtggtagcagctcaaaaaatattttgtgaatggaagtttgaatctgtgtcttaaagactgtcttgggcactgtaataaaggcgtctttctcaaactgtttcacaattttatactatttaaatggaaagcccgtaaaaatcataggatagattagaaactacactgcccagtgtgtcgtcatggttacactgtcgccagtggttctcctattgggggagtgggcggggcctggcaggggcaggaagagcaccctcaagtcatcatagagttatacctcccaagttcctagaaagtacttccggaacggtgatttactcaaggctgccctggccaatcaacgatcttggggaaagccgggtactcgctctttggctacacttccggaaaacctctcacgcgcgcctagcgtggggcggggccagagcgcccctgccctcggccccgcctccgtgagcgcggctttgcaattggcgaaaagggcaggaggcggggcttaggagcgggcttgctcgaggcgcaagcgcgctggcccggcacggcggtggtcttgcgggaggcgtgggctgggattgcggtaggtgaacgtgggtgactcccagacctgagggacgggcgcgggcagcgaaatgaagcgagcacgcggtgtgggcgcggagacctaggaccctggtgtccgttttcccacttgcatcccgtccttgagttggggcgggcgagaat

SEQ ID NO: 1603 - DNA, 2300 bp, Homo sapien
acaatggaatattattcagcctttaaaaggaaggaaattctaacacgtgctaccacatggatgaatcttgaagacatgctaagggagataagccagtcgcaaaacaacaaatattatatgattccacttatgtaaggtaactagaatagttgaattcactgaaacagaaatagaatggtgggtaccaggtgctgggtggggagagaatgaggagttattgtttaatgggtatggagcttccatttgggaagatgaagttctggagatggaaggtaggaacagtggtatagcagtgccctcagggacaaggacgaggccaggggagcattcatgcacttaatgccactgaactgtacacttgaaaatggttaacactgtaaattttttgttaagtatacgttgttgcaatttttttttctttgagacggagttctttgctcttgttgcccaggctggagtgcagtggcacaatctcggctcaccgcaacctccgcctcccgggttcaagcgattctcctgcctcagcctctcgagtagctgggattacaggcatatgccaccatgcccagcaaattttgtatttttagtagagacggggtttctccatgttggtcaagctggtctcaaattcccgacctcaggtgatccgcccacctcgacctcccaaagtgctgggattacaggtgtgagccaccgctcctggcccgcaatttttttttcaaagccaaaccctctgtgaatccacccctgatactctcaagcaggtgagagaacgagttttatcacaggatcaccagcaatttatagcaaaattttcaattaaaaattattaaaattaattttatatttaaaaattgacaggtgaaacatggcaccaggatgttgttttaatttaactatttttttttttttttgctaatgtcaaatattttttcaagtttactaattggctttatttcctcttttgaaatgctggtctgtgttgcttcatcttgaaatacatagatatttcatctatatgaaatataaatatttacatctatatcttcatagatagtctatctagatttcatctagatatatatttcatctgtctgtcaagatgaaacaacagggatggcaggagccaggcccaggtggaaagaagagcgggaggaactggcccctgcagcagggagcactgccacccagcctccaggctagaggttaggggaccactctagacctgggagggacatttgccaaagcaagaaaactgggaccacaggtggagtgcaagatgggatgggaaccaagctggaggagtgggagctgacatttatccagagtggccatttatcaggcttacctgataaatgcggaaggattgtcatcctcatgtcacaggtgaggaaagtgtggcaggtcatactttattagggttggagaagcaggattagaaccagcacatgcagcccatagtctttgcacaggagctcactgctgagcagagagggcgcagagaaatcccaggaaggaagcctcataaataatggcccaaaaagagaggagggaggtggcaggctccattcagaggaaaagcactgaggacctgcagagaggatgggacagcggcaggagtaagggtggctgccgcagctagaacggccagtcctgactcagctcaagcagacagggcggagcagcgcccctggaggaagggcccggccttcagcaaactggggttccaggtctacctacttgggtacgccccagctctgtgacctgggcaagttctcttcctcctcttgagcctcagtttcctcctctgcttagcagcgtaaaaacacgccttttgccttgcaccgaggtttgcgcaccccgtatttgacaatgtgcctgtttttctggcacacctggttgtgcaatgtcagcgtctagaagccgctgagcagcgaaagcggaaacacctacagggcactcctcgggcccacccacctgcgggaggcgccctgagaccgagaggccgcagcgcccggggcctctgccggctgcccctcgcctcccgcacggagctcgctcggggaacgcccccatccactgccctccacagcctcagggacaagggtgaggccaggggagcagagggagcagtcatggcggagctggaggctgtggccgacgatctagacgccctcatcgacgacctggactacctcccgggccactttcacctggagatgcagttgaacttcgagccgcgctcgccggccccacagcgcgcccgggacctgaagctgcagcgggagggtctgcggcag

SEQ ID NO: 1604 - DNA, 2300 bp, Homo sapien
ggagctctccaatgtgcttatgagtcccatattcatggtgtgaccctatgcctcacgagatgtgaccagggcaagttattctccccatctgagccttagtttcctcttgtgtacaatgagggtgcaatggtgcctataaaagaaaatgggtgagatgctagacaaggaagctgctgtgatgggaaactttgggctgaccagggcaggcggccttgctgcagagctgactcatttggcctgttctggctttcctggcagccacgactcccagcccagtggaccttggcttatagcctttggtcactcctccatgagtcctagagccatggggctcaggccagaagagaagcagcaatatagctgcaggcatgtctgggccaccctgagaatacccaagcagacccagggctggctgaagtgcacaggactggagagtgtgcacatccacaccttgttgacacctcaaaacagcctttccaggaagccacagtcataggtccatgtcacagaagaggaaatcaaagttggcaagggtaacttgcccaaggtcagcacccaggaagtggcagagccagatttaaatgtgtctttgaggatttatgtgttattgggtagtttgaccagatgcatgtattcattcccttgtcattcaacaaatatttcctgaacatttactatgtgctagatgctgcaccaggaggaaatgagacaagtgtctgtcctcaggcctctgtaaaggtctctaaccaagggctgggaatgacctccaattgagctcctgctgtgtgccaagagtattacctaaatcaggtcatttcatcctcacagcagcctgggagatagagacgattactttcattttatagaatgaaactgataatgctgtgactcagagaaagaagtgacttgctcaagatcccacggctgggaagggcagagtctgcttagatgacccaggctttccgttctgtgcatgttcctgaggcctgccacctctgaccatcagctcagtggtgcagcgcagacgctctgccagcagtggcccgccaggcctggagcctaagggtccagctctcagctgtgctggggagccacacttcttatctaactaccagcttgggatgtcagaagggcactgggtggggcctggcagaagacccactgtgcctctggtccaggttcaccatgggctggaagcagggcctctggtacaacctacgcctctctggcttcaatcctgtcaccatggaatggggtatggatctctgccccacctttgcctaagatccttgggaagatcacaagccatcgtgagagaaattagacaatctcagagcatggctgtggagcactggttggggggtaaagaaggagggaagagagagctgactatgccctgtgtggggtacataccctcaattcctttctttacttggaaagtcatccatatgcttcaatgttgagtttggaattctcctccaagaagtcttccctgacctacctacccacaggctgggtcagaggcctccctctctcatagacctgaccatagtatgtggtcattgcttcccccattattttcagggcagggaccacatctgggtcccagtcattctgcactgtgtctgcccagagtgggtgccagggacgtctaggggccggttgagtcctgactacccctgcagctttgcccagccctccaccctctggctctccttgccctttcccccttacttctgctcccctgactcccaaagtggagaaggagctgggatgtcatttgcccaaggcggccctctctgtgggcctcagtttcccatcagcacaaggtgaactttaaaaggttctttctgagcctaggcaggctccatgcagggctctgggataaagccagaaatcagaaacacttcctcaacaaatgactgtaagaccccacccaatggcatccatattaaatacaagaagggccattacatctgcaggggccagggaaggaccctgaaaatgtgcacggacaagttaaaaatcagcgggctacgtgcgcacgccggtgggggcgccacgtgggcgagggcgaggcccacagctccggggcgcatcacaaggcccgggttgccgtggcagcagcggaggcgggcagcgcgcaggcctgccatgagggaaagccaggatgccgccggagctcatggctggaaccgcgtcggctccacggccaccaagtggttcaccggggcgcccttcggggtgcagagccacaggtggggcccgtttgcgtcctgggctcacgcccacggtccaaa

SEQ ID NO: 1605 - DNA, 2300 bp, Homo sapien
tcttgggctcaagcaatctgcccctcttggcctctcaaagtgctgagattacaggcatgaaccaccacacccagcctgagtacttttttattcctttccttttttgggagttgtttcctaaagatcagttgtatctactttctgggactccatccttctcttcccaagtataaaactattctgattaaccagtaatttccactgtttctcctacacaacactcttcagttaatttttaggtaaattttactttccagattacctcacacccccaaaataatcagaatggttaagcttctaaagcaaagccctctttaacagagtcagacagaatcggggagaggcatttttcacattggctttcctcttcatacttcactgtccccctgttggttggagcttctagagatgtaatacaagacaaatctgtaattttaaattttctagtagccaccttaaaaaagtaaataaaacaggtgaaattaattctaatactatattttacttaatatatcaaaatgttatttcaacatgtcattaacataaaaattactaatgagctattttgcattttttctttgtactaagtctttgaaatccagtgtgtgttttactcttaaagggcatttcagtttggactagccacataccagtagctcatagctgttgtgtaagacagtacaggtccaggctatttatttttgaagtccagtgcaaacaacctctcattctttgcactttgataacttgaatatttgagcctacaatcttcattcattcattggtcaacagccgctggagtgtttactgtgcacaaagcaccgtgctagaagctggaaggacaaaagtgaacaagacattgtttgccctaaggctcagtctgtgggggtgagagacacataaagagacaattataaaataacatgaaagaacggtgacagagatgcacactatttaatgagcatctggatgggcaggggagtgctctaaatgtttcagaggtggccctgagctggcttcggaatgtgtgaggtgaactctgagaaggggatgggaaagggcattcagaggtactagcttgaccagaggcgcgcaaatgaggaatgctgaggcccagggagcctcctgagtgcatgtcagggcagagatgaatggagagggaactggataggtatgcaaggccagacagagaagaacctggtatgtcatgtttagcttctaaactaaaacatctcgaaaacttcctaaaattccatatgaaatgcaaatggcgctggatttcagcttttgctggtaaccgtggcagctcccctacactggttgctgagtgagggcagggccatctgctttgctcaccaccctacccgaggcttgcaacactgcctggcacagagcgggcctggggagtttactcgggctgaaatgccttccttcattctttctcctccgggcctcccatctgcctcagtgaactggaaaaagaggaagagtgccagccatagccttccatgcttccaatggcctctggagttcacgaacaggtcttcacctttctgggctgcttccaagtgtacacaatggagctcaccactccccactgcccaggactgctgtgtagctcaaatgaattcgtggaaagtgccccctaaaaatgaaaagatgcctctggagaccttgcgcacaccgagtggcacgacctgcagaggttaccgccaggtttccatcctccgcgcccgggaaccgcctgtccggccaaagggtgactgactcagggccggggcgcctcccagccctccggcggaaagccactgcaaaaccgcttaaggcgcgtttggaagaggcggccccgcagccccgagggcctggggccctgagtcccaactgcccacccccagtattcgcagcggaccccaccggcacccagtccctggcacccccgcctcgcgcggcggcggggagaaaagggtggagcggtccgactcccgcagccaatgaaagctgcgggttcctggtccgatccccggcgcggctcgccattggtcgccgcccgggtctcggcccaccgaacctcggcgacccgagccaatcgcgaggcggcgggcgatcccgggctccccgggctgtgggctacaggcgcagagcgggccaggcgcggagctggcggcagtgacaggaggcgcgaacccgcagcgcttaccgcgcggcgccgcaccatggagcccgccgtgtcgctggccgtgtgcgcgctgctcttcctgctgtgggtgcgcctgaaggggctggagttcgtgctcatccac

SEQ ID NO: 1606 - DNA, 2300 bp, Homo sapien
gagagggtcaccaccatgcctgggcagcatcgcagatctgacgctgggaccagtttctgaaaggtggggaagaagacagagccagaaaacctgggttagattcctggatttcaattagcacccaggcccagccccttctggtcccagctgtactgcatccggctgggtcctgagccaagtgacacctggtccctgcactcaggaggtccccataaactaggggagattcacaaatagagccattgtgtcatgtgaggacataccctggccagctcctcaggctaaggtcttactaaaccccaatagctattctaggaaggaggtgccattgtctctattttacagataaagatgtggccagtcttctggtctgaaagtggctaaggcaggaaggaaccgtgacttgtccagttccagggcctgagcttccagcctggcccagggattcaggttgaagcagggcccgaggggtgtgctagcaacatcagcctgtccaggcctggaccccaacatcagcaacctgtgactcacttctgggactacacaggcagggctgggagggtccattttgaccagtgaggggcccacaacacacacagatgcctgccctgtggaaatgagtggagccaaaagctctgtggcctccagcttcccattcatatctcccctgtgcctacaagggtgcaaagagggctgccagcggccttggtcccacctacagactgaaagtcaaaggaagtctgcctggtccttgtctcggctctgtagccttgcacacacaggcctgtgcccttctctgagccttagtttcctggtgggatatttcttcagagacagagtttgggggcccagggccctgccgctgacctgctctgtgacttggagccagtggcttcctctctctgggcttcagatccctgccggccaggctgctccaccttctatccttgggctgggaagagagttagtcacccccagctcactggggaatctaggccatgccagtggcaagctggccccagtcccccggcttgctggagtagcaggaaagggcaagaacaaaacccagaccccagctggttctggaaatggcttcccttggcccacatgaacttgtcaggatctcaccagcctgtgacttcacctacatgctgctccttctgcctggatgctgttgtccactcctactctcctaaggcacctcagatgtcctctcacggaaagattcttacacacacgcacacacacacgcacacacgcgcgcgcacgtaacccttcctccaggctcccaaatcacctgtccacaaaaactgccttcagtagccacttaacctgcatgcttaaggcattcaatcctcacagaactgtgagttagggattatcagttctccttgagggaggaaggttcagagaagttaggtgacacatcttcagtccctctccggggcctccactggctggggcagtgacgccggtaacggggagcactttaatgctggtcattatcgctgagaacgccttcctccccaggaactagggtcctggagggacgggagggcttgctgtctgactgctgtgaaaaagcaggttcggtcaacgcagtctgcagcaaacacctcggcaagtgactttcccctgtctgggcctcagtttccctttctataaaatgggggtgaacaggactgggctcgggactcctaagccctgtccggctgagccttaacggctcggaggagtttgtctccatttccaagcccgccctggagcgctcgcgggggcgtgacggcccccaggacccaaggttccgatccgcgccaaggcgttccggtcagcagcagccccgcggctcctcgggccccgccgcgctggcaagccccagtccccgccagcccaatcgtgctggcgctttaaggacgggcggggcgggctgggcgacagcgctggacacctggagctgcccgaggacgcggaggagaggtggggcgggcgtcaccaccggagtggagggcgaggcccgggtcccgcgctcccctgggcgccccacggcagcctcagagccccgcggggagcgcgcagccctcggggcgggcgccggggtgaggcctggctcggtccctgcgcaccgggtgcgggcggcggagagggcgcggctggtgagccctgggagggcccaggagccagacctcggttttgcgggctggggagcagggctcgggggcagcggccaggcccctccgcccctaacacccgcgcctcctgcagacccgagggtcgccgctggtagggtcgctcagccctgg

SEQ ID NO: 1607 - DNA, 2300 bp, Homo sapien
ttaccttattttttttttttttttttaagaggagaagcgactcagagagaaaaggggcgaagaaggctgggccgtgtagaggaaagaaaaggcgcgagagaagaagactgcccgggtgaccgcgaggcctctgaggaatggctgaagagcagatccatctacatggggctgggaggggaggtgcggtcaccgctcagccgccgactcagccgagggagaccttggccagcccctgccactccgcaggctcggtttcctcgcctgtgaaatgcgggcgatgactcccctccccgccgcgactgctcatcaccgggtccgagcccagccgctgaccccgggggaagcgccttgctcagcgccgggcggcccacgaggccctgcaggaccgcggctgcggagaccgttcccgccacccgcctgggctccagggccagacgggctgaggtccctctgggcctccgtctcctttccagggaggggcaccggctaggtaacacggcactcgccctttcccttctctgagcctgtagtagatgatgataataatgtttccgtggaaggtcctgctttgttaatagtcacagattacaaagtacttgccttttcccactccccttatgtcccttccctgtacaaaacctgggaggtggcctaatacctatccccaatctgcagttgacaaaactctagcccggagcagagccacctgcctgagctcaccctgagaaccagacctggacatgacctgataactcagccctttcctgcccctcagccatcgctcagccagggcccctgagctccctccaggacctcctctgcgaactgtcaagtgcacctggactctgagggctggcgatggtgggtgtgaggaaggagaaacccctgttggaaaaagggcctatgagaaggacgtctagttagaggggcagctgtgagcacaggtgtggggttagggaacaagggcagccctgctggcaggaggggagaaggtgatgaccgccaacaggaaatccccaagcccagcaagtcagggagcccattgaaagccttttatcctgcatcggcgatttaaccccatgtaaacgccaagtgaacattctcttgtagagaccgatggtcctcattttcctgtaatcctgtaaaggaatctgatttcttccatcagcctgtccctaggactaaaatgcctcattagtgttattcttaggaaggcatcttcctagatcaggctgcaaggaaatggaggaagtgactgtcagtcactcacaccctgcaggggcactaattccgagagccttaggggtgggtggggagcagttcattgaaagcccaactgggtggtgcatagcgtgtgaatgtgaaggggatggaggaacccaaggaggccaggcctggagacagcaccaaatctgggaggtacattattattcccattttacagaggaggaaactgaggtaacctgatcatgaccacactgccccacagtagaggagccagaatccaaacccaggcagcctgccttgccaccagagccacgcttttcaccctcaagctgcagttaagaagtatcacgccgtggctaggcccacggcctctggcttcacatcccactagctctgccatctttagctgtgtgaccttgggcaagttacttgtctgtgcccgagggtcctctgtaaagtggggatagtagtagctgcttcactgggttcccttcaatgagttaatagctgtaacatgtttagaatggtgccctgcacatagtcaccagccagtacatatgggccattattcctgaaccctggataggcacatgtccttgaagagtgtagaattcttcaggattctgaaatgccagcctgtgggatcctggaatcctccaatagcattctaacagctctcagctgcagaactgtaccctgttttctagagctggaaggtgtgaggctgcctgtccacccagctcaaccccacagtaggcaaatgaggtgatgtcaaagccttggctggggcccagccccggtaacctcccactctccctcccctgtgtgctccctcgctcagattcacacacacactccaggccagccgggcccagagggaaggtgagagggcaaggagtaaaggtggctgggtgtgggtccgttgaagcgagccgcctccagccctgttgaactggtgggcccagggactggagcgggattgaaagggatcttgctctcccttgaagccttgagttgcagcgatttcagtgtcttctctccctgtgtaagcctgtctcggtgtttaggctgaa

SEQ ID NO: 1608 - DNA, 2300 bp, Homo sapien
ttgaacattcacacaaaaagatgccccctcccttgcaaaaaagagtatgcccgttcaaaatgttgaaatgtacactcacagcaatggtggctgcagactccaagtttctgaggttggagaaggtagccagggagcataaaagtgagttctatctactcattcagtctatgaggggaaggcaatggctagaaaagcattttgagggacagtaaaagtggcatttttagagggaggaagccttgaggatgcttgtggggtgaagggaaagaataactcaggaagaggcatttagggataagaggaggagaggagatagtggaggtaggtgatccctgcggaggccagattggggcaggggagtgtcagctgagtataagaggatggtcccctctgccctgaaggaggaaggcaggaggggaaaaggatgggtgttgacccagaaagcacttgtggtggaggggaggccccagaagaggcttctgacttaccctgattgctggtacctctcaggggagctggctgcttatttgctggccagggtgtgggggaacccatttgagaagagggagaaggtgacacaattcctttgggcaacttatgggaggggtaattggtgagggatgaaagccctgccaagtggcaggaggcccagctggggctgcccctcataagagtgcagtggaggatatgggatgagaagtgactgcccctctggttccatctgtcgcagagcccagggtgcttccttcctcccccacctccctcagaacacacccactgcatgctggacagcagcccccttcctgggcctggggacatccatgtccctctgtgcacaggcttcatcattctctgggtgcacggtaacgaccccggtaggtgagaggccaaggtcccaaaggggagcagcagggaaagttagctcccatctattcttgctccaggggaggcctttgatgaggaagctgccaaaagcacattgcaaatacaattccaattacaggcaacaggaaggagaaccacctctgccacctctgtcagcaaaccatgagctcctactctgtgctgcgatggcgggctcgatggggataactctgaccttacctcatggagtcactgtcaacccactggttgcactgtctttgtgcactggctctctggagtgaggtctttgcaaacaaagtggaaagagcatcaactttggactccagcacctagattcagagcaggccatttcactcggaatctgctgtgcatctgcaagggaggatcataaattcgcctttgtttcttcccagtatcgacagcccttccagaaagagcaagcctcatgtcatgccacatgtacaatctgaggccaggagctctctttccccttttcatcctcctgcctggtacacaataggtgtttactggatgcttgtccagttgatttcttgaacatggtgtgtaaaaggaatctttgcaaattgaatcttctggaaagctgagcttgtgcctaccatagaattctgaatgtacctatatgacgtctttgcaaacttaaaacctgaatctttgtagtataaatcccttgaaatgcatgtaggctggacatcaaaagcaagcaatctcttcaaggagcagctagttggtaaggtcagtgtgcagggtgcataaagggcagaggccggagggggtccaggctaagtttagaaggctgccaggttaaggccagtggaaagaattcggtgggcagcgaggagtccacagtaggattgattcagaagtctcactggtcagcaggagacaaggtggacccaggaaacactgaaaaggtgggcccggcagaacttggagtctggcatcccacgcagggtgagaggcgggagaggaggagcccctagggcgccggcctgccttccagcccagttaggatttgggagttttttcttccctctgcgcgtaatctgacgctgtttggggagggcgaggccgaaacctgatcctccagtccgggggttccgttaatgtttaatcagataggatcgtccgatggggctctggtggcgtgatctgcgcgccccaggcgtcaagcacccacaccctagaaggtttccgcagcgacgtcgaggcgctcatggttgcaggcgggcgccgccgttcagttcagggtctgagcctggaggagtgagccaggcagtgagactggctcgggcgggccgggacgcgtcgttgcagcagcggctcccagctcccagccaggattccgcgcgccccttcacgcgccctgctcctgaacttcagctcctgcacagtcc

SEQ ID NO: 1609 - DNA, 2300 bp, Homo sapien
attgctgtagcatgcatttctctgtcaggtattgagtgaggtgctgtgattttagccctgcatttttcttttcttaccattcaataataacgttttgagcacccactgtgcgccaggcaccatattaggtgctggggatacaaatgtgaatgaaatgaatgtggtctcttcccccaacagtgtatccagaagattaatccattccttaaacaaatgctacttgacacagattagttctggataggctgagagctctgaaggagtgcaggcagctgcgagcctgtgtatccagcagaaggatcaggaaaggattcctggaggaagcgctgttctagccaagacctacgggggcattattaaccaggcaaaggggacggtgtccaagcagtggaatgaacgtggattgaagctgtgaggcaggagggagtgtggcctgtgcagaagggaccgaggctggtgagaccaggagggcctgggtggcctccaggtcagatgtgaaaggaagaacttggccacagtctgagcttctcaggcgtatggcagggctgcctggtgagagggaatgagctccctgctctggaggtatgcaagcaggactgggctctcacctgccagaggccacagagctttccagaggctggaagaggccactccaaggcctctttgcccctgagagtggtggctcttcttgaggccaccttgccacgctgtcacagggaactagcagcccctgcctcacccgggggtttggaagatagagggaggcctaggaagggccctgtgtctcatccgagctgggcccctttccagcctctcactggaaggaagcccaaggatgttcctgtgggggcttttaccaggcccacctgccctctgctggccatgcttgcagcctcctgaccctgtcccagcaggacagtgggctggtgtgagcgggcaggaaccgcctgcacttagaaggtgtggggctgcctccccgagcttccatctgccgctggggccacaccccaggcccagggatgggaccccacagtggtcacatcatcttgcagcagaacccaggtacagctcctggagcagatggtggtcccaagcacgggtgggaccagaaaggactctcacctgggctaactcagctgcagcctcagttccctcctcacacacgacgaggaacatggactggaagcctgcccagcaggccttctgctcgatgtgcgttgtgtggcttacgtccagggagggaagcagcctctgtgctgtcttctagataagcctgtattccccgggctgtctgccaatgtatccagttgtcccgtcagcctggaagctctgagggaaaaccttgggctgcttcctgagcacctgtatcccctgcagccagcccggggcctctgctaggagcagactgagcatggcttatgggcctggcaccatctggcctctgcccaccttgctggccttgtcttgtgtctgccccttcgacattccatagcccagctcaatatctagtggttcctctagggtggcgagcactgtttggtctccagatgtcttcaggtcggagctcacagcgctctcagccaccccttcccagtgtagcaccgggcacatggtagatgcctattgatgagtgaaagctcctaacacactcagagagcaaggactccgcctcatcccacagcctgggaggagaggcagactgccaaggacctgctcagcatgctacagaagaaaccaaagtgcccacgggactgatcagtggagcttcctgccgagactggaggccttagggcagggtagacagtgtgtgtgcaggctggggactcacagttcggactgtgcccagacctactagcatagtgggtgggtgggaggatgcgggactgggggccgaccttgcctgaaattcatgtgggatctcagagcagccactgaattgctctgtagggggctaaatagtggcccccacagatacacacacccagacagagcctgtgagccagaccttatttggagaaaaggtctttgtagatgtaattaagcatctcaagatggcatcatctggattatgcggtgggctgtaagtcctgtgatgtgtctttatgagagaaaggcagagggagatttgacacacacaggaggggccacgtggagacagaggtggagattggagaaatgtggccacaagccagggaacaccagcagccaccagaagccggaagacgtgaggcagggttcttcccagagccttcgctgctgagtctgggaatttgtgaccgaagccataagaagtgggtaca

SEQ ID NO: 1610 - DNA, 2300 bp, Homo sapien
gtggggaagtgtgcccttctcattcctctgaggctcatcctcttggtgcctctctttcatggaaagggataataaggttattgtgaggatcccctgagttcgtatattcagacgcttagacagagccaggcacagagaagggcccggggttggctagtttgattgctggtgtaattgctaatatcttccagtttgtattggtcaaggttctgcagagaagcagaaccagtaggatgtatatattaagagtttcaagctcatgtgaccgtgcgggctggcaagtctgaaatccgcagggcaggccaggcaggctggcaattcctgcagaatttgatgttgcaatactgagtcctaaggcagtcctggggcagaattccttcttccctgggaggcctcagtctgttctcttaaggccttcaactgattaaatgaggcctgcccaagttatagagagtaacctgccttactccgtcttctgatttaaatgttagtcacatctaaaaaatattttcgcagcagcatttccactggcttttgaccaaacatcaggccacaaagttgatccccaaaattaaccatcactctgtgcctgtaagggaggggctgggaaaggggagcaggtctccccaaggggtgaccttggctttgttcctcccaggcctggagtttattcggaaaagccagctggtccagcctgtggggccactggtggtgctgctgcccctggcgggtgggtacagccgcgtcctcaacgccgcctgccagcgcctggcgagggctggggtcgtgctggtcaccgctgccggcaacttccgggacgatgcctgcctctactccccagcctcagctcccgaggtaggtgctggggctgctgccccaaggcgcgggtagggggcggagggcggagggcggagggagggcgggcgggcaggcgggcttcttgtggcacgtgggcttcttgtggcacgttcctggaggccgaacccttctggctttggaaggagtcgtcagagacccccgccatgcgggaggctggggaggaaggggctcgaaacctccatcatcgcagagtctgaatagcagtggccccgccatgcgcccacgtagcggcgcctacgtagccacgcccccacaccccgtcctggccactctccctcctgaaggtcttctggtacccgccccctccccatctccatccccaggccctgcgtcctctgcccaatactctttgggcctccctgttgtccagctctctccgcggctccatgactgacaacttgagcaaggctaatgtgaatgggagcggttgagggctcagacctctcacccgaggaacatccacagagtgtgccgcatgcccggtgcagtgtggctgcggggacacagacacggagcctcggccctgaggagctggggggcagtgaccgtccctcctctgacccaccactcctccagtgtcaggacactgcgggtatctaggggaaggaatcttgttccacttcaagtctggaacttcaagtctgtgtgtgtgcgtgcgcgcgcgcgcgttgggggtgggggttgcagagcagatgcgtacctgacagcggtaacctaggtcccccctggcctatcaaggcttccctggcggccgaatttaaaggcatcaagcaaacaaagcccaacacatctctgccttgtcctctcagtttccccccgtggcacttagaaccacttgatacaccgaatagtttcctatctcccccactaggatgtaaactccacaggggcattgggaatgctgcctggctatggtagggacagaggggagcaccagggcggggcaggggtgccagagttctgcctgggcagtcagattttccttaggaggggacatttgagtgggacccaaacaggtgtatagcagttgtccagcccagctggcaaggcctgagtctgcctctgcaacccctctcttgggctcctttctctgccacccacctcctcacctttccaggtcatcacagttggggccaccaatgcccaagaccagccggtgaccctggggactttggggaccaactttggccgctgtgtggacctctttgccccaggggaggacatcattggtgcctccagcgactgcagcacctgctttgtgtcacagagtgggacatcacaggctgctgcccacgtggctggtaagtcaccaccccactgcctcggccaccgtgatgctaacagcccctttggcagtcagggtctgtgccgggacctccagtgccaggctctgtgcagggggaccagagatgaagtaggcc

SEQ ID NO: 1611 - DNA, 2300 bp, Homo sapien
caccattctggagaaaaccctagacagtgccttgttttatcaggataaggtcggtctcatttttaaaacgttatttatacactgtgtttttaccaaatgttttaaattgcaggtaataagaaagagcctaggattggagtctggtaattttgccacataaatacaccttctgtgaactgatttttggtacatgccagggagaaggcattctgtcccttcctcctcacatcccaaacaccagggtaggccaggaattcaggcctgctttggtctgcgttgggattttctctctagaaacactcccttttcagagtcctttctcaagaatttgtattagatctctctgaactgagactaatctgtgtctagagactcatctaggccagcagacattttgagccacctctggctttgtctttttcctcataagctattttcctgatctaaacctgcagctggcaaccaaaccaaatagtgctattcatccaggggcgttaagtccttacaggtacagcagttacttcccaagattgctgtttcaaacagctgacactacatggaaaactttgaaaaatgttattttcacaacaaattggcttcttataaacattagctggaggcattgtgcctcaatgaactaaatacagattctaggaattactgcttcaaatgcagatgttggctttgctgtgcaactttgagcaagtcctttaaggaggatgttgatccagatacagtgcctgccacccaagcacttagttccatgaacaaggcagtcaaatatgccccttaggaaggtcctcaaagactgtatctcaattccgggaatcattaggaagttgaggtttactgtaaggcagtggttttgatcagcttaaatagcagaaccattttttaaacaaaatcctacctagatgcaaaatatagaatacaagccacaggagcagctgaggacagttcaaatgccattgctccattccctgtggaagtttctaagatgcatcaagaatccttaacataaggaccatatcactctcctccttcctcccatgtaccaacccaaacaaaggataaaggcagagttagtgcagcctccctagagatggggtcaggccgtagcatattacccaccagcctctaaaggcaggacagcaggcggcagaaagagaagggaatggcggccatacacttggaagccatttgctcagtgaattctgtctgatgcccagctgatggattttcatgtctatttgcccccctccccccgtaaatggaaatggtgcctcttgccacccactttatcttgtaaagtactttgaaaatgaagtgctatgtaaatgctaaattttactgtatttataatgggtgtgacaggatggatgggaatattgcagaagtatgaataccatcttcagaggaaacgaactaatgagagtagtaagcctggtcttaaatctagatcacagatgaatttctagggacttgtccaaaaacagttggggtgggagggaaagaagaagcaatgtcataaccaaaatggtttctaaacaaataaaatgtttttcaaagctttccatgaggcgtcagcgggctctcaagtaagttcacggctgagtcgatatcaccgttgtcattctgtcaggctgttgctatccatttgctccatcggcttggtttccagcccctatgcctgtgtctgtgttttttattctttgcatctgtgattatgtgaagaagtaacgtagtggagggagggattcagaaatgtcttccctaaacaccccacctttttttaagagacagagagatactggctctggagaaaatgtgactcagcggtagaattgatgcccttgactctgaaatctaggaactgaaactaagcttttcttttaattattgctatggtaccaatctttctctggaaggtaaaatggataattctgtttttgctcttcaaagcataagtccatctgaatctgagactggattgtatcagactttccttttgttcttatggtggtttacctcaaattaatcctgttataaatgtctgtcttacgttctttttcttcatgtaattttatctttcctctaaccagttaaaaagccttcatcagttactggaggtactacttgctctgttggacaaagacgtcccagaaaattgtaaaaactgtgctcagtactttttcctgttcaacacttttgtacaaaaggtaaataatttttttcctaatatcttttcctaatacagaagatttatactctaaaaaatttttagactggatagtaaagtt

SEQ ID NO: 1612 - DNA, 2300 bp, Homo sapien
tcttcagcggaatcctgttgctctcagaataaaatccagaattttcaccattacccacaaggccttgcttgatctggtttttgtccttccaggctttccttgactcactctctgcttgtcaggctttagccatactggctcattggttccttgaacctgccgagcttattttcctgcctcaaggtccttgcacctgttattccttatctggaacaccatcctcccctcttcacatagtaagtggcttctccttcagacatcagcgtgaatagcatttgctctgagaggctgttcccagtcacccagtctaacggatgttgcctgctagtctgctcccttttttctgcccatctcctctactacaacttcagcttcttgagggcagaagccaggttcagttcattccctactagacacaaagaggctggcaaatagcaagcagtcaaatacttattcaggcatgcatgcatatatccatataattcataaaaagaatcagtaagcatttctttgaagtgctgtgtgctgtacgcctgtccctttagagtttgcattagagataaccatttttctagtttgattccaaaatatctttccaacgggactcctgagcattgtgcaagcattagaatgttatagaaagatcatccatttggaaggaacatggcaaatatgcaaatattttattcattcccttatgtccaagcagacttgcttttaaatatctccagagaaactgtaacgtcctttgggtagtatgtttggtttcttggtattcctaatgctcaagaatcccagtgaattacttctacattcttcctgatggagtttattatagtttgtttctttctttataaagaccaatcactcatcactatcaattgctatgatttcgtgtttgaagaattaatgatctttttttctaattacttatttctttataatttttaagataggttgtcatttttgcaactaaaaaataagtatatatactatactcatattttagtaactttaaacatgaagagatattgtcttttagatcagccccttggtatagtcttctaaggcaattctttaaacataattataattgtaaaaaaattaattcatagtaaatattgcttacagattgatctaaagaattcagactactaacatgaaggatactttacatttttaaagagccttttattgtggaaatgtttaaacacacgcagaagtaggcagaatgagccctctcctgtacccaggccccaggcaagttgttgacatttgcctgtcttgccttagctatctcagctctcacacaggatacccacatgcaggcttttttgtctctctgaagtattttaaattgcagacattatatcatttcacaataaattttcagcgtgtatctgaaggtaaagttcatctctaacagcaaagttaaaaacaatgtaagtactttactgttatcacaccaacaaaattaatataattccttcatatcaccttatatctagtccatgttcagatttcctccaaaggtctcagaagtgtcattttaccattgagtttgcacaaatcaggatccagtgaggtccacacatggcctttgctttctgtgtctcttaaggctcttctgaccatcagtcattcctttgtccccctgccccttgtatgctgtgccatttgtttgaggagtagactgtttgctctgtagagctccccatattctggatctgtttgcatcctctaggtattcccttcaagagaattgcagctgagtctgattgtacctctagagctgaacattatgggagtacttcttatcttttaaactttctcatagttgccacatagagtcttagtgaattttgaacagagccttggctggtatgtggcattacagttagcaggaataagcagaagtgaagtgaccttggaaagctccacttggcccataagcgctaacactgtcaggagactctacttttgtttcttggctattagatgggacctatcatgggaaggttgaggttgtggaaatgtatcttgctttttcacaccacctttctctttctttcaggattttcttactggagtgcaatgtgagagaagtacgagttgctgtggccaccattctggagaaaaccctagacagtgccttgttttatcaggataaggtcggtctcatttttaaaacgttatttatacactgtgtttttaccaaatgttttaaattgcaggtaataagaaagagcctaggattggagtctggtaattttgccacataaatacaccttctgtgaact

SEQ ID NO: 1613 - DNA, 2300 bp, Homo sapien
aacatttaagtaacaaattagtgatccaaatttaagtgagaaagccattcttgtttggtactacctataccaggtaacaactaaaatgataggtagaagaacaaataccttttgtgtacagctaagtttgcacatactcaggtaagcacagctatataaaaacttactcctgtgcctagtggctggtgagtttcttttgacataattgtctaaagtgtcaatttcagatatgttaaaatatatgaaatctttgtcttagaatctaggaaatacagtatttgctgattgaggattggctgatccctatgaggcaaggaaaaaagtattgtgtgacaataacttgctcacatttacatattcaatagtgagatgtttctctacaaagacaacaaaagtgtatttcccctccacaagggtcttcatcttacactaaggctcaatagaacaaggaggcattaaaacaaaaacttcagcctctgaagaatgctgaggacttaagtttttactcagctttttggttagagatttaatagtcatgtttaaactgaaattcttaccaaattttgaaatttcatagtttgaaagatgctatttattaaaaagtagttctctttataaagagtattacacaaacagtagactttttagatctgtactatgacgatctggattgtcatataccagtttcagaaataatatatttggaagtgttttgaaaaatgtacagtgtaagtgtaaaatgtctgtaataataaaaatagaattacctcttatgaaagtgttttaactaggaaatacagattatgaatattttctttaatatttagaccactaccagtgtcttgatcatatcattggtatcctagtcatataatcatagaaagcaatattcttactccattttacttaccatgcagttcagtgttatccaagttaagctttggccatcagtttattttgtgtcaacatgacttagcagcctgtgctacttaatctatcctctgaagttgctaattccttgttgtctgttttttgctgatgtacccctgtacatttactgtcacttcacatccactcctgtttgcagttcttagctttaggaaattgcatgcagaataagaagttgaagactgaattatgagtgcatggagataagctctaaatggtcaatataaagagtaaaataataaaatgtgtaacagtaaacctgattgacttgaaattttttatagctaataaatgaatctgctgtttatttctaaatttaattaatgtaacttctttttaactctagtcatctcagcttaataatccccagtttgtatgggtggtaccagctttgcgtcagctccatgaaattactcgctcattcataaaacaaacctatcaaaagcaagacaaggtaagggtatagctattttttattattatagttacttgcataacttttacaataacaaaacatggctaaaattgctgagtttatagtcactatctttatgtttattgatgtaattcacttatatcatctaataatcttgagtttaagcatcattctgctttcatttctgcagagcttttttttttttttaatctccttaactcattttctttttatttgcttaattttcaaatagttaagccagtttttaaaagttagaatggcattttaaaaattggtttgaaaagattaaaaagcttgttgcttgttttgtatcacaaaaagattagtttgcttaaagtactagagtttcctcaatgtatagacttgggaaggatgatccagaaaagtatacaggaagtgaaatagttatttttataggctttttaaaaaaataaataaaatgaatatttttagatggaaaacattagtagtttattaattttctagtaaatgtacataccagattgattttatttacttttgtgtaggaaatacgaatgaggaaattcttatgtttgctttgtctcatctaggactacatctttaaatagcagcttgtattaaaccagcaaaataactgcaaattctcattaccacttttctttttgttattttcgccaagagcattattcaagacttgaagaagaattttgaaatagtgaaattggtaacgggaagtttgatcgcttgtcatcggcttgcagctgctgtggccgggcctggaggcttaagtggctcgacactagtggatggccggtacacttaccgggaggtatcaggccttgtgtttttgcttcatgatttacaacattaatttgacctttttatacttatactataaaaagaatttttgtta

SEQ ID NO: 1614 - DNA, 2300 bp, Homo sapien
atatactagtcaacgatacagctaagttagtgggttacagagggcaatctagcaactgtgtctaagtgtggaagccaaagaaatcttgtgcagaaacctgttctttttaagtgccaccttcttgttcaagctacttcagcccgaggaactgttgcaaaagcatacaattaaaaggatataacactgctcaggaaaaagtgtttcaaaaggcttagcttcactaagcttaattcttcattaagaacgaaccaaattcgtatctctacctaataacgcaatcccaataatttgagatctgtgcttttctgtggtcaggccaagctgctctactggcccctgaaatgaactacccaacgaatctgaccaaaattcctgccatgagctactatgtttctgcaaagtaattattcaaaagcactgctgcttctggtcgatcttttttctttattatagaagagtccgttttcttcccccacgttccttgctcacaccccaaactaaacaggcatagtcttctccacctagacttgaggtctctgatcaaagccattagcctcaagactcctcctccacccccactgcgctcccaccctgttccgcgcccctctgcatagcaccctcagtatgactaccatctctttccccggtctaattttctctcatttctgaccttatcgatgaccagtactccctctttacccagacctggtgccagctctatcttccaattccagtccccatccctgcctagaccctcctcagctcccacccctgcccaggcctcccacctctgccctctcagtgcaatccccactgctctcatacctgattttattcaagtcctcattcctggccgcggccccttccctcttcattttaaatcctactcaatgccccccctttccgacccttggctaaaaccccaacctcactcctaaccccaacagttttcctgtgatcctgtcaaagaccactactctggccggcccacaccgctttttctgactctgagcctggtgcctccgccaatccttcactgaaacctcgtgccacaaaatctccgacctagcctagtgcactagtaccccatttccgaccccctactgcacgcatccttcccactatatgctcaagtgtctgtcctcccatctcggatgatagccctggagcctcctccccatcgtcggcgtgcatagccggaagcctaagggacccctcctcaccccaacccacagctccgctgcgcatccctaattccctttcacacgcctctcctatgggtccctctccccacttacccccaatcaagtgacttcggttcccaactggagcctggggcttctctctctctctccgccccgcccccactaaagccccagtcgaatgccctctctccccacaccaagcccagcggggtgtgtcccctcccaggaactccagcccagtggcttcccacagaggtctggggttgcccctcctcacctccgcgtccaccacctcgtggtaggcgggcggggggtcgaagccgcccccgcctccggtgctcccgccgcgggaggggccgccgccgccgccgtcacctccgccgtcgccccgcgggcccccgccgggcccggggctggggccaccgccgctgtccatgggctcgtagccgccgtagtcgaggcccggccgctcgttggtgagcagtgccacggcctcgttaatgtcgttcttggccaggcgcagggccttgcggatggtggcggggtctgagaagcccatgcacagcagcgtggtcatgtgctgctcctcctccgattccatggcttgggcctcctggccgccccggccagcgcacggcgaagctacgggtcccgggcctggcgggccgcgcggcgcaccctccgcgccgcctccgcgcccaggttggcccctgcgttcctgccccgggtgctccgcagcagccgggccaggctgggtgcgggcttgggtcctgcgagccgagctagtgcggtgaggcgctcaggcgcggctgcggcccggcccagccctgcgcgccgccatgttggcctcctccccctccgcctcctcctccccgggcggcggggccgcgcctcggctcccggaagcggcacgggaggcgaccgtgctcgccgttggcaggctagggttggcggcggcgtattctgtttgttttaaacgaaggagcggagggaggggccgcgccgcggagcgtgcctaaggtgaaagggctgccgtgcagccaggcagaggcgaggaaggcttctccatcgtcgccaccgcccgcctgtttcgcc

SEQ ID NO: 1615 - DNA, 2300 bp, Homo sapien
tatcacctaatcttggaagtgctatagcatcacttctgccatattctgttggtcacacaggcaaccctggtactgcatggcaggggactccacaaactgtggataccaggaggtggggattgtggtggctgtcttggggggtggctaccatggccacccagaaagtgaatggcagtactagctgatcgcctgtttgtgccctggacagtaggcctgccagtcactgatgtgtgggaatgaaaagatgcaatgcctggcaatgtgcccaataggtatttgatgaagaaataaaagattggtttttctaaaatagttctgattggtttttttgctactaaaaccatcagcattgtctgatggattaagtacaaatttctgacccagacatttataatctttctgaatgtggccctagtctccaatttcagtttccaaactcaagtctatgctcatgtcacagtttctgcctgggctgcccttaaagttttgaaatacagctcctcttcaaggtcaagctaactaaccccaccttctttggtgtccacgtctcctgtctccttgcccttagtagcagcctccctggttcctgatggtggtgcgcttgctcactcaggcattctattgacctttgaagttggtgctcaacaactttggccagaaaggaagttttctgcagagactggcaatgtgtttctgactatgtcttacatatgtttttttccaatatagcttttcttgtacctccagaggacaggcacatttttaatttaaacacacccctaaaggacttggcatacagaagtgactgcccatctcttgcaggaagttcagtctcaaattcctttcctcctaccatttcatgagtgacatgccaggcggaatttattcagatgaggtcttcctacactggtagaatgaatatttttgattccctaagtgaattattcatataaacttcagagttggaaagtttctatacagagtcagtggggaagtatttgtctaagatatctaccctacctagccattaataaaatgtcctacatttagatgccacatattttataggagtcacatattttataacatcaagatagaagcaaatagatccttataacagaaaagttttacaagttttaaaatcagaaagttctagatatcgaattccaactgcaatactttctagctgaccacttttggtcaaaccactcattgccatttcaccaaagataaaactgaggtttggagaaagatgactgtcagcatataacctacatatagtaggaacacaatattaatgtatataaatgcatatatgtaacttgattgcctctgggcttcagtttcctcttttataaaataggaattataaaacgggaattagatgtggcatatattacatatatgtaccactttaaaagctaagcctcagtgtcttaatctgtacaatggggattattatctctactctctccatctcatttgatccccacagttgtgtgaggtaaagcaagtgaagcttctttgtggggcactttcctttgtgataatgcccttcattagtagcctgtaatcatggtgtagggaaagagcacaggctctgtgttctggaagtcctggattcaaatcctagctattgagcttactaatcataggggaaattagctaattccggaatgtctttgatccttggtttcctcctctgtaaatggaatcctgtctggaagagtacccggaacatggcagcaccttttcattcaccgctttgtgccacttaggtgttggtgtttttcccggtaattgagagaatggatgagacgtatgagtgagttttccctatgggacagcatagcagtttctcatcctacagtttccaattcgtgaatggctttactttaacaaaatgacagataatgagagggaaagtagtgtttgaatgcttagacgcctgttctctccaatgtcgcaatgttgtcaagaactatctttattccctgattgtcctggagaagagaaacataaaagccttattcatagttttaattctcattccagagaggaacagtgggttctttctccagttgttctgtccttactggggaggagcccagggacatatttcacagctaagtcaactgcttttcttcaaattcagatttaatccttgagtgaaatgagtcactggctcatccagttaagatcatcacccactttcctaacaaaacttctcttcaaagaaggactcgctcatccatcaggtatttatttagcactcactacatagtagatactgttttggc

SEQ ID NO: 1616 - DNA, 2300 bp, Homo sapien
aaggagactgaggcttatagaagtaaactgaccacccacttagtaagtgacagagccaggactggaatcagggctattgtaccccaaaatgcactttactattgcactgctttccccaaaatcccctgctgcagacaccaggatcagtgctgaccttgaggcattcctccataaatgtgttagttaactgatggatatcagggaacaagctctcatctgcttactgtgatgtctgactgactgcttcccaaaggcgttcttttcccttggctccctactcctttctcattcataagcactcccttcctttctggagctattctgatgactggtctcttcctctcttctcaaattcttatggtgtatttatttttttcttgtattaagctccaaccttaagtatctgaatcaggggaaggggagatgtgggctttgtccggttgggaaacacgcccttcctctgccccacccttgatttccaaggcttgtgatctaagcctgcatgcaggggcagggggaatggttgaaggactcgtaacaagcattttccgaggacctacagatttttcagcaagggaatttagaaaatcttgccactccaaattaagaaatgtgattaaagaataaaatcacctatttgttgagtagtatttcatgctatcctcttgatctacattatcaaccaacctggaccacagcctctaagagagtggttgctacacttattttatatgtgagaaaatggaggctcagggaggttttcctgattaaaatctgtgctctgtctgttatgcaccccacccttgtccactgccaagaatagctgagggaaggccaaacatactgagtacactgcaagtggatgattccttgttcttgaatttgccattgtcctgaagacttgtgttgagttggagctagactaacaccgtcttcatccccatttccaaaaggaggcatattttcatccactggtaggtcattaagggagtagtctttggcctatatagctccaattcactgactttggtattgcctatagtgacccagtcttgcctagagctcttgaaaagcactgagagtgtggtactcagtgctttgcatgaaatcatttaatttttcaccattgcttacagtaatattttccaattgtgattcaaataggtagatgttctctgaaaatagtgattaaaggtcaaataagtattctttccttcaggacttctcagaggctttagtaatcttataagcatgataattgacaaaaataaggatttagtatagaacattcacctatcttttttgaagaaacccttaatattcagtggaatatggtttgggaaagactggcctccaaaataaggtctgggttgcttagtttgacactgaaagcccttcgtgaactaggccctccttgtctctgcagccctatttctcaccactgctcacccaccttccccaacaccctcttctccagctatactgaactatttgaagttttggggaacttctgtggaaggcctctgagccacccctctgcctggaatatatatcccccactcctgcccccttaaacccagcaaatactcattcacctttaggattctggtcaagtatcccttccaaatagtaattgaccccagcctctaacttctttcatagctcctataaaacacattagtatacttatttattttcttgtatccctcaactgtctgctctatatgtcaggatttataaatcctcatttttctttgtctttagcacttttcatagtgcctagcttttttctttttttttaaatttaatttaacgtatttatttatttatttattttgcctagtaccacagatttggtcttttagattatctttagaataattttttccccacatctttttcggatgtccatggcaatctaatagtatttacatatcaacttctgaatttaaaagtttagtgttctaagtaaaattctccctctctgtctcttcaaattgtcctttacctcctttattccataaaggctctatgctatcttcttttacatttttaactggttattatttatatatgagaaaaccattgtttttatcccttgtttagcaggcaacggcctcagtgtgatcttttttgtcagtattcttattttttcctcttaagtttttccaataatacatttttataatttcaaaatgattataaagtagtctgctgtcttccatgtctgcttatttgaaatagtgttccacgtagttgaggattcagtcctagacacttatggctaagaatgattctgg

SEQ ID NO: 1617 - DNA, 2300 bp, Homo sapien
tatttaacctcctccaggcttcagtttcctcatctgtaaaataagcaaacctggtaatacttgtttgttgtgaaacccaggtgagataatgaaactgaaagcattttgaaaagttcaaaatcacgttatcattatcaggtaggaatgaagttgctgttgttcttcatagagtcgaattttcattttcctcccagttttcttactcctcaatggttctataaaatcctcttatttcttggcagcaaagttgcctgaactatattaaggaaaaagattctgagaagaatcccaagaaaacaccaagcagagtggacacaaatgttttccattagctgaagaaaagcagtggcaggtttcctgaccctttctgggaaagtcaaagtgcaggaacctcaataggctttggtggttgcattcttcccctttgaaagggacaaagccatattatcttgagagaaagacagatatgccttaggaagggtgggagagaatttagacacgtggtctgttttagggtcaactctcacttgggtcattcctgtcattcaacagcccagaggaaaaccaaactaaaagaacagcaaggccaggcgtggtggctcacgcctgtaatcctagcactttgggaggctgaggcaggtggatcacctgaggtcagaatttcgagactagcctggtcaacatggtgaaaccccgtctctactaaaaatacaaaaattagccgggcatcgtggtgtgtgcctgtaatcccagctactccggaggctgaggcaggagaattgctggaacccagttggcagaggctgcagtgagccaagatcacgccactgcactccaggctgggtgatagagcgagactctgtctcaaaaaaaaaaaaaaaaaaaaaaaaccagaaatgattggaaatgatcgaaacgctggtcatctaggggaccctctgtatttgctgaggaaggaaggtactgagctaggctaccatatttattatacaggccaatcatgtggtatagagacgatcccttttatagaagagggaactgtagctcagagatgttaagtaacttgcacaagggcacccagctagaaagcagtcaccaacttttccagagctcttgtcaggttaccttgctgccccacttttcaatttgcaattaattgattgcaattaatgcaatcaaagcagtctttttcatttctttccattttgtttattttggtcttaaggatattattgggcagtggagtagacagagtaatatgtaaataattgcaaaacagcttaaagcttgatgaataagcttctctgtagacataataaagagaataccattggagcaattcctcattgcctagattcatggaatctttagaatttggaagtaccttggagatttcattatcaacgataccaaggtcattttttaatgtcagttagaaaaataggcctttttgagctggggaagggagagaggtgtgaggggaatagcacgggctttggagtcagactggagtctgctcactattattggccatagaagcttaagcaagtttacttgatctctgtgatgcctcataaatcctcatttacgaaatgagattctgtgtgcactgtgacgtggtggggacatgcctagtacagtgcctggtgcatagagacactcaagaggtagttgctgcagtcattatcatcaccacatcctagtcaatgcccttggttcacaaatgggaactagaggtcttggttggttagtaattgtccagtgacagtgaaagaggaggacctagaaccaaggtcttgcctttctaccattctgcttttcggatgtggacttgttggtttgaaatttgatattattcatgaggagagttccctggagagctttctctcttgcgtgcgtcagtagaaaaaggaacaagacaaacaggtttaacttttaatccatatcagtggatgttagctgagtgaagccaaagatacatgggacaaatgtgaaggactaggcagtgttttgaaatattacttttcttcaaactggtattttttcaggaaagtacttattaccaagatcactgctgaatgatttgagctggaacaggtgccacctttttcaaatgatgtatctcaggggagaaaaaagagactccatgttttcaaagtttttgctttttattatttatttatttatttttgctttttaaaagcctctcaacaaactctccttattcccatgtgactgaggatgaaacagtctcagattaaacagacttctcaaggtcacgcattgtcagtgccaacatt

SEQ ID NO: 1618 - DNA, 2300 bp, Homo sapien
gcctgcagtttcaagaaagcttgcttttagattggaattccaaaagcatggtttggtgactaagaatttcaaagatgactataattacaaagacaattgagtaggcaaagaccctggaatcctgaattcctcttagaatgtcagtaattatgaacctggccttgttttgtttccactcttttaacttttcaagagaaggtgtttctcaagaaaaagctatctcaagcatctgccttctgaactaccctggcttttacctgtgctatttgaattgagagtgctgtgtgtgatttgcagttggatgcttcagctccaaaacttcttgggagagtcagatcttcttgcttccagaagatagcaatgttgtctttctttgcaagccccacttactaaccggtgctaacttgagcttaattcagtacacagcaaatcccgtgctaggtactagagagatgccgcggcgctgataacctacacagtttgctagtctttaccatctgtaacaccaaatcaggctgacataggctcatgcctgtaatcctagcactttgggaggccgaggcaggcgatcatgacgtcaggaatttgagaccagcctgaccaacatggtgaagccccatctctactaaaaatacaaaaatagccgtgtgtggtggcacgagcctgtaatctcagctactcaggaggctgaggcaagagaatcctttgaatccgggaggcggagattgcagtgagccaagattgaggcactgcactccagcctgggcgatagagtgagacgccatctcgggggaaaaaaaaatagttagaagcaaagagttgacagtgaagttaattctgtgcaggaatgaagaaagtactcagagaggaggtgacatttcagaggatactaaagcaagagaagcatttccctaactagaggaggaaagggtatgcattataggcagagcgtgcaggagagcaggggtgtggagtgtgaaaggattgtaccagaaagggcaattgtaccagaaagggttgatggtggctgcatataaagttatcaaaacccaaaacaagtcagtgtaagaaagaacatgattcatataatgtatcaaaaagctacaaatatttccatttctgaatgcacacaaagaaccacctggaaaaaacatccatttattgtccactgtgcccaggtccatgctaggcactatagaagatacaagggaaggcccttgccctggaaatgtttattctctatctggaaaaaagattaactcacataaaataattaaaaataagatgccagcctctaaggaaaaatgttagattgtctgaaactcaagcagagagcattttggctgccctggaattccccatagtagtagaattactcttggggccaagagaggggttgcctgagactccttcacccagaaaaaaggtaattgctaaccctcacagagcacttcctatgtactgggcactgttctaggagcttatacggattaacaaattaagtcttcacaaccaccctatatgaaaaggaacagttatctctagttacatacggggaaactgaggcacagagtcacaggattgaaatccaggagatgtggttccacagtcgtgcagtctttttcattttagtattctcaaaatctagcgtagtacccggtgttggatgttaagatcttaaacaaacaaacaacttgttttccttaaaaattatattttcagggtaatacaattcaagtcacaataaagacctgaaagcctcaggtttgtaggtgaggaaaaatgcattttagctgtacagccctaacttttacttgacccaaggccagcaagaaaatgtttctttttatttatatatattttttctttggtgacaatttggtgtttctgaacgctaggggctcccggtttctctggtttgagagtaacttttccttttaggacttttttttttttttttgaagggggtgggggaaaatgtggccttaattatcctacgtcttaggcagcttaaggaaggggctgtgctttcggaatcccatccgagccaagtaaggaggtccctctctctctctccccccacgtcttctctttttaaaggacctcgtgaaataaaagtgcagaaaacaaacccaggcgatcacagcagcagccgccgcggcagcagcaccaacagcaggaggagcaggaggagccggaggaggaggaggaggaggaggcaaagttagagttggggctggcgctccggagttgctgggctcagcgcagctcccattcattaaggaaccagctgcggagga

SEQ ID NO: 1619 - DNA, 2300 bp, Homo sapien
tttcacatagtaacaaaactataaggtagtccacagtagctatgtaagaatcatagttatgaagtatataataatttaacttacagtatttatcaacaaatagttaagacagtacgaaatgctttgaaatctcaatttacagttagtctttatgtagcttcaagaaagcaatcatctaacttcaagtgaagacttttcaacatcttttaacgggatattagagcagaagacatatacatctcatacctcaaaagcagaataggtcttttcttactcacttgactactgaaggaatgacccttaaccagatgaaagttcagcacaaaaataactggctattttctcaaaattgccagcgaggtagagtgattcctagatgatacttgtcagcaagaaagatgatctgaagaatgaacaaaaatagcctctgtttaacagctgtgatatctataatttataagctgtgatcatctctcatcagattgtcttgatgtttggatgagaatgaatgtttgaaatttctatatttagtacttatcagaaaacaaagttttgttgtgtcctattctttttgatcaatacatttcaatttacatataaacagtgttcaagagacttcatgtttgaggaatgtgaccttgaaactctactggcatgcagtgctataaatgtttgactaatccttaattacttatccccaaacagaatttttttttactgttttaaaattttttatttcattggcaaataaaaattgtatatatttagtatgtatatgttttgaaatatattgattgtggaatggctataagtcaagctaattaacaaacatattgtatacgaatctttttgtgtgtgtggtgagaagcaaataaactttaatcactgaaagacagaacaacattaaagaatgagacaacattaaaggaaggaaggaaggagggaaggaagggcgggagagaaggaagagaggcagagataatcgctttattacctaattctttgccagtcttttttctttttttttgtgggggagggtggggaggtcagtctttgaacacgctgcctaggcatcatgcttctaatttcctcttaccactcttttcacttctatatcacatttattcttcctttaatatgtgaccttatactggcctcgcccttcacaattcctctgtcgcttacgtattttactttctgtgggcagaacattgtttccctttccacgtctttcccatttccttcttgtacagctgtatcacatttcggtactatatgtttatataagcgcgtggtaaaactacatatttatataagcatgtgctaaaaaacactcgagcaaataccgtgactgagattttttggaaaactgtgggcaaattagttaaaattgagagctctggcggagagggtctcttccatctataggacaaaataattgggaattacagaataagtagaggaggacaattcaagagagcacagagctgcgtgcattctccctgtgccgcgacctgtatccaaaagcctcagacgagacttgaggagcttcctagaggctctcctgccactgcccctttggccagggcccttcccgcagtctcccctcccgattcttcccttttacagcccctcgctcccgacatgcgaggcccgtctcttcttccagtttgacttccaagtctttccattccctaggatcgggccccagtctcaccccctattttcacccccttcggttttcctcagaaagggcctcctgcctccctcggcaccctcgcctacccccctcgcagcacctgtcgcctccgcccctcactcggaccccgcgcatctggcgcagcccctcccgcactcccgcccagcgccccgcgtccccggcccccgctgtcgctgcttcgggttccgccgcaggagcctctcactcccgggagcgggcgcctcgcgctccctccctcggccccgccccgcccgccgctcgcccgttgcttcccacctgggcccgaagcgcccagcgccctctcccgggaccccgcgcccgccccgcgcccctcgcggctcggggtccgccccctcgcccgcagggcccgctgcactgtgggtaggcggcggcggcggcggctacgcggagcggcaggcggtggagcgaggccgcgcgcgccgaagatggctgagaagcagaagcacgacgggcgggtgaagatcggacactacgtgctgggcgacacgctgggcgtcggcaccttcggcaaagtgaagagttgagtacgcgctccggaccgctgtgcggggctgcctga

SEQ ID NO: 1620 - DNA, 2300 bp, Homo sapien
ctgggtgtggcagtggacacctgtaattctagctacttgggaggctgaggcaggagaacctcttgaacccaggaggcagaggtggcagtgagctgagatcacaccatcgcactccagcctgggcaataagagcaaaactccatctaaaaaaaaaaaaaaatagacataatatgacaacagattcaagaaaccaagcaaatctaaaagaaatgcaatctcgcgaagagtcataatcaaacttcttaaagacagagaaaaattcttgaaagcaagtagcaggaaggaaacaataaggataagattagaaataaatgaaatgaaatgaaaacaaaaaacaatagagaaaatcagtggaattaaagatgtgttctttgaaaaaaaatcaataaaattgacaaacttctagcaaggttgaaaaaattgataaacgtctagcaaggctgaaaaaatagataaacttctagcaaggctgaaaaagaaacagaaaaaagatataatattaagactgaagcagggatatcattatagactctgtagatatcaaaacaataataagggaatattatgaacaactctccacatttaaacttaacaacttagataaaaaaaggaacaattcctcaaaaagcacaaattaccacaactcactcaaaataaataatttgattagccctgtaactctcaagaaaaactgaatgcatagtttaaaaactcccccaaaatgaactctaagtcaggtgatttccctgaaaaattctatcaggcatttaaagatgaattaataccaattttatacaatctttcccaaaaatggaggagaaaacacatttttttaaagctagtattaccatgaccatgatatcaaaactagacaaaggcagtacaaaagaagaaaacttcagatcaatatccttaattagcatagtcataaaactcctcaacaaaatattagcaaatagaattcagcaacatagaaaatgaattattctttatgatcaagtgtgatttattcttcatttggttgtggtatataagggtgcagagatgcaaagctggttcaatattcaaaaatcaacaaaatcaccatattggcaggataaagaagaaaaattagacaatctgtgcagaaaataatttaacaaaatacaacctccatttatgatttaaaaaactgtcataaaataggaatagatggggactctattgtcttcctcaacttgattaagaacatgtacagcaagcctacagctaatcatgatacttaatggtgaaacactgaatgcttttcccctactaccggtaacaaggcaaggatgtctgcagttaccattgctattcaacatagtgctggacgttctagctagtgcaataaggcaagcaaaggaaataaaatgtatacagatagaaaaggaataaataaaactatctattcacagtggcatgattatctagatagaaattcccaagaaatttaccaaaaaagcacacaaaaaccctcctagaactaataaatgatttcagaaagattgtaggatacaaaataaatgtacaaaaaaatcaattatatttctgtatatcaggaatgaacatacaaatactgaaattgaaaaatatatcatttataattgcttaaaaatagatatgtgtttatatttaaatcctacaaagcatgataaggcctaaaagcttaaagctataaaattctgattaaatcaaagaaaatctaaataagtggagagacataccatgtttatggatcggaagacacaacacagtaaaattaacagtaaaaatgtcaattatctcaaaatgatacacaggtttaataaaattcctataaaaatcccagtaggatcttctgcagatacagacaagattatcctaaaatgcatatagaaaggcaaaggagttagaatacctaaaaacaattttgaaaaataaaagggaggcattagtatatcagttttaagaattatcagtataataatcaagactatctggtattggcaaagagagacacgtagaacaatggaacagaattgagaattcagaaatagaattatacagatatgcccaactgttgttgttattttttttaacaaagatgtaaaggcagctcaatagaagaaacacagccttttaaaaaatggtgttggaccaattgccataggtaaacgaaaataaactttggcttaagtctcacaccttatacaaaagttaacttaaaatgaatgtttcctctttgttttttgtacaccaaaggtgagacatctaaatgatacctttcaaagaggcaggga

SEQ ID NO: 1621 - DNA, 2300 bp, Homo sapien
ggatctgccacttatgggatgggggcccatgagaaaactgggattattacagggaaataaaatgatgctacttcatttgtatatccaagtgctacatgggcactttgacaatgacacagccaccaaccattgaggaggagaggggaaagaaagagaggaactgacattactggtgtttactcattgctaagcaaccctatcaggagattttcccatggccatttgtccttaagccaacgctgccagactcttgtttacttttacagatgagaaacatacatctcagagttgactttcccaagaccagcagctagtggggaaactgagtttagcacctagaggatcgtaagacatacagcaagggatcctctgccattccaagagtcatagctcttaagccgactggcaaaacagtacccacccctaacagctaccaatgattagtgcctaggacctagcactgtaactagccagaaaccaaagcaaaatgcgcagacctcccaggaaggcggagatgagagtcctgctgccctgctccacccactctgccagtgtaggctggcctgaggccactagggggagcccttgcactaggagcaaagggaatttgacagcccaattatcagttgggactgcggggagggctccaagttctcccgagagcttcctccactgttttatttacaaacttatacacataggagcatgaaccagagtgctaagggaaagttacagatgacttttggcctgggtcccctttagcttcagaaataggccccccaactgactgggagcagagtctacacagcagtgttggccaaacagagagtcatgaagtcaagaaagtgctaccatttatttaattcaatggcatgtcatggctcagaacagaatggaaaatatcagcacgattacacaaggtaagagtgagtactgctttggggagtttttcttttagctgatgtgtatgtgtgttgaggaaggatgtaaaaggtacatcttactgtgagtcattcattaataaagtttaaaatacatagacctcaaaggcttttataaaacccaaactgccagtccctgggccagaagcattgatgcagtgttttgtctgggacttgaatcctgtatttttgatagattcccaggcagctctggtgatcagccaggtttgggaatcacctgttagaggaaatggccctcaggcggggtctcctcacctgtgctccaccccgcctctccctggtcaggacaggagaagatttctaagaacttgacaaagcaagaaaagtcacaccggttacacataaagcagggcgcaggccacccactctgcccatccccaaccccgggagagctgaaagccccaaaactggcaactgaggtttgggtttccatctccagctctgtcagaaaaacaaacaaacaaaaataaccccagcaaaataaaatcactttagagtcagccagatctgggttccaaccctggctcttctagttactacctatgtgaccatgggcaggtgttaccatctctctgagactcagtttcctcacttttttttttttttttgagacggagtctcactctgtccccctggagtgcagtggcatgatctcggctcactgcaacgtctgcctcccaggtacaagcaattctcctgcctcagcctcccaagtagctgggattacaggcacccactaccacacctggctaattttttttatatttttggtagagacagggtttcaccatgttggccacgctggtctcaaactcctgacctcaagtgatccacacacctcgacctcccaaagtgctgggattgcaggtgtgagccactgcacccggccattcttcaccttttaaaatgggaatccaaatgcctcaataaacaccaggccaaaaacagggtgctcctttatgttaactccttttctggcctccactaaatccccctgtgggcttaggcatgctgtcctgctgggctttggtttccctgaccgtgagaaagggtttgtgaaattaagtagccgtctgcaggggcggagctggcagaggttgttactaacggggatcacactgtccagcctgcatggtctgtactaacaggagcctgccatccccattccttcacagctcctgctgcctgggcacaaatgccctggagagtgagtgactgtcagaccagccggaggggagcaacgggaagagccgcttgctgagaagaggtgggcttggcaggactgcaggtggagtactctccccagtcccctgcaggtgctggtctaagccaagctgg

SEQ ID NO: 1622 - DNA, 2300 bp, Homo sapien
tacacattctgggatgtgtagtctttccctcctgggatggctttcctgacacaccctgcacttctgccagagccagagttctctctgctccctgagaatgccagacccattccagaagctgtgccccgatcacactgttgcctcttctgaaacagcctctccctgctttcatgtcaaactctcatgcctcatcaagacccagctcatgctatctcctccaaaaagctttctgaaccctttccttccacaaaaaaaggacatcattgctccttctattttgctctagtggcttaagaaaagtcaattatggtatttactgttttctcttgtattatgtgtatcccttatgcctgccatgagagaggttgcccacagatgcattcttcagccctgccctgttctcccccatatggcaggacctctgacccctacaggctgcaggtctcaggcttctgcatcagttggcttctgtctgggcttggccaatggaaggcactcacaggagactactgaaagatgggaggaaggaagaagccagggtacttcttctcttctctagaagcctcagaaggtagaggtggccattactttcccttactgattctcacgcttcctctgagtgattctagctcctagaccctaatacaccacctccaatttgtccctgtagcttagtggctcccagctcttgctaatccctgggtatcctcacagctctcctggtgtaaccaattgtccatattaaatttcctgcttccaatatgtagaaagatttctgttttcctaactggaccctggcagatacatcagctcatctccccatccaggagttcctgagaatggtcggtttaataataaaaccagtgaatgggtgaatggagaaacatgtttacttatcataaatcatgtttatatttatactttccaagacactttcatggctctgggaaagttatccacttttcctaactaggttccccatccccagtcctcttgttcaagttaacccacactcaagtcctgcatagcatctgtgtcactgacagatggtgagatactgggtgtggagtgagatcatcacaatcagaacagttagagaatccagaaaaactgagagtgttggcaggggcccttaggacaatggcaaaggatccattatccttctgctcttcaggtctcatatgtgactttagccagagtgaggccaatttacagttattcctagagcccagtgcaatttgcacatgatgagaagatgcacattcatggccaaagtggaagatttggataacaggctggctgcagaaatgctcccctatgcatgaggccagcacatggccgcatggtctcctcagtgctgcccagagcattattatatttccatattggtctggaggccaaatgaatagaaaccaggcatttaaaagggatctgggaatggccagcagttaacgctcccactacagtggaggatggttctaccctttcctgacccatacatctctcaaatcactttggtccttctaaagccttggctgtaaatgaggctgaccagctattgagaagaagcttagacctaaaatgagaaaaggaaaataatcccaccaaatgaaatctcaccagaaaggtaacatgtttattaaaaaaaaaaaaaaaaaaaaaaacaaaccagttattgtagggttagcactgagctaggtagagaatgagtaagaacaaatttctgcccttgaaggccccactgcctacttgacagagacaggcacatgggcagagggacaaaggcaaggtggtgagctgagctggagtccagaggctcagtgtatggcccatgcacagcaggtaagaatacatgttctggatggggctgaccaaaggcaaaccccagccctcccactgaccagccttttaacctgatctgcgtgaccctcatttccctgggtcttggctttctcatctgtaaaatggggggtgagtgcccactcacagttgttgtgaaaataaaatgagtttatgcaccagaagttcttcatgcctagtctgatgcaagcccacacaagaacactggtgttgtcataatggatggcctctggtggcagtagtgaaattcctccaacagctttgtgggccctggattggagctggaaagaaagaccatggtgaatgccacttgtgatgggtccagctgacagtcggacttgggggcccttgggaaactgcctttgaagatcctcagaaatacttgggagggtggtgagtttatgaaggactcacagaggctaccatatggataggaataa

SEQ ID NO: 1623 - DNA, 2300 bp, Homo sapien
agccactgcagctttctgagtaggacagtgatgttgtcagagattgtttccttgatgatgaatccagcagtgctagagagggagggttgaagtgagaagtggaggcccactaggagtgggtaatgagagttacagagagatgaggccctgatatggatcaaagacagtgaggatgaaggagagaagcttggcaggaaaatattacagaggaatatggtggggtataagggaccgtgctgggggtggggtgggagaggtgataaaggttaaggaagagtcctaaagccattgagggcttgggtaaggagaaaagacatcagagacatttagagaaggagctgctttaagaaggaagacccgattgcttttatttcagggatcaggggaaggcagaccagtttttctgtggggcagtgtttcccagcctaggtactcttgatattttgggccagacaattttttgtcctgggcactgtaggatgtgtggcagcatccctggcctttacgcactaggtgccagtagcacaactccccaagttgtgataacataaatatctctgaacattgccaaatatcccctgagggcaaaatcacccccagtggaggacactgttgtagcggaggttgtctcctcatgagaaaagctgtgggaggagtgggggaacttgagctacacttcccagggggctctgtggatctgtttcaggaactttgactacggatgagaaaggatggaagttggtagaaagaggtggcctccagatgtgccatcctgaactggccccagggtgtccagatagaataccctccattgtcctccatatcttcagtgaaagcaaaatgaaatgctagtcacgctggaatattgtggagcaaacagaaagtgtggttttcaaagtagggtagaactgaggccaagaggaccaaggagtcaaaatgaaaagaggtaggagaaagagagacacagaaatcacaggctccggggacttcccaggacccagaatccacatttacttctgtcaagtttaccaaaatctctgagaaaagggagatgataacaatttggtgcctttaaaaaaatctccgcatttaaatcagaaacacattttcttaagcatacaagtcattcattaaaatttctcctaactttgagatcagtaatgatactactggacagtcctgctaatgagagaatctaaatattcccaaggatattgagacagctatacaaccttgggcaagttagttactttctctgggcctccatttcttcatcttcattaattccatctaaatggaattaataatttccatctcatatccctgctatgaaaattaaataagacatatgaaatgcctgccacatagtagccattaaattattgtctgtgtatctatccatcatctatgtatttacctacctatctatccatccatctcaatttaatttaatttatgtcttgaagagtaagagattttaggcaggtatggcaccattagtcctgatgtgtggttttattgacattataattctagagagtgcttctggagatgtctatttaagacatttggccccctcaataaacagataccctggatctcaatgatgcccaatgtctgtatgaaaagtggaaagtccattgaattacacatatatttcaggatttagatgtttggcaacgtacagtagaaccttcatgtaatggttagcatttcctacatttttctgagtgctttatgtctgagttgatataccaatattagccttgtttcagtcttgcaaaatagattgatctgacctcagaagttccaagagacactgaaaaagaccaggaattctagaactgcatcttggtttggtttttgcctccttttgaaaataagacctctttgctaagctggtattagttaaatatcttcctttccttaaccacacggatattgtttttcaaaaggtctaaagggcagtggcctttggtgcctggaacacttttagagtatttaggtaatcaataccctggttactatttaaccatatttgaaagagaatcaagtgagttctgtgcaaatcaatgtgtatctgggtgagtttccaacatcagatagatcttacaggtcccagcctgtagacatcttttactccaatttcctgaatagatagctttattccttcaaggtaatatagtgcggtggcttctggctgagatgtttgctgttgttttcttcatcttgtctttgatgacttgtcagcctggggtaactgcacaggagaaggtgaaccagtaagtgggccatatgtc

SEQ ID NO: 1624 - DNA, 2300 bp, Homo sapien
gagacaggacatggatctttcttgaaacacaagtttctgcttgtttacaaatgattaaccaccacaatcaattgcgtcaaagttcaggtcaattcatcctttgggacaacggtgacatggagtcttgcacctaggcttatgacaactggaatgcatcctgggtggtctggcagcagaacttgtgttctgtgttttggacacaattaatgtgagaggactaccatcttctgtggctttcccatccatcccctcactatacttccttatttgattctccaaccccaacccagctactcggcaggggtggcaggagggggaggcttcccgttttgtacgttcaaacccaaaacaaacttatcaagtaggtagtaatgaattattatccctatttcacagatgagaaaacagagtcttagagaaactctgtaactgtgtttaaggaaagcaaatccagtgttctttctactagcccaccctcataccttgcaagctgcctctcccatgtgaggttcctcacccacatctgcaatagcaaaagcaacaggacgccatccaacacgtggactcagccctttatgcgttgcaggttggttttgtaaatgccaggttggtgcagtttggactttaatatgttgattctggggagtcagggatggttttcaggaaggtaggtttgagaacctcagtcatttgtatcttttgggatgcaaacaataacaacaacagcacatatatatttagataattattttcatgtagttatttcctgggttttttttgttttgttttgttttgttttattttgagacggagtctcgctctgtcacccaggctggagtgcagtggcgcgatctcggctcactgcaagctctgcctcccaggttcacgccattctcctgcctcagcctcccgagtagctgggactacaggcgcccaacaccatgcctggctaattttttttgtatttttggtagagacggggtttcaccatgttagccaggatggtctcgatttcctgacctcgtggtccgcccgccgcggcctcccaaagtgtcatgtagttatttctataatgcctatttgttcaacaattacacatttagtatttggtctgactctcccaactgtgagtggtaagttgtcatagtcctcctaattttacatatgaagaaacagaatcagagacagtcaataaaaataccagctcacttatagagagtgcacatagaatgtgccaggcaatgttcaacatgttttgaacatgttgtgaagattaaataaatctaatttatttaataataataattataattaattataattacaataataattaataataatctaatttatttaatcttcacaacaacccggtgaggttggtattattattatccctgttttattgatgaaggaacttaggcccagagagggttagtaattttctctggccacacagctggtgaatcatacagaagcaatttgaagtcaggtagatgggttctagagccctacagcctcttactgacttgctcaacatcatgtaactggaaagaggcaaacatggaattcaaaccttggcctgtctgactccaaaccctgaattctactaagtaataatagctgacatatctgagcgctgaacataggcctgttctaaacatttccttatattaacgtgtttaattctcaccacttagcaagtaaggagagtaaggcacagaagtaaagcaacttgcccatagtccaaagctgttaggttggtgcaaaagtaattgtggtttttgccattaaaagcaatgacaaaaactgcaattacttttgcaccaacctagtcagtggcagagaatgtacttgaacccaggctgtctagacctagatcccacagtccttgccacctcactaatagcctgtccacttggcagcttaccctaaagttacagaggaataaacaccatgctgctacagatttttcattattctggttggtttccagagtgacaggtaagtttttggtctgtgcaaagtctgtttccagtcactagtggctttctgtttactttgcagagctatttgctcttggggacagaagctgacagtggcactcacagcacaggcttgttatgggtctagcagcctctgtggcatctcctgtcacattgggaaaatgaagaattccaggacatgggcttggagggcgccggtggagctatttcttctctgtgctgccctgggctgtctcagtttgcctggctccaggtaagtgacagttaccaataattccctgatcaataatatga

SEQ ID NO: 1625 - DNA, 2300 bp, Homo sapien
tctgtaaaccatgactaggtaaatagaataaatcacagaataatttgtgaaagcaaacactttaaattattttgggtttatttttgagatctgatctgatagtataagtttatgatcatgacattgaatttttttcctcaaataatctcacattcttatctctttcagatatgacttagaatatgattgaatatgaatacatgattgaagatatattataaaattgagatacttgttgcagtaagttataaattaatttgagagagttggaccttctctttcaatttgttctattactttatgcccttcaacaagcctttgtagctttgttttgttggttttttttttaatctagctcttaaatcttcagtattaaatttattcttgggtattctccttttgttactatcattaatggaatctgtgtaagtttccagtaggttttctataaggttacttatggcaatataaaaaatattgatttttatatatttatttttaaagtagcaaccttaggtaattctcttatttgttcttatcccttctaatagatatttcctgttagaaaatattatctgcaaacactgataatgttctcattttaaacacttgatttctttttcttgcgttagtgcattgcattgcctcaaatttcagagcaatgttaaatgatagaggtagtagctgccaccttgatctccatctgattttagcagggctaccctcaattttcactgctaagtttcatattggctattggtttgaggaagatgttctttactatgtgaagggaatattactataattctagtttccagttttttttcttgaagaggataatgaattttatcagatgcctttttggcatccattaagatgagacagtctctcttgagctattaattacattctgaaagtcaactttatttagtcatggtttacagctatgtttaaaatgtaggaacttctgattatccattgaaaagattaggctataatttgtatttttttgatgttttgttattctagatttgatatatgaattgagaaatttttttttctgttgttcgacagttaaatgagcattattttctgtcttcctttacagccactccaggcatatcatgtgcactggccctgctagctaatgctcttccccccactaccatcaccttatggtaaactcctacttacttcttttttttttttttttttttttttgagacggagtctcgctctgtcacccaggctagagtgcagtggcgcgatctcggctcactgcatcactgcaagctccgcctcccgggttcaggccattctcctgcctcagcctcccgagtagctgggactacaggcgcctgcaaccacgcctggctaattttttgtatttttagtagagacggggtttcactgttagcccagtttaaccatcaacacttccatagagcactctcccaccactcccatagtattagcacatcctttattccagcattaattctactacagtttacttgtctattaacctattttcccctctagaatctgagcttcttgaagcagggacagtcatgtatgcatcttaaaaaaatcttcaatctccagtgctcatcagaagacctggcacatagcacattgttaataactctttgttatatgaaaaagtccataatgcatttttgctttaaactttgccagggaagaaaatttggatgctgtttgtgtatacttctttgccgttctttgacaataaaatagagataatatcacttactgcccttcttcacacctgatagagttactgagctgggataatagatgggcaaggtgaaagtgaaagaattaaatacaaaaatccataatagtgattagactttctttgatattaacaacaggtaacatgcattgagcgtttactatgttccaggcatgaaattatcaaatttatttcttataatagctgcaattttaggtgagtaaatgaaattttagacagtttaagtgacttgtctgaggtgaaacaactggcaagtcaaagactttctgaaatcagggtccactatgtggaaactattctatatcgactcaccagtgaagatagtgtgctccacttaaatgagaaaagcaacgaacaataagcccagggtgaagatttggttacataccctgcttctcaggttttgcttaagtttagcgcccaccaggaagaaagaaaacgattatctgcctccttgacttttgcatcatttgtctttcttctgatgaaagtgggactaatcactgagttagggtttccttat

SEQ ID NO: 1626 - DNA, 2300 bp, Homo sapien
agatggggaagtgcatcacctccctgctagagtcgtgcctccttttactggtttggttgttgatttcacccctccttgcttttacacatgctgatctttctgcctgagacaaccactcattcattcattcattcattctacatacaattattgagaagctggtggtcctttcccttatcgtccttttgacagaaacatagcttttcaacatctcacagagtagggcttatcctctttgaagctttattaacccttccaagcaaagatgaatacttgcatctttccgccccagtgtgcgtggtatttatacctgttttagttttgctcacatgtgtgtgttgccgtcccttacatgactgatacctctgttagactgagcttcttggaggacaggaaacaacccttgactatgtactcttggccagcatggttacatggtaaatgtctgttaacatgaatgagctagtatttgtatctggcccatagcagattcttactaaatatttgctgcaatgaaatggtaaatattattaataaattttattatgtttatacatgaccaaattttgtgactctgccatctcccattgaacgttgtcttagagacgagggtctggaaagggtgtgggtgctggtgacaaggtatagatagatggtataaaagtgacaggataaattctcattttctgtgtatggtttcatggaccctgttttacaaagataactttctgtttttcttagttgtagccttagattcaccagatcaagtactttcatttgggccatttcctttttaaaaaataggtagcttatatataaataaaacaaaacagatacctttggattaaggtgggaatttcctcatattgaagctttactataattttatgtggcttttatattagactttctggttaagattaactagattgtcatgattaagaggttggggtcattattctttttgaactgaaactggcatttgaggtcagtcgttttctattaaaccattctacatctgtgggatgaactaagaattggctgcacaattcgaagatccatttctaatagctttttcttaatatttttcaaaagtggaaattggtgaaatgtttactttttaatagaactctcagatataactattagatagtcacaagaaaggactattatcaaagagaatactgtatatttgtttaatttaaatgagatcgagtgagacactatatgtgaagcagtagctaagggcatggtatatagtaaatattacctgtaagtgaagtggttgtattatcattattctgttcctagcacggtgtctgagtttaatagcacctggtattattcaatgcacatttattagagaatgaatgaatgaaatctgtgtctgcctgtttcttttctttttctctgcacattaaatgcttgtctgctcttatagctggaggaaaatctgacataaaaattggcttgctggaatgtttcttggccccatttgtcaccttatccttggagcccatttgtatgtcaactccatgccccctctgatgcctgccagtgagggacagaccacaggttacttccatatgatctgcttttgctgccaaggtgctgatcaagcttggctgatggatgggtgctctcttattggaaatgtctccatggggctggtcaggacatacctttgctatatattctggttgggatctagtgcttgaaaataagaaacatagaaaacagagttgggttttgtccctcttataaatctagacttttaaagatctattttgagttacctagtttgagaagcagttttgccgctaagcctctcattccctttgctgtataaaccctatcaatgccttcatgaaaccatgggagcagtttttgcataaagaccaagattttgtttgtatatgtttgccaattcactttttataaatttctgtttaacttcataacagtgatgattctgaatgttctcttgccttgatttgcagcactcaaaaagagtgaatgaaatgtgcagctcagagtgtcatttctgaagggaggagtctttctcttggagaagagtcctcaatgagcctggccgaggcccgggatctgtgtgaagtggactaaggattaagtaggatgtcaactgagacagaacttcaagtagctgtgaaaaccagcgccaagaaagactccagaaagaaaggtagggctgaatttgacctttttttaatggctacttttctgcacaggaatgagtttttagatctctggaatgatataaagaaatatctttatgattg

SEQ ID NO: 1627 - DNA, 2300 bp, Homo sapien
ccatatgtagtattgttcttagtctgctctgtgatttccctgaactctgtgatgtagatagatgataattagtactcagatttaacagaaaaaaaaagccattatcattgatattaataacagacacagaactccacctcctaactctgccaggccaggtgcttgttagggggtggctgagggagccagcacagtcagcaagcagggaaacatcccccaccaaagttctggctgacaactgactgtctgaattcatttcaaactctctctctttgcttccagcaactccttcaaattgggctccctgaggtaagaagtcagtgagacaatggccaaaaggcattctagatgggctgagattttacctgattacaaagaaactgaagttggggaaacagttcagtccactaacctgaggggtacttagtcacatgggcaactcttaagggaaatcccactctctgacattcaagagctgcgattccaagtatggaatgcagacttgccattggtcagaaccctgtgcccggagcatcccagcctctcctcttgctaagaacctatttttccatcaggcacttctgcagggggttgtcgtttgagtcctgaaggagaaagctatggcctgtataaacaaaagcatgagaacagaacttccctaagcagccgagatggcttttctggtctgtacctttcagctggggctacaaaacctaaacctatttcctaacctagaccccaaattatttgtctccatcaatctgcctgctgacttgtttctcatctccctgcctcttgaccttttgcatttacttcctattagtgattcgtatttgctgctcagaccaaacatttggaacctttcctcttgtttgggctccgtatccctctgactatatgttattattattgctcttattaattatttttaaatatatatcttatattgtagatagtctatgtgccagatgccgtaataggcactttatattcactgaaaccccccatattttcaacaaccttgcaaaaataaatcataatatgctcatcttacagatgaaaaggctgaggcttaacaattcctcagagctagaaagtggtagaccaggaggacttgaacctatctttacttcacttcaaaatctgagaactttgcacaatgctgtctaattctcattcatcctttggctcgttctacccttaatttttccagactaactagtttaactacattccctgaaacattttcatctttcctgataatgggctctcttggtatctgagatggaatatatttcctgaaatcaacagagagattgaagggaaaaaataagcgagtgaggaacacatggacttcaatgtatctcaaatatctcttgcaccactgtgaataccaggactatacctggatgaaggtaaaagctactattagacaaagacctctaataaacctctcagttttgctaacttcctctcaagtgaaaatactatcggcaatagacttaggtcacttcttgcatttgtgttctgatcttcagagctttttcatatccctaatttcatgtgggctcctgaacaacacttattattgtccccatggtatagatgaggaaaataaaccaaagagaggttaagagacctccttaaggacacagtgaattactaatacaggatatgggtaactggatcctggtcttttggatgcttgggtttgtgtatttcacgaatgtaacacatagaaaaaaaattgtattttcaagggaactaacatatgttgaatgcctacttagtatgaaagattatcctttccatcatatattacatttgagacactcatatgaagtaagtgctattactgttctccatttcctgggttaggaaactgatgctcagagagttatgtaacttgctcaagatcacggtagtcactgagagtcaggactgcataagagtgtgcctgactccaaagccattctcttaaggctccctcatggcatgcttttagtctccattgtgtccaagatgcttaaggaattccacacagtgtttggaacacaaggatgaatcctgatggctcccgctggttgctaggtaacgtctgtttggtacaatctggttcacatcataatggttcttttgccaacaggagctggtaatcaggatggcagtgaggcaggcacttgcttgcagaagaacaggcctagttttttaagaagccacaaaagtgtctttggatgattaggatctaaggggccaacagctttgcaataacagcataaatattgtgggctggatggaca

SEQ ID NO: 1628 - DNA, 2300 bp, Homo sapien
agcagtggggagcaagatcctggaggcctctggaatctgttacactatactgatatcagaaattatcacgtgtctcagccgaaaacctttcctcctgttgctaagagagaaaggactgtctgtttccctttcttgccatctctggctctacacatccccaaacagctctgttttcctttctatttttatatcttgagtgctttatatgatgatgtcctgcatgcttctaactagatgaaggtggcagacaggaaaaaattgaaaagacctaaacaaaatgaaaatctttcctgctcgaaatgtttcctgcttgagaaaaagacagatgggttcaggggctggcattactaatgcaagcatcccagatgctgagagaagcttttcatggactcaacaaacaggcaacccctgcctggtcctggacaggacagaagggttataggagcactccagaggctccttgaagacctgaaagtagagaaatgttgaacatgaaattaatggtcatttagcaccttaggtgccttccttgtcacatttcatcctcacaatacttgtatgagaatatatagattattatttatattttccagttaaggaaaaggatactcagagagtggtaggagaaactcatacccagacccccagggtagctgtccagtggcctttttttcctagcggaactacaggcagaggggaagttgctgtggttgtggaggtcagggaacttgaaagggacttttattcagcactgtgggacactctgattggatcctctccttccacccacgcccccttcagtacattctctgcacagcagctggagtgagcttttacaaataaaaatcacactctttccaatcctgtaacagttacatctctaacccccaaaactccaaacttagcatcaagtcaatttcccttactgatctttacccataagaccagcctccctcttcaacctctccacctcatctcgtgtcaccaactcatcactcttgctacattctagccacacttccttccttctgctattcaaacacattcaacctgttccttcttcagggccttggctcttgttccctctatttctaatgactggttccttatcatacagatctcagattagtggtcatgtgcttggaggcctctttcccaaatgcccagcctgatgtcctaccctagtcattttctatcacatgtcgccatctacttaaattttggtcaatagcgattattactatccaatagtttcttgctgatttacttgtttattttccgtcttactaaagagcaggttacaagagaataaacattacttgtctgtgttcttttgaatgttctgctcctctccataaagtagaggtaggctcatagtaagcacacaaaaatatttattgatgagtgaattgttactgatatataattacctcaggaagggcagacctgcatcagatgaaggaagaaaaactcatgttttgctatcacttaccatgtgtcaagctctgtgcttgtctcatgtgattctcacaattatatgagacatatggttcccattttgtagatgaagaaatggaagctcaatcatttggtcgtttgataagaccacacagctacaactgaaaccctggtctgcctgcttcagtgccgacacacttgattgtggggtgtgcataacatgtctcaggggtttatgtacctgcagaagagtgtgtgtctgctgctgcaaaatcttgcacctgtgaacaccccaagaaggaggaggctgtgtaaaagcacgtgcaggccaagaccctagaggcagcacagagagggctctccccagtaaatcacttttgcttaacctgaagtccatacttcccaggggagcagacactgagaactgcaaactgaagactgcagaatggctgcaagttgtagacctcactgtgaccgtagcggagaagggagtctgcgagtgggtgctgaggtccttccccctcagagctcacattcaggccaggtcggtcaggccgcgccacctcttcctgcagcagcattccgcgctaggtggcgaaatgctgaggggctcccctattcgggggaatgcggtagtgatgtataaggtatgaaagatgtggcctgcagagagccggcactatctctactgctgctgctgctgctactgctgctgttgctaccgctgcctctgctgccaccgccactactgctgccagcggagccgctaggagtgagcatcccctctccgggatacccagctccgcggcgtctcccgcgcgccctggccccacacggacctg

SEQ ID NO: 1629 - DNA, 2300 bp, Homo sapien
tgtttcttttgtgtaggatttgttaaactttttgaatttgtggttttataattttcatcaagtttggaaaacttttggccattatttcaagtgttttttttttctgtctacacctcctccccgctttttggggacttcagttagatgaatattaggccacttgaagttattgcatacctcattgatgccctgtgcctttttttattattgtattttttctctgtatttcattttagatggtttctattgatacgtcttcaaagtcacaaatctttatttctacaatgttaatctgctgttagtctcatctagtatgtttttcatcttagttcttacagttttcttgtctaaaagtttaggtcttttaaagaaatatattacatatctctacataacatgctcatattttcctttagcttcttaaacatgtgcagtatagttacaataactaatatccttatctactaatgctgttatttgtttatttaggagttagtttccactgattgatatttcttctaattgtggatcacatatcttgctgcttgcatgcttggtgatttttaattataaattgcaccttgttaagtgttaaatagttttgtgtcctaatacctgtttagattttttttttttcctgggatgcagttgttgcttggaagcatttaatctttttgggggttgcttttaatatttgttaggtggggccagagcagctttcggtctcagactaatctttctctaatgttgaggcaaaacccttctgagtactctacccacgaatgataaggttttccactttgaatggtggggaggggataggcagtataccatgccctgtgtgagccctgtatattattccctgcaatcttttcaggtggccctttcccagctccagggaattttcttacacatatgcccagacaggactcagctgaatatgggagggggattctctgcagaactctagagttatttctctgtgcagctcttgtcttctcttgtcctctgtcctgtgagctctagcaaccttggtttacttgacctcccagctttatctcttcgatttaggggaaccactgggctccacctaggtttaccctgtctgcattgtggcctggaagcactctccaggcaataagctaggacagttgtagggctctgtttcccatctgttagggatcactgttcttcattgcgtaatgtccagtgcattttataagttagattttactattctgtatcacatgcttccttccagttattgcaaactgataaagttttactgttgtttttatctaatccactttattgctcaaatcatttgccattaaaatacaaatggctcttccctaactaaaaattaaaaatgaaatgaaaaaaattcaagcttctaaagtaaacgttgcatagtaaatatcgtggtatatatactctggtttatcttgctgaaaggcgttgctctaggggtgatgagttgaaacccaaggtaatttagcctgagatgtgttagaagaacaactgacacgcctatttaataagtgttatagtcccagtttggtaagtaaatattttccacagatatttatagttttttttttgtttcaggtagtcaagtgaaaaaatgagcttcatctgtggattgcagtctgctgctagaaaccatgttttcttccgatttaattcactgtctaactggagaaaatgtaacacattagcatccacctcacggggctgtcatcaagtacaagttaaccatatagtaaataagtatcagggactgggagtaaatcagtgtgacaggtggagttttctgcctggaaactttcatttttatagtacttttaacaacaaaagaacaggaggcctctcaagtaccaaaagtaaggaaatttggaggattaccagcaaatgtactgtatggaatgatgctttttcaagacagctgctaataaaagaagttacagcagtccctagtctgtcagtattgcatcctctaagccctgcttccataagagctattaggaatttccatacttctccacggtttcaagctgctccggttcctctcttgttgatgattcttaaaccagtacagaagttatttgcaatcattgtaggcaggtaaaatgcttttttagaataaaaacttttatattaactttttgcattaatattttgtgctaacgtattaacttttagaaattaatttttttatttataaaactgtacttttaaagaaaccttgccagatcccctgtctccccccatttagctcaaagtgaagtttctaaacagta

SEQ ID NO: 1630 - DNA, 2300 bp, Homo sapien
cctctggagggaagggctgacggtaggagaggcaatcacagggctgggcttgataatatccattgggataacaggatcctgaagtagtagaagccaggtggtggctttaaccatgaggacaccagaagatgtaattactgtaacatctgccaagggcagaggagcagccaagggggcttgatccacaggaggttgtggagggctttaatagcataaggtctccctaggggaaaaacagacgggcagccaacaagagtgttgcctaacatctacaactggaggaagacaagaagctatttatcctatgcagggagtagttgcttaataaaaggcactgctcattgctcaagtctcagacctgagcctatcttcacactgagaccacagaatctgttgacttaagaggttgttgggtccctataaagaagaatcctgcaatactgaaacaaatatttactgtaattaatgattactctttggtctgtgtcccacggccattttcttgactgattttatgttgaggaaagaggaatacccagacatttcacaggtgttacccaaagtatgtaacacacatggctcctctctaagtgtgggggcttatggggatcaggtaataagcagagtcctggataatgtccagcttacagtgggtccaggaatacactgacccatccagtagtcattttcttagttcctgagtgcataattgggagtacatattgggcagctggagcaatctccacattggtaagaagctcagggtccttggtcttgagttatcatggtggggaaagccaatgggaagcctctgaagctgtccttctttccaagtgaagataataaatcaaaaccgatatttcatctgaggggatagtgagatgatggtggagattaatgtcataattaaagacctgaaatatacaagagtggttggtcatccctgccatatctctacttaacttgccagtctggcccctttggaaatcaggtggacccaggataatgacataatggctctgcgcagtccaaaaggagctggatcaactggaaattccagagaacatcacacccatctatttcaccaatgacattatgctaaccaggcaagatgagcaagaggtggctagcatgctggaaactttggtaagacatgtgcactccagagtttgggagataaaccctacgaagactgaaggacctcctacttcagtttttaggggtccagttgtcaggggttttccaggatatccctttcaaagtaaaaggcaaatcataaaatacacataagataaacgaaacagtaacttacacattttccaaaagagatacctaaaattgttcatagtgtttatgtcctttgacatagtgtttatgtcctttgagatgttttcattgtgcacagagtgtaaacataataaactaatatgagacctcactactcatccatcacaatccagtgtttatttgtactggcttatttgtacacttttatttatttgtgtttatttgtacacttttttttaatcgcctgtctttcctcactgtgatataaagttcacgaaattcaggtctgtcttgttcactgctacatccttggcacttaaaatgtagttgatgctcaagaaatatgttttggtgaaatgaatgaaacatactatacacataattttggagccagctactttaacctccagacacttaagattatacttcatctttcttaaaatgcgtccctccaaaaatcatatgaaagcactgttcccatactccaaagactatttctatgaatgcagattcagaaccaggaagccttcgtcttttggcagtcttcgagtctcttcccttttggccggtactgccgtagagactacaacggacacagccttgcgtggatcattctttagaggacccaactcaccaaagacgggagaaagttgttcctaggcaagcagcccagcccagggccatgtcccgccttaagccacacggaggcgctagagcgccacagtctccgcggggcccggggcagctgggagaacgactctgggcggctgtattgactgccgggtgtgggcggagcgaagggcgccccggccggtatggcgggcaggaagtgcgggtgcgcgcctgcgcataggtcgggtctgcggtgtcaccgctttcgcttctgcttgagtcagtcctcacggtgacgcttttccccagcttttccgagtaggatcgtgcccaggggaggaggcagagtgcggcagtggggagggggcggagcgcagagcgcctgcgggggcgcccgggca

SEQ ID NO: 1631 - DNA, 2300 bp, Homo sapien
tgttgccatcctagtatgtctgagattaggaacgaatagagaggcatatccctgagtgtaacagggagggccttattagggaaggcatcttggaggtgactcaagagctgagtagaaaaacagaattatgcactaaataaagaaagggagactccaggtaggtgactttgcaaagacttgaaaacatggactgccggagaggttggcaggagcacgatgatgatgatgatgatgatgacgacgacgacgacaacgatgatgacaaatgacagcagctaacatctatccgttgcttactatgtgtagatactgttagaacagatactcttcaaagcagtttatctgcattaactataaaacctaccttgtaaggtaggtacttttattatccccattttacagatgacaaaactaaggcacagagacgtagcttgcctataacatcatataggaatgatcttaagggctaatataagaagcatgaattttatctggagagccgagagcacccccctcactctacttaacagagaggaggtgggcacagacttctgatttagaaagtcttcttggatgcagggtggaccgaggtcggagaggggaaaagaaactagaacctgactcagatatctgtccaaggaagacctgaacagagacagtggggatagacagcagaggactatcccacaattcctcatgtttgtggataagaaattgtccctcacgcggatcacgaggtcaggagatcgagaccaccctggctaacacggtgaaaccccgtctctactaaaaataccaaaaaaattagccgggcgtggtggcaggcgcttgtagtcccagctactcaggaggctgaagcaggagaatggcatgaacccaggaggtggagcttgcagtgagttgagatcatgccactgcactccagcctgggtgacagagcgagactccgtctcaaaaaaaaaaaaaaaaaaaaaaaaaaaaaaaaaaattcgccgggcgtggtggctcatgcctgtaatcccagcactttgggaggctgaggtgggcggatcacctgaggtcaggagtttgagaccagcctgaccaacatggagaaaccctgtctctactaaaaatacaaaaaaaaattagccaggcttgatggctcatgcctgtaatcccagctactcgggaggctgacgcgggagacttgcttgaacctgggcggcggaggttgtggtgagccgagatcacgccattgcactccagcctgggcaacaagggcaaaactccgtctcaaaaaaaaaaaagaaaaaagaaattgtccctcacatgtctctgcttcctctgtctgtcaaggcagaatatatttcaatcttcctgcctcaggaattgcgtgaaaattaatgggacagaggcccagctggctttcatctgctaaacaacacccttgcacgactggtggtgcacattaaatgctgaacatataaaatgtgctttgatggaggacctgggaataattatagcttgctaattattgttaattttaccacagctttgaaactctagactttctcaatgactcaaaaagagattgcaacccctgtatgccatgaaactagccacacagtggcagacaagcaatttctcacaggctccattctttcattatttacatggttcagctacttacgtgggatacaggaaaagaaaagcaacgatttgctgtgttagaatcaaattgtacaaaaaactctttacagtcttgctggctctttaagaatttgttcctgtttgtctctttatagccagtgcacaaataaatattatgtgcgtgtgtgcctgtgtgtgtgcgcttgtgtgaggtacagaaaattagtgtttaacagaacttttaaccctctggacaccaggatacctgtgttttacccttgatatggtgagtaacagaactgcttccctaacttcccttcagattctgtgtcacttcgtgtccacaaacactttatttaaggtctcatcactcctaggcagggtgccaaagacccctctcagaaatatgaggaagttgatagcagtgtgacttcaggtctttaagcctcatcagtaccacctataaaacgggtctgatagtccctacctgtcaggactggtgttaggatgagataatgtttgtgaactgtaaactatataaacgtgtgctactgtgagaactggacaaagaagagagggagtgagagaaattaagggagggctggggctgggaaagaacgaaaagggagtcgcgtatagaggagagcgcgacagtcgcgagccacact

SEQ ID NO: 1632 - DNA, 2300 bp, Homo sapien
ttctttgtgttttcttccagagatatttgtccatatataagtaaatatgtatttatttatatagagatatgtagacctctgtctatttacattaagggagattttaaacttggaatgttttcctacacaacaagcatggaattattagttgtattttcagcttttttttaaaccattgataaagtttgcttacagactgaattctctcaggcttgggagtagggacttgggtggtactgattgatgaagaaaggcttttttccttcccttttttgggcatgggactctccctttgctctattttgaaactggtgaatattttctttgctcctttttttatcttctttttttttttttaagaaacaaggtctcgttatgctgcccaggctttgaactcctgagttcaggtgatccccttgcctcagtctcctgagtagctaggaccacatacatgtgccactgtgcctggcttctttgctcctcttgttcgtgttctttccccaatttttctagtgcccaagtccctactcttctactaatcatatcttaatccagatctgtcctgtctccacaaatgctccatgctacctaccaatgttatctatttgtcttcatcccacaataaagataagtagtttttcatcaagttgatctcagctaggtgttaagagcaatcttaaataattaatttatatttactaataattttcagaagcactttgagtttaagaaattgtccatatgtcatattttctaatgagtatcagaaatttacttaaattaaggtttatcacttgggtgagatctttgaaaatgatttgctaccgtaaggcatgactgcctggcctgtaaatctgacaaaacttttcctaagttgtggctagttttttgtttttttcatagttttaagaattctaaaaatatagaattatttagctaccttaggaagtagagaatatcttatgttggggatattgcagagaggatttacgtattaaattatagttagacttgatacctaacagtcccttttagctgtcaaattatgtgttcctttctgtgcttgagaacacacaggagctccctcaagttgtcatttttttttttccctccacagcttcagtgttatgacgtgcacagcctttgacacctggatgtgggaggtgtcagaaggcattagttggagggtaggcaacatagtgagaccccatctctacaaaaaataaaaaattagcccggcaaagtggtgcgtacctgtagtcccagctactgggaaggctgaggtgggaggattgcttaagcctaggaggttgaggctgcatgagccgtgatcacaccactgtactcagcctgggtaacagagtgagaccctgtctcaaaaatgaaataaaaactgacaacgacattaacaggagaaaaccagagtttgttgatgtgtgcagcatatacatatgcaagagaaactctgatgagtaatgaaacgggtagttagaacttggggcttataacatcttaacaaagaagacatttgttgcaggacttcctcatttgtgatttaatcgatttagtcttttaggtcagttcactgtgatatctgatagagtaaaagtctctgctgtgagatacataatggatattgcaaaatagggaatctgagttaaaaaaagtgttgaaattagcacagaacatgttcagttgatcgtataaatggaaaatgtaacctgtacccctttcaggcacttatttattttaaaaagttattttagatatggaacattataacttacaatatgaattcattcagttaggcaatatcttcatttagatagctattctttttaaaaaggagtttctaaatcatttccatcagttttcagtagttcagattccaaaagaatgaatgtaggctttgattttaagagcatagtctatatagaagactttattgtgtgcttcagaaaataaagatgtatttttttttaagtttttttttttttaatgtggtagtggcttggactattcttaagtaaattcatcaaaagcaattttttttcccattttaataatacaggctaaatttggccgaagatggaccaaaatttcaaagctaattggaagccgcactgttttacaagtgaagagttatgcaagacagtattttaaaaataaggtaagcagaatatcagtatcctggttaataatgataatatttagaaaaaactaagcagaagtatttctttaattcaggcattaaagtcttactggtaaaagtttttaaagtattttatacccacatagta

SEQ ID NO: 1633 - DNA, 2300 bp, Homo sapien
cagcctcccgagtacctgggactacaggtgcccaccaacacgcccagctaatcttttgtatttttagtacagacggggtttcaccgtgttagccaggatggtctcaatctcctgacctggtaatccacccgccttggcctcccaaagtgctgggattacaggtgtgagccaccgcgcccggccagcccattacatctttttaagaaaccctaattttgctctaaattaaattcaacagacatctttaagtgcctactctgttccaggcatggtgttaccagtgggactggttactggataagcccactgacaacagaagcagcactcccatggtggcctgagaatgggccctagcagtgtttggtttctgaactgggctctccctctttgcaattctttctctccatcttttgccatcatattcagagtgcagcctgagaacaaaggtgagatgggacaaattgggaatagtgtgagaagtgaggtcatttaattaattaattaattcattcattcctctgttcaatagttattgagcacctgctatgtgtcactatgctgaatattggtagtgtaaggactagcagacgtggtctttgtccttaaggaattcacagtccagtgcagaaggcagacggatgaaaaattacaaggtgtgagtgatagctgctaaggcaggggaatgcagaagggtttttttttcttttctttttttttgagatggaatcccgctctgtcacccaggctggaatgcaatggcgtgatctcggctcactgcaacctctgcctcctgggttcaagcgattcttgtgcctcagcctcctgagtagctgggactacagttgcccaccactacgcccagctaatttttgtatttttagtagaaacggggtttcaccatgttggtcaggctggtctcgaactcctgaccttgtgatccgccctccctggcctcccaaagtgctgggattacaggtgtgagccaccgcatctggctgtcagtatctaatttcttgagaaactataaactagacagaagtggtgtttatcctccaatttctaacaacatgattgttacatggtgagcactcagtagagggtcaacaaagcctggattctactcctggctctgtctttgaagctacctgtccttggacagtcatttcagctctccaggcctcagttacctcacctgtaaagtataactggtgatattagctctgcctacctcactgggacactgtaaggattaatggtcatgagcgtgatttttaaattgcaaagacgtctacaaaataaattacacaatcataagttatattcttaaatatttgttgaattttaaaataaaagttgttcagcacttaggtgaaatgctgaacgacttcacataagtgctgcacgacccttttctttaaaaaacaaagagagagacttaaataaccagcaggtatgcaaccttcagttcacaaagcgggtctagcttgactttttcatcagtccagaaagatactgctgttatccccattttatcagtgagagcagtgaggtcccaaagaatgtgtgcaagaacagaagctcttagaagctcaggagggcccgggcgcggtggctcacgcctgtaatctcagagctttgggaggccgaggcgggcggatcacctgaggtcgggaggtcgggagttcgagaccagctgggcaacatggtgaaaccctgtatctactaaaaatacaaaaattagccgggcgtggtggcgcatgcctgtaatcccagctacttgggaggctgaggcaggagaatcgcttgaacccgggaggtggaggttgcagtgagctgagatacgcgccattgcacccaagcctgggcaacaagagtgaaactccctctcaaaaaaaaaaagctcaggcgtgggccacttcccaaggtctctacatgtcaacaagttagaaaggaccaagccccaggcctctgggggcgcctttgctctggaaaccccgcctcccggcacgggaggggccggacgacgcttcaatcccgccccgtgacgcgttaggccctgcccccgggccatcttcgtctcgcgggatctctcgggaggacggacggggtcaggtcccatcatggcggctgaagaggcggatgtggatatcgaaggggacgtggtagcggcggcgggggcacagccagggtgaggcttagagaccgggtctctctggggcggagaggggagtggattgaaggagcgggccctgggaaagctgcaggtccggcaagggaaaagggaacagaagactgtcccc

SEQ ID NO: 1634 - DNA, 2300 bp, Homo sapien
tttgcagtcatagaacagtccgtcacttcacgtgaggttagtttgggctgcgcgcacaagtttcggggccgcaacagggctgtggcaagcgggggacacccgcgccccccggagcctttgacagggaaagtttctctaagagcgcacgcacccgctggctgtcgtccccgctgcgccctcctcaccagctcgctccagggagcgcagggttaattaagatgcctcccgcactcttacttgtcgactcgcgcgcgctacccggctttgaaaagtcgcggtcactcactgagcgctcttcgtgcgcagcggttcctcggagtccgcaggcgaactcacttcccagagcagcggctctccccgcggagcggatcagtgcggaccctgcagtggccggccggcggcgggtcttggccgcccggactccgacgacttgtcccctcctccgctgctagggggagggggcgcccggcagccgcggctcgcgctcgcccaagttcaacaaccggtgcgagcgaagctgagcgcacgtccttcttctcttgcgtggctctccgccgccttctggtctttaccgccgtggagaagcctaagacgcaggaaaggcttgcaaaagttggctccgggactctgccacttgtctccggtcctcccagccgggaaagttctttgctgctgcagccgctcgccgacttcccccggcgggcgcgtgggtaccgctgctttccgccgctgtcaacagcgcctgggcagcagggctctcctcccgggggcggctggagaccaggctctctggacactcccgaaacaccagcccgggagccacaggcgctagctctgggcagttagagagaaggtgaaaagaaaataagatttgcagttcggactatactgccgacctggctggctggctgtgtctgtctgtctgcctgactccgcgcacctccactcccgcctcgctgcttcagccacactcagtgcaactctgagcccttatccagcccgagctcaacacttatctgctaccagtcaacccctaaaaatagcccatgatgtcaccccaaggccttcccattggctcgcgtcgctctcaggggggcgggcccgcccgtcaccatggagactccaccctagaagattcttctctgggcccgcggaggctcacgggatgaggtaatgctccgctgccctcctacagtcgggcccttctttctcctaccctcccccctgccgcacgcctctcggccctctcttccccggtcccctccccgggccgtttttcccggcccgcccggtgcattgtgggctgacgtcttggggtttgactgtctagtgacggtggctgccgcgagcgggcggacgctcgcaacctctgatggaggggggctcaagttcacggctgcggacggggatgcgggggatgcagggacccgggaggccagggaacctggccagttgttttgggccaggggtgcgggcgaggggtggttgttgtttccccacttgtggggcccgaagtcatccaccggcggccgccaccgcgcggggctggaggctgagaatccaagtacgctgccacccccccgcacttccgggggggcgggaataccgcccttaaggtggctctgtgaagtcccaggtgggggcgagcctaaggggacttaagtttaggggcggtctcccgagagtcggccccccacgttgagaacactccgaagtttgcatctcggtcaagttcaggagcgacggtccgcggggtcgtctggctgctcgtagaagccgagagatttgtattgcccgaaactggacgctcagctgagtctccgttgcaccccacttcatcctccgggaccgtgggggaaagggcgcgggggttcacagctttgcctcggaggggcagtttttatagtgggcgcaattggtgggtaacagggtccagatgggaacaagcgtgtaggcgatccgaaactcggggaaccccggtgttagtctactccccctcccgcccccggacaacacgcacacgcttaacacaacacgcacaacataacgcgcgcgcgcgcgcacacacacactccatccgcgccgagttgcttccgggaaaacaagcccagaaggcggcggacactcgcataaagtcacgcagtagtactcggagcccggggtagaacctggacttcaaatctctgcactcccggccgggtggtgggcgcatatcctgggtagcctctaggaagcgctagacacatgtaagtggttccttttccgcggttattttattctccccccgccccccacccctt

SEQ ID NO: 1635 - DNA, 2300 bp, Homo sapien
aattgcttaggagaatgcctggcagataataagtgtttaatacatgaaactgatttttattactgttattaaaaaatatttagaacaccaactccctgaatacaacagaaaatgattcagggcaacagacagaggagaatgttctctccttgaggaagcaactggatcttgtcatcactgtatacctacctaccccaccccctccccagctcagtgcctggctcacagtaggctttcagttaccctctgcagatcagtgaaagctaggtgagtgcccggagtgaagaaaagttggcaggtttcccactgataccagctgctgttggtttctgaacactcaaagccgcaaataccttagggctgggggcaatgaacccaaggctgaattccaagttcagaagcagcgaagtctgaatttagaacctaggaacttaaactgctgcaggtccaacttcaagccccagttttagacagaggcttgggaaagatctgacttctaacccggttccccctcccctcctcccctcgatgcttctcacaggaaagtacacctggtcctgccaaatcgcactcttatatcctggcatcctatccaggctctgcgaggatggaaactgcgaggcaggggagggaagcgggctgtttggccaccacctccctagtgctgcaggcgaccctgtcacactaactcctggcagcccagtgaggtggacggcaccggccccacctgcagatgagggaaatgaagctcggaggagttccgtgatttgcttgcttcacactgtggtagcctggccacgaaagaaccaggattcccgacttcgggattctttccaccacacactttcgtccctaaggggtggggggcggggggagaataaaataaccgcggaaaaggaaccacttacatgtgtctagcgcttcctagaggctacccaggatatgcgcccaccacccggccgggagtgcagagatttgaagtccaggttctaccccgggctccgagtactactgcgtgactttatgcgagtgtccgccgccttctgggcttgttttcccggaagcaactcggcgcggatggagtgtgtgtgtgcgcgcgcgcgcgcgttatgttgtgcgtgttgtgttaagcgtgtgcgtgttgtccgggggcgggagggggagtagactaacaccggggttccccgagtttcggatcgcctacacgcttgttcccatctggaccctgttacccaccaattgcgcccactataaaaactgcccctccgaggcaaagctgtgaacccccgcgccctttcccccacggtcccggaggatgaagtggggtgcaacggagactcagctgagcgtccagtttcgggcaatacaaatctctcggcttctacgagcagccagacgaccccgcggaccgtcgctcctgaacttgaccgagatgcaaacttcggagtgttctcaacgtggggggccgactctcgggagaccgcccctaaacttaagtccccttaggctcgcccccacctgggacttcacagagccaccttaagggcggtattcccgcccccccggaagtgcgggggggtggcagcgtacttggattctcagcctccagccccgcgcggtggcggccgccggtggatgacttcgggccccacaagtggggaaacaacaaccacccctcgcccgcacccctggcccaaaacaactggccaggttccctggcctcccgggtccctgcatcccccgcatccccgtccgcagccgtgaacttgagcccccctccatcagaggttgcgagcgtccgcccgctcgcggcagccaccgtcactagacagtcaaaccccaagacgtcagcccacaatgcaccgggcgggccgggaaaaacggcccggggaggggaccggggaagagagggccgagaggcgtgcggcaggggggagggtaggagaaagaagggcccgactgtaggagggcagcggagcattacctcatcccgtgagcctccgcgggcccagagaagaatcttctagggtggagtctccatggtgacgggcgggcccgcccccctgagagcgacgcgagccaatgggaaggccttggggtgacatcatgggctatttttaggggttgactggtagcagataagtgttgagctcgggctggataagggctcagagttgcactgagtgtggctgaagcagcgaggcgggagtggaggtgcgcggagtcaggcagacagacagacacagccagccagccaggtcggcagtatagtccgaactgcaaatcttattttcttttca

SEQ ID NO: 1636 - DNA, 2300 bp, Homo sapien
gtgaaaattggtttcagacaaacccaggtaagaatctcaccttcgccacttggctggaaaactctgaacaaattatttttactctttgggcctgtttctgcatctatcaccttataaggttgctgtctgagaattctactatacaatgtaatgtatctgttagagtgtaatatatctgttattaggtttgacctcatacaatagaaacacaaaataaaagtgtcttacacaggacagcagtttttttctttcatgtggaggtctggagggcagtgggtattgattggttcagtgcctcctgcattaggaatccacgcttctttcactttgttgctttgctgtgtgtgggtttcattcctgaggtcctttcatggttcaacacggctgctggagcaaataaaaaatcaaatacacaaaagcccagagaaagagccatccacagaggccaggcaacaaatccacttattcaagtctagccaagatgagacccccttgccacagtgcatgaaaccagcatattccacttattccattcttggggtacgttgaaacagatctggaagcaatgtcttctgtgtattaagcatctaacactttacaaagcattttcatatgtcttaccacatttgttcttcataatgttctgaaaaggtaagatgaatacatcttattattcctattgaacacttgattcacacagctgctaagtaacagattccaacgagtctatagctaggtctttgggtatgttgctggtaatgaaaaggtgaacaatcatggtgcagaagaaagaaaatgagccaaaccaggatccctggtagagttgtagtgcaaagactggggttaattgtgtggcctcagcctcactgggctgttctcctcacctgtaagaccaagataagagcacttatttacttcggggttgttgtgaagatagcagacaatcttagtgcacctgccacttaagatccgttcagtgaaattattacctttcacaggtgtgtctttggaaaatcacttccctttcctggatctcagttttcttttctaggaaaacaacatgtttggactcagcgactgctaaactgtctcccaaacctcgaactccctcagcctgggatcctgccttttatgaaaatagttcggattggagctcaggttggaattctcgctttagttgcttgctagctgtgtgtcccagtaaaagctaaaaatttcggattccccacatctgtagaatagggatacataacatgcagcttattagaaagggaaggcatgtgagaattaaattaggtccgtgtccagtacccactaaattgtaaaaacttctcaaaggcagggacccatctgttttgtagatttacagaatgtcatacgttgaagtacgggggttcgccacgggattagaaaatttctgtagagtaaggaacaagacacaaggtaagcattcaagaattgtaaccatgcaatattcttatttcttacagtcgcctacaacagtcctggtgtttagtaaacggtctgacacacacacccatcaggggctgcggagagtccgcctgggtaagctccgcaaggtgagtccccagagccgggaactcgcagcctgagcagacgcagcgtagccgatcttgggtccgcgctcctcccgccttgcccagccctgcccgcggttggctaggccccagggaacgctgcagccgcggggtgggcaggcgacggccaatcccacgcccggttcaaagggccaatcaggccgcgctttacaggggccgcgctttacaggggccgcgctttacaggggccgcgctttacaggggccgcgctttacaggggccgcgctttacaggggccgcgctttacaggggccgcgctttacaggggccgcgccggcgggggcgggatcgcgcgcaaggcggggctgtagccgccccgggaccgccctgctcaggcgccgtggggttcggcgcggctacgtgcagaatccgtctagctaaaatgtaatttcagattggacaagtactgtaagtgaccctcctctcagtcccacgtgggcgctgggggcttttgctggtgcgcaggctcttagcgcgcacgcccagaaagaggcttctccaacccggcccggcccttccttcccctttcccgcagtcgttgcctcctcctcccctgcctcctcctccccttcctcctcctggccgcttagtctcacacccgccgggccgttgttcccgagacgttgttgagtcccctgtgtcctcttctgggtgaggcgtccggccacttaagggaaggga

SEQ ID NO: 1637 - DNA, 2300 bp, Homo sapien
gggggtctccaggaagggagagggaaaaggaagacttcctgtgtgcttaccgtgtgcagctagcccagcttacctcatctccatgcagtgtcatgtagaaacatgggtgactgaagatcattctagttaagtatggtcagtgcctcttaatgctgctgcttctctttttattttagaaaaccatgtcatggaggaaaattacaggaacttaaaatgtatagcatggagaaaagaagacccaacaggaggtcatgagagtcatcttaaaacatttgaaagggtagcccatgtataagggtaaaaaaggctgtttggatgatcctttgggataaaaattaggactagagggtaggagctatactaagcacagttcaactcaatacagagaaggtcttccttcctattactgtaatagctgctcattgagaacattcagacagcacagagagggacaggtaaatggcctccaaacctccactatatttctttttgctggatgtcattgcagtaagcaggttttgtgtgtgtttcctgaaatcttttatgataggtctttatacaatacagtggttctcaaactctagcatccatcggaatcacctggaggcctttttaaagcacagactgctgaaccccaccccagtgtttctgagtcactggagctggaagggggcctgactttgaatttctaccaagttccctggtgatactaatgctgctgctcttctagagaccacgaatggccctgttaaaatttgagaaaataaaagtttgagaaccactgtattgcatgaagaaaatagagcttttgctctattctttattaaaaaataatacaaatggcatcatactgtatcatccaagaacttgcttttttagttaataatatataattagcagctttctttttttctcattcaacagctactgatgtatcaattttagaagtcccctattaataatcatttaatttgcttctagagtgtttgtggatatgttcttgcctttacaaaaaaaggttgtggtggattttttttgtatctttttgatgagtcagtgcataaattcttagaagataaattcttagaagttaaactgttgggtaaaagacttgattttaaaaatggatagatagtactaaattattctatcaaagatagaatcacttttctatgaaaagtgtatgaaacagcctgtttcccacacttttgccaagtgggtattatcaaaattttccagttcctgtttgttaggtgtaaaattatatcttagtgttgttttgatttatattcctacactatttgtcagttgaaagattcctatgtatttatttttctatgaactataagtttgtattctttgcattacaggtagagggaacagtatgaacaaaagcaccaagccttcctttgaatagtttctagtagttttgtagcattgaagtacgaaggttgaggttagggagagaggcagggagctaaggttagaaagtcaggcaggggcctgagcttagaggtccttttgggtcaaataaagatattgggctttattttgggcagaagaagcattggtgctgtttaagcttgtactttggttcgtggtacttttgacagagccatgtttgtggaatggtcaagtctaatgtttaatcttcaaataattcattctttagtcctttcaccttcggccttaaagctaccagaccagggccaagcgtggtggctcttgcctgtaatcccagcactttgggaggccaaggtgggcagatcacttaaggccaggaattcgagaccattctgagcaacatggcaaaaccctgtctctactaaaaatacaaaaacaaattagctgggtgtggtggtgtgtgcctctaatcccagctacttgggagtctgaggcaagagaattgcttgaaacccaagaggcagaggctgcggtgagtggagattgcactactgcactccagcatgggtgacagagtgaggaaaaaaaaaaaaaaaagctaccagaccaggcttcataaactggtaaacataagaatgggccaaagacttcaacccatctgtgacttggcattgtctctgaggggggaaattttgcatgatcgcatggagaatggattttgttgctttatctgatattgtcctcagctcctcctgaatttgccgagatcttacagcagtcagtaaggttggtgagttctttcgttgttttaatttgagtgactttctgggaaaaactgtggatttcggccaatatgctgatgataatagcattgctttgaaggtcttgttctgtag

SEQ ID NO: 1638 - DNA, 2300 bp, Homo sapien
aattctctaaattatgctttttttcagcacactatttgaagaaatgatcatattgcattgtaatttcaaatatatctgcatgtcatttccattagagtgtgaactccttgagaacaggaacattatgttatctgtcctgtatccttcatgccaagccctatgtctggttcctatagctgcttattaagtttattaaatgaatagtcacattaaggcaagaataaggtgaaatggctttaaacagtagagtgaagattaatctgttttcttatgcaacggattattaaatggtgccttgttctacatactacatggatttccagagcaggatcgctctcatcaatctatggacatgtctgtcctgttcatctctctgtcctcaggatctaaaacagtgcctaagaattagtaaacaactcataatatatgtaggttggttgaatgctatgtaacgtagttctgattacaggcaaggttgtttctctccaaatacttttcagtgtgagcaatgtgtgcttttgattggaatgttaagattttggtttttacatacaagcacagagagaacttgaggtctaggcagacatggagtgtttctgtcccctagcaatcctgacattccagatcatgtgtgaggccacaaaagctttctctgtcatgctttttaaattatccctggggtgacagtgtcaatcatccacccctacctgggtgacaatcacttggctgggaccggcatatgctgaaagaaagagaactgctgcttgaagagccgcaggcactacagtttccttgtcagtttcccagacttccctcagggacgtgccaaaacacaccttctcacttctgcccaggactcactatgtcctccaggaggggagactgtcaatgaccctcacctttttcctaaacagagatgttcagtggcagaagttttacccttagaagctttggcttaagccttttgttccccgtaaaatgcaaatgcttgtaagtgatatggtttggctgtgtccccattcaaatctccacagagttgtatctcccagaattcccacatgttgtgggagggacccagggggaggtaattgaatcatggaggccggtctttcccatgctattctcgtgatagtgaataagtctcacgagatccgataggtttatcaggggtttccgcttttgcttcttccttattctttcttgctgccaccatgtaagaagtgccttttgctcttcgccatgattatgagacctccccagccatgtggaactgtaagtcaaattaaacctccttttcttccttgtctcgggtatgtctttatcagcagcataaaaacagactaatacagtaaattggtaccagtagagtggggcattgctgaaaagatacttgaaaatgtggacacaactttggtactgggtaacaagctcatagagggaagagacttgccttgtctctgatgagactttggactgtggacttctgggttaattctgaaatgagttaagactttggaggactgttgggaaagcagctgggagggaggctgtaccctgcaaagccacagaggcagcgctgcccaagaccatgggaacccacctcttgcatcagtgtgacttggatatgagacctggagtcaaaggaggtcattttggagctttaaaatttgattgccttgctggattttggacttgcctgggccctgaaactcctttgttttggccaatttctcctggaatggctgtatgtacctaatacctgtacccgcattgtatctaggaagtaactgacttgttttttattttacaggctcatgggtggaagggacttgacttgtctcagatgagactttggactgtggacttttggattaattctgaaatgagtaaagactttgggggacttttgggagggcatgattggttttgaaatgtgaggacctgagattgggaggggccaggggcggaatgataatgatttggctgtgtctctattcaaatctcaactaacttatatctcccagaattcccacatgttgtgggagggacttagggggagggaattgaatcataagggccagtctttcccatgctgttctcgtgatagtaagtctcacaagatctgatgggtttatcaggcttttctgcgtttgcttcttcctcattctttcttgctgccaccatgtaagaagtgccttttgccctccaccatgattatgagacctcccagccgtgtggaactgtaagtcaaattaaacatcctattcttcccagtctcaggtttgtctttatcagcagca

SEQ ID NO: 1639 - DNA, 2300 bp, Homo sapien
gtatagaaagagcatgtaaaaagagctcagttaaaatgagctcatatcttgggttattcctgtacaaaagcctttgtgccctgaatggagaatcgtgtcactcaggattcactcagcaaaacacaaaccactctaattgtttaaaaaaccagtaacttaatacccaaaaatggcgatcctgatgatggaggagctgagaagggctacattccctgtgaagcaaatcagagatcagtgaaatggaagcagctaccatccccaggctggagggactaaggagggaggagggaggtggtgttctcatagtctgagggcaggggacaccagccgatgctggagccatggcagccctgtcaacagagcccgagtggtggaggggaagcagctgctgcctggcacagaagagaagtagataggctcttgcttccccttgcctgcaggggtagccccacaatactgagcagagcagcggacttgatctgaaaacacataggccaaggattcttgcaggctaaagtctcagacttctattgcctggttgtggatatgtaactactgtgataactaacacagaaagtttggaagagtcttacttccccctgttgctagacctctgaacaatagcagagattcacaggttgctgtgccccagaaggtagaatttggaaaaagcagtggaaaaccctcgaaagctgtaagaggcctgtctctggcctttttctcacattactttctagcaagtatctgagcagccagtgccttcagtatctggggatttgtggtctgatgagacattcccaccctgccgtttacctggctaacttctgcagaattgagtatagactgaacttccttgggcccctataggtgggttagctgcctttgtggcccctcctgtgatacactgatttccctgcactgaaatactccatttaggcttccatctccttcccaccagactgtgagcagggacttgtcttcttcatccttgcatccccaagcatttgtactcttacttcctgtattgagctagctactgtggtaggtcctgggctatgcatgtaagtaagagtgccagctactagcaacttttattatagaagggaggcagatgggatatatgatgttttaaaattacccatgtcttttgtgctagggaagtccattgcatgagactatttaacagggagaatcgtctgtcctagagggtcagggaagccctataattaggagtcggcctgacagcgaggttgggggaatggcattccaggcagagggaagagcaaatgtgaaggtcttgaggtgggaaacagcattaaggattagagattgagagcaaacgtggcattgcctgggagctgatgaggtcagcaggacctgttctctcctgtgtccaagtctctgcgtcctgcctgagcactttccacccccagctttgtgttgtagtcctgcaagtctgcgtgtttgtggcttccacatcacacctagtatatatcgttttgtgcatagaaggggcttattggatatttgaacaaatgaatacaattccaggccctaaagagtctttctagctttcttgtcatatttataactttagttgccctgcaagtatcaaggaatacgagctctatggggaagaagcctgaatttataccatttatgggaaaccctctgctatttggcattctgttactaggaactcgctctcagtcattctctccttcacaattggagttctgcgataagtagtagtaagaatggtgacctagggatgccagaaagattcagtcatcagaccatcctttgcttttgcttctttgggactgagatgtgatgtgttaaaccagattccatttggctccgctccttcttagcagtgaccttgggcaagtcagttaacctctgcagaccttagtttctcctctgatgtctaacattaataatatctatgatagtgttaaaatgagaccatgtatgcaaatatgtagcatagtgcctggtatttagtgagcagaaaataactgatagctgctgcttttattatgacaatcacaattactgccattattataacgttgggtgccatacattgaccagaacaaagcaaaatctgagcaggcttccgaggtttcctatgcaggcaagtatgccctttgggtttctccttgagactgccctacacacaggacccttcctccatgttgtttgactattaaaaagaagatttgttaatgcttgtttttagctttctctccctctttttttatgtgttaaagaggatttgtttttgttttcctttc

SEQ ID NO: 1640 - DNA, 2300 bp, Homo sapien
tttgttttttgttgttgttgttgttgttcttgttgttgtttttcctgatcaaggaagaacctcccagcagacttctccttaggtttcattggccagattctgcatcacactccagccactatggattgctaaaactggcatagagaactcatgatgccttctccgggactgggcatattgctgttccaatgaaatcatggttctgttaaaaagggagggagggaatggcttttgtataatcagccaacactatttaccaaaataacactagatttcatttttaaaaaagagccatggccaactaagtttgggaaacactgagttaaatatgtcttgttactacagaatatcttatactaatcttgtaatatactcatgtgcattgtgagcttcctagagaaaaattacctgtgaagcatttcccagacttactcctttagacaagttttttacaaagcattttattgcacataatggaacaaccacagtatttcgaaggttaattaaccaaatcatcatgttttcacctgagttgtatagatgtttttctttcatattatctgttggaaggtttattcagcaaattgatagctcctattattaaaattttggttatctaattacagaattaaaatgatattcactgctatagaaattattgccttacgaatgaatgttgctaattatcaatgtttaaactagtcattagaaataggctcaaaaagacctctacttggaaatataagaaatttcaactgaaagttgtcccttcagttaaattaaattgtagctccagaccatgggtcaaactaacgggatagcaagtgtcacattaactaattattaactaataattaattattaactaataatacaatcatgcatttctttgttatatttttaaatttagtatttccatccattctaactttgaagtcttccttctctatcctgtattccatgtaggaaactccctagtaatgtatatcaggccaagaatatcacgcctctccaacttacttcccctccttgtgcacaccctcaccctaaaccatacatacaacacagacaacattaatatattattaggtcttttgctaaaaagagtaaaaagttatttccttaagatcaagcaaatactaaaggatagtgtagctaacattagctattttgcgacatgagttcttaatactaaatgtcatgagttctattaaagttgtgctgatttaaatttcaaccttgtatagatattttaatatcattttgacaatatacttctaagctgtttatttactttaatggttttgtaagaagtttctgcatacactacaagataaaaacttgttacaattaaaaaggatttgaaggaaccatgaagttattttaacagtaaacatgtttattttttgtataaattgtgcattttccttttttacatctacatagtaatttttaaagtataatttctgaaacatatggcttagctgttctacacaggtgctacatagagctggagaacatattgtgcttatatgtattcaagcatatgtttcaatcctactctttttacaataaacatttcatcgacttcctgctatttatatcaggaacacgtatttggccttgatttcacctgctctttttgtagagagacttacaaagagactctgggaggttatggaatctacaggaaataaatacaatgtcgattttgttacaaggtgattgagctggtaaggaagtggttaaaaaataaacctttacaactgtaagtgtagaatgagataacaatgtgttactcttttcgtttttttctgattattttactctccccaaaacccttttacatttgtacaaaaacttaactcagtgtttaaaaaatattgtttctcatactataatcacaactctagttttaagaataaacagttaatataccaataagaataactaataataatagtagctaacagtggataagtgctcaccatgggcaggctctggtctatgcctgatcccacttaatcttcataacaaacggaaatgatcagcactgttatttatattttgcagataaggaaaacgaagcacagagcaattaaataacttgcccaagatcgcccaagatcacccaagatgtccggctgaagttcttaaccattaccttacactaatcaacagcaacaataataataaccacctttctaggatgcaaattatgttccaagaactttcattatttcattacatctgcatagccccaagagtaaataatatcctgttctattgaagaagaaact

SEQ ID NO: 1641 - DNA, 2300 bp, Homo sapien
ctttcctgagttatcaaatattctccagagcactgaatctgctgtaaaatatttagccttccttgcttattgggcattgtatcaatcgattatacaattgatcaatacatagcattgccatacatatcattgttcaaagcctccaaatgcacttctgatgatttcaacagaatttatgactgacgcagaataaattggaatcatgggtttaaatgatatggatattttaaagtttcttgataaaaattgttaaatttttccttccctgataatttactctctataaagtccagaagcataacttaattgccccccccaccaagttactctcacgaattattttatttgagaaatttggtcacttgtggctctcagtgataaatatgttgagaagtttcccatatgtatagatgataatagtaactcatatttacaaagtttataatttacatttaccatgtatgtttacattttaattacaatgatcttaggaatgtggaggttgggggctataggagagcagccagtggggaataaagtcaagattcagaccaggtcttcaattcctaaatcttgtagttttaattaaatcacattaccaatgtacctagttccagcatataaagtgactccagaggcgttaagaaagttctggaataatgttaagggagtcaatagcaaacgtacatactgtatttttagaatgagactgatttacacttgggggcttttaattgcagtcgtccatcagttttaaattttcagtgtctaaatataaaaacgcagcaatataaaaaaaagccagctgttttcttactcagagcatgaattgatgagtttatgaatgagtgaagtgacagcaagactaagaatagtctagcccttttcaatcacctaagccatctatcaataccttggagagcttccaatttcaggtcacctcccccgacccccctccaccccacaacattctcggaaaaagcaaattttcaactgacaaaggaaaatggatacattaatatcttccatgtttttcaaaacatttcgtttattttgctacttgaaaacggtcttcccttttgccccatgtaaaataaaattgctcatgatctatggtcccgtgagagcttatttaaggagcactgacggattctattttccttattaatgtggcatatttgccacgtgtgcaaatgaaaacatccctttccaatgagtgcctaggaggaaatcagctcttccttcctcgaagagttttaattcatgggtatgatctatttctttctttctttattttgttttatatattttttagagacagagtctcggttttttgtccaggctggggtgcagtggcatgatctcggctcactgcaacctgtgcctcccgggttcaagcgattcttctgcctcagcctcctgagtagctgggattacagtcatgtgccaccacccccggctaatctttgtatttttagtagagaatgggtttcgccatcttggcctggcgggtctcgaactcctgacctcaggtgatccacccgcctcagcctcccaaagtgctaggattacaggcgtgagccacctcgcccagccggtaggatctatttctgaagacaatgtggaagcagagtgtgggccctccacaggtgtagcgaggcggcgtgctaccgcgaagaaggagggaagacgcctgagcccagccggtgccctgctgcccctctgcctcttcggccactggggctgagcttcagccttaccaatccccgccgcgcacgcgcgctcgcttcccgcgcgcaacctcccacccccgccctcactgcacctgccaggtcataaacctcttcccacccactctcactctctacccaaggctcaggcttgtctcacgttgattggccagagcccacgagggcacgtccaatcagcaatcccccctgcgcaacctatcccggttcttcccgcccccgccccgccccgcccgcccccccgggtacctaccgtctctgtgactggtgcgcggccaggtcactcagggcggcggggcgaggtgtgcgggagtgggcaggacgggtgggaggaggggaggggtgggagaaggcggggctcaggtgcctggcagcgcggccggggcccaggaaggggagggggcgaacgctggagcgaggcgggggcgggtgaggagggggtgacgccggacgcgtcgacagcgcgagggttcgcgcgtgagctgcgcgggtcgggcctggtaccgagctttcctgggggctagcaggtcgtggacgccggctcctggagga

SEQ ID NO: 1642 - DNA, 2300 bp, Homo sapien
ttctggctagtgagaatttcaaaaattttttggcctgtataatctttgggaatggttcagtttatagttccctggattgttatttctttggaaagaacattcagtttcacccatccacatgcaaactggtatttagccaaagagtcaaaggaaccattttacacaaatctccagagcttgctcattccatagctcccatcttttcatcgtctgccttgcaaattcaaactgcccaggccttcctgaacttctaatgtcttatctcttcaatcggtgagaacatcaggcttggtgtttggtttccacctccctatgctgtagtctgaaaattgcctcaagacagaaagcttgtactagtgtagggcccattttctgtttgttttcattctttcagaaagcagagttctgtactacttacttgtctaaagcttgcaaacaattgtttaatgtattttgtcttattttctagttattagtgacaggagagaaaatcaaaacccagttaacttgctcatgactgcagctggacatgcctgtgtataaatttttacagtgggcccttgagttcattgtgacccactttaaatagaatcaccctacttaactaaacactgattaaatctctgatggttaaaaagcatcatgtgtttgtatttatagaactctattataatgtttttgttgttctttttaattaggggaaagtttttattgtctttcatgctgacataacttttctttcattattaatctgaaataagaatctcttatttttttcacattaggccagtaatgtaaagaaggtccttcaaggaattatgagttattatcatgaggtatgaaaaccatctgactttgtttaaatgcatcatgctatacgaaaattactttaagactgaaaaatcacttggttttttgtttataatattttactggaatgtaagtcataattagaacatgttttattgtcatttttatagaatgctcatttgtgaaaataagcttggatatattgatttgtaagataacattgcttaggtattgatactctccgaattgattttcaagtagaattaccttcatctttaatatatttgattttgtgcaatactataaagtagactttataattaattgaaataattttctatttaaagcaatattttgacatttcttcccagcgtaaacagtagcaaagacataaatgagattatgctcatacaagtaaattggaaaaaatgcaaaataaaagtagtattataaagtcactttagatagtacattagtcaaatagttttgttttttcttattcagcatcataacaagttctctagtagggtttttgatataagagagtttattgctgaatgattggcagcttttgaatgacttttccattaaagaatttttgtttctattctttaaagtcgtcacacaattaaacttgtaatttcttcccaaaatgtttaatattctctaaaatttttcaatttattaaatacctaaaactaattctgaagctgttttaatgccaagaacccttttaatcagctaaaaaataagaaaaagaaagataagaccaggaaaaaaaattaatccattagatttgttgctcatttgtaaaagtacagtgatttacattgtgtttctctgttaattgattatatatgaaaatattatgaatattctttggcttaacatatgcttattatttaatggacaggcataagttttatcatagtagactaggccaagtgcttcttaagttaaattcttctctctgacagtgaaatcaaaggatatttgatgtgaaaccaaaaggaaatatagtgcttttggttggttactcagaattttggaatgttgcctgaacattgctaactggttttaataattatttatttgtcatttgttattttatctgagttgtttcgtgaatttataatttattttcattgtaatattaaatgtagcaaattctttgcagccgacataaatgagtgatctaatttattttaatattgtagtttttggggcagcagatttcagaagcacttatccctgatttaaaccaaataaccgaatgttcagatccagtggagcttgggaggttgctccagcttattttaggttgtgcgatcaactgtgaaaagaagcaaggtaagtgaatttcaatcatttgaggatttctactttctagaaactttctacattgctatataagctagcattaaatcatactattaaagcttggcagaaagcaccctgaaacgtaaaccagaagatctgaattctagccc

SEQ ID NO: 1643 - DNA, 2300 bp, Homo sapien
gggtatttctcctcaagtgggacaagagactgagaaaagaaataagacacagagacaaagtatagagaaagaaaagtgggcccaggggactggcgctcagcataccaaggacctgcactggcaccggtctctgacttccctcagtatttattaattactattttcagtatctcagcaggaggaatgcggcaggagagcagagtgatagtggggagaaggtcagcaagaaaacatgtgagcaaaggaatctgtgtcacaaataagttcaagggaaggtactatgcctggacatgcacgtaggccagatttatgcttttctccacccaaacatcccagtagagtaaagagtaacagagcagcgttgctgccaacatgtctcacctcctgccatagggtggtttttctcctatctcagcattgaacaaatgtacaatcgggttttataccgaaacattccattcccaagagtaggcaggagacagtggccttcctctatctcaactgcaagaggctttcctcttttattaatcctccccagcacagacccttcacgggtgtcaggctgggggtcggtcaggtctttctcatcccatgaggccatatttcagactatcacatggggagaaaccttggacaatacccggcttccaggggagaggtccctgcagcttttcacagtgcattgcgcccctggtttatcaagactagagaatggcaatgattttaccaagaatactgcttgtaaacattttgttaacaaggcacatcctgcacagccctagatcccttaaacattgattccatacaacatatgtttttgtgagctcaaagttggggcaaagagattggggcaaagaggttggggaaaagttacaaattaacagcatctcagggcaaagtgattgttcagggtacaggtcaaaatggaatttcttatgtcttccctttctacatagacacagtaacagtctgatctctctttctttaccctacaaggtgcttttcaattcttagaaatatttcatcagttaattctatatccattcactgtattatctgccttgtgaagcatggtactaggcatgagtgatggaacagtcagaagaatagataaaatccatatcctatgtagtttatattctatgcagaaagaaaaatagtatcagttaactataatagaagcctacagtgttatgaagtcaagttcaggatgtacttattaatgcagtcctgggatgcagaaaaagtaaataaatattcatttaataaactggtgaaacaatctggcagacagaatagaaaatgaaaagcccctgaaatgaaaaggacagggaacttgaagaaatgaaaggtggccaacatgacaagcatggggattaaaaggagataattaaagggagatgaagctactgagcttggctaggaatagttcatgcaggttcctgttaaggacactagttgttatcctaacattaatggaagctcttgaatggctttaagtagagaagggaattatatttacactgtatatttttaggttttatttaggctgccattcagagaatagaagaaaaggagcaagggacttttgtagcattttaggttacagacagtggtagctcaggctaggaaggtccaatagcagtagggaaataacagtaggttagtccaagatagtagcagtgaagacctggatttgagatatccaggaaggtacacctcttaagacatgatgatgtaggtgcagggagaaggaggtgttgaggtgacactcaaatgggtagatgatggaaagaaggaacacttagaagagtataaggtatttggtttagttgggcatgggtgaaaagtcatatggagaaaactgtgagttcaatcatggatatgccgaattcaaaatacctttaagtcagcaaagtgaggcaggcagcgttgtatatatgcttctggagctcagggacagaaatagatggtcactatcaatagatgttatttaaaattttaggagttgataagatttcccagaaatagagtatagggtgagaaaaagaagaggttttagatgaagaagaagttcctgaagaactccaccatttcaagatttaatagaagatgaaccagcaaaatatataggaagttgctggcagagaattaggacgaaaatctggagacagtggtatcctgagcaccactggaaggcagtatttcaagaaagaagtgtctactgctgctgcaagtaagacgaggtcaaaaggtatccggaccaattcagtgggtgagcaggccatagtcagatatta

SEQ ID NO: 1644 - DNA, 2300 bp, Homo sapien
ctcttgtgctgaccgactttggtaaacttctagttagcctatggtttatcctcttgttctcatagaattaccagcctcctattaattgcttaccaccaaaatctctattgtttcaggcattcatctctggtgtttgtggctaacctctcccagtgtggaacctctatctcatgagaaagctgggatgagggcaattatggcccggggtaggtattatttctgccttacaagtcagggctggatggaggaggatatccctagacctcttagccagtcttgcctagaatagagcttctgcaacatgacattctgggggctgggtataagaaatgctggcagtttttccatctcagggagatactgtagccttcatttgagagctagggaaagtgttcttggatttaactgtctagaatggggtttctgtcacgttgatctggggactaggagaaagagtgagttatggctcaaatgccacagactcttactgtgtttactagcatttagtagattcttcttaaataaaatttatttatttactgtatgcctttagaacaattttcagggacttaaattattttagttttataaataatttttagcaatcacaattttttactaggaagaggttctgtggggtttctcatgctgccattatggaagtcattcccctgcatcattctttaatgcaaaaaataaaaaggaaggagagatataacaaacctgacgtccactgatacgggaatgagcaaataaattgtggcatagtaatagaatactatccatctattaaattaagtgaattagagccacatatatcagtcaggataaatctcaaacacataatactgagttgtagaataattcgtgtaaaaatatcatatataaatattagaaatattgtatggatgcataacagctgtagtaaaacaggaaaatgtggactagaaggataaaagctaagctctgactagtatttctctctggaccttagaaagagaacaagagacttcaactctcatttcatttcttgctcacacctgtaatcctagcactttaggtggctgaggtgggcagatcacctatggtcaggagattgagaccagcctgaccaacacggcgaaaccccatctgtaccaaaaatacaaaaattagccgggcatggtggcatgtgcctgtagtcccagctacatgggaggctgaagcagaagaatcgcttgaacccgggaggtggaggttgcagtgagctgaactccagcctgggcgacagagcaagactctgtctcaaaaataaagaaataaaataaaatattgtaagcagaatatgtgactctatgttgagtacatgagtgtgtactatactattcctgagctatgtttcatgttttcagtctcaccatttgtgaaacccaagcaggcactcaccagatggtatgaaaggctggaacctggaggtcccacagtcttggggctttggagaggagcctaatagagcaaaccagcaaggatcggaactaagacattccttcaacaaatgttaattaagcacttattatggctgctgctcagtgctagcagctttggtgtagtgccttttaatcttccagacactttcaaatacaggacctcgtttagatgtgtttcagaagggtggatttatttgttcaccacatacttagtacttaacttttctgtttcctcaacagcaagatgagactaccgagagcttctccttcataattttgtcaaaatgaaataataatctatgtaaagaggcggatgtgctgcctggcatatagtaagagcccaagaaatgttaggtactgctgttgttatcgctgtttaccaggcacagttccaatcataggagagacggtgattgaaccgaacagaggctcaaatgtctgtggcgctctcagtaaacccatgagctttctaaatagaaaagaaactgctcctagcctggccttttctgagaccggtgcgtgtcctcccgggaatccagcgcctggcatcttcgcagggtgctgcgaaggggcgggctgggaggcggggcacggctgggagcgaggcggggcggggaccgtcgcctgctgggaccgccgcctgcttggaccgcagaagagcaggaggacgtctgagccatgctcgcggcgatgggctctctggcggctgccctctgggcagtggtccatcctcggactctcctactgggcactgtcgcctttctgctcgctgctgactttctcaaaagacggcgcccaaagaactacccgccggggccctggcgcctgcccttc

SEQ ID NO: 1645 - DNA, 2300 bp, Homo sapien
agaagcagtggtgagaggccagtggcacggagacagtttttatttatttatttatttatttatttatttatttatttatatcaacagcagtagcaactgcagaaactggcaagtgtttttttgttttgttttgtttttgtttcattttccagtggccagaaagcaatttgtactgcctgatgacaacttcatagctaggggaaactgagacatcagccagattttcttgctgttccctgatctctggaccacatctgctgaggcctgaccctagacttagaactttctgttctaatggctttgcaataattccctatatcaaagccctttttaataaagatatacaaagtagtttctgtttcctgcattggaccttaaatgatagaagtatcaaaaagcttattcaatatcactaccaatataaacagagcttcactggacattctttcagggcaatcatattgatcaccaatttatgtttccttttcttgcacagatggcagaattttgttgagatgctgaccagagcttcttctgatttgttatctgatttgcctacaggtgagttccattatttttttgctccagagagaccttccatttttcacagctattgttgactatgctgcctagtttgagtggtttgcttgttgggtttcatctcatttctctcagaaatgtaaatagctccccagtgaaggaaaaatgggggttagaatcaccttaatggctattcttttaggccagttggatcataaaaggcacaattctccaagttttatcatgagacattctctagtggtagcccttatagatgaatgcagtacatttatggaagttagtattatttagcagaatttcaggtgcacagtcgcttagatcaaagaagctcatagctaggtatttattccactgatgtctccacaaaaaaaaaaaagacctgtgagatgtatatatatgtttagtgtataggtttttttggtaaacatttttaaaaacagaaatagcagaaagatccttcgtgggctatttaattaaattacaatataaccaattgataaaacgatgcagttgtaaaataacatggctgggttgctacaggaagatttccaagacatattattaagtgaaaattgtaacgatgcattggggaaaatatttagcaattagcaagttttaaatatgacaggtgaaaaaatatgcattgatattaatctgctgttgtagtttttctatttactatatccatcaaccatttactgattgccctttggatcaaaattaaagtactgaatgtgcacgcatgtgtgtgtgcgtgtgtgtgtgtccgggattaaatatatcagtctgtatccaagtggaaaaacctaagaaactttactaggtatttcaagcagagggaatttactacaggggattggttatgtaagtatccaaagctgagggataaaaaagaatatggtgagtatattcatttcccagggctgccatacaaaataccacaatcttggtggcttaaaacaatagaagtttattctctcagttctggaggctggaaatataaaatcaaggtgtacgcatggccagactctccctgaacactctagagaagagttctttcttgccggtttcagcttctagcagccacaggcctcctttggcttgttattgtgtaactccaatctctgcctttgttttcacaaggccttcttctttctgtcttctatatatctcagtatccaagtgttcctcttctttatcttataaagacaacagtcattccaagtagggcctgccctaatctagaatgacttcatcttaacttgattacatctgaaaagatcttgtttccaaataagctcagattcacaggtaccagtgattaggacttgaacatatttttgaggaggacacaattcaatccactacagggaggtaatccagacattagtaactgtagaaagcagctaccaccttaaggctaagggaacatagaggaaggggtattactatcagaatctagtagctagtgtcaccacacagatggttctagggtctccacggaaatgccaagcagctggaggaaggatttcagaggggattccatacagctgattcttggactgcgacataatttaaggctctaagaaggtggctgcacttggatctcttacaaagcatcatattttcaatgaggagaccattgaagtgatgtcacgtggctgttcatctgacctgaggtttcacacgtggctagggctgagaatgctgaaaaacattatagcagtagctcttctgat

SEQ ID NO: 1646 - DNA, 2300 bp, Homo sapien
aaggtggacatcttgagggaggggcattattcagccctctacagcatagcacgagaagcccggacaaacaaagcaaataaataccacactctcagacaaagacacacatatttcctaagagagaaaccacaagttatagataagatgaagaagccactttcagctctggaatccagtttggcttcttccaaaataagagcaaacatttatattgttcgttatgtgtcaggcattcttctaagttcctttcttatataactcgcttaaacttcacaaaaagtcatcctcattgtatagaagaggaaactaaagcacaaagatgttaagtgatttgcccaagattacactgaactagcagggcaaggatttgaactcaaagtgtctgattcccaagttcacatatcatttgagatccaacttaaagaatggataggcaggctgacacagtgagaaatggaagggcattataggcagaggaaacaaagtgaacaaaggcactgaggcagagatatgaaagggagattcaagccagtgagtagactgggttggatgcagcataacaagcctaggagaagtagtgggagatcaagctagagatctagcttgaagtcagatagtggaaggtcttgaaaccacagacacctgctgtggctgatgagatctttcagacatttgagtagaggagggggcttgtcagagttgggccttgggaagactgatctggaagcaacgtgaaggctaggagggaggagtgagaagggagctgtccccgcttctctgctcccttaacactttctatatcatagaatgtggctgtgtgtctcaccctctagagagtgagcccctggaggggagctgagtgtgctgtccacctctggctgcatgtgccagtgggtgatatattcacctgtaaagcacagtacagctagaggttaggagacaggggaacagatgctggagctgctgctgcctatgttgatgcaaataacaataccgtttgggaatcaatctaaagtgtctttgcctgcatcagctgaagtttcttttagcataataacaactgtctggaaatgtaggatatgcagatctatattctaatcttagctctgtacttgcttttgcaggatttggagtagtttatcaataccccaacttgtttcttttctctttaaaataaagtaaaactattttgtttataactattaacttgtgaggtgagagttatccagcttgtcatagggatctggcatagagacagtactcaacgttattattatcaatctataatattctggtttttttgtttctttgtttgtttgatatggagtctcgctctgttgcccaggctggagtgcagtagtaccatcctggctcactgcaaggtccacctcccaagttcaagcaattctcctgcctcagcctcctgagtagctgggattacaggcgcgcaccaccacgaccggctaattttttgtatttttagtagagacggggtttcaccatgttagccaggatggtctcaatctcctgacctcgtgatctgcccacctcggcctaacaaagtgctgggattacaggggtgaaccactgagcccggccgatattcttatttaatttagtcaccaaatcgcagttaggacagtgttattattttgccccgtttcacagatgaggaaacaatctcagggaaaagaagggatttactcaagccatacagtggagacgtctggatttgaacctactgtgttggaatctcaactatgtgcaaactcacaaagggaaatgaagccttcggaggaagggcgggacaagggtgaccacacaggtgagcgagatgggcttctagaaggacgcccgcatatctctgaggaacagagaaggcacagatcaaaaacacctaggctcttcacccgttggcagccagagcctgggtccattgcctaggcagtggagaaaaacctggtccccgcccagaaacagccttcagcgtccttagcgaccagggcggaacaggcgccgcccgcgatgcgggccctgtgattggccggattcctgggctcggtccccacgccccgtcccgtccccgggtctgagagtgtcagcttcctggggagaagcacggaccgcgcacctctgagctgccagggtggggacgctgccctagcggtaagccccccgactctgttctctccgggcaatcagggccgacacgcagctgctgggcagggaggggatttgaggatcacgagttccgggtctggaagattccagacaggtgcaaagaggctgcaggtccccgg

SEQ ID NO: 1647 - DNA, 2300 bp, Homo sapien
ggtgtggtgtggtgctgaaaaaaatgtagattctgttgatttggggtggagagttctgtagatgtctattaggtctgcttggtgcagaggttcaattcctgggtatccttgttgactttctgtcttgttgatctgtctaatgttgacagtggggtgttaaagtctcccattattaatgtgtgggagtctaagtctctttgtaggtcactcatgactttctttatgaatctgggtgctcctgtattgggtgcatatatatttaggatagttagctcttcttgttgaattgatccctttaccattaggtaatggccttctttgtctcttttgatctttgttggtttaaagtctgttttatcagagactaggattgcaacccctgcctttttttgttttacatttgcttggtagatcttcctccatccttttattttgagcctatgtgtgtctctgcacatgagatgggtttcctgaatacagcacactgatgggtcttgactctttatccaatttgccagtctgtgtcttttaattggagcatttaatccatttacatttaaagttaatattgttatgtgtgaatttgatcctgtcattatgatgttagctggtgattttgctcgttagttgatgcagtttcttcctagtctcgatggtctttacattttggcatgattttgcagcggctggtaccggttgttcctttccatgtttggcgcttccttcaggagctcttttagggtaggcctggtggtgacaaaatctctcagcatttcttgtctgtaaaggattttatttctccttcacttatgaagcttagtttggctggatatgaaattctgggttgaaaattcttttctttaagaatgttgaatatttgcccccactctcttctggcttgtagggtttctgctgagagatccgctgttagtctgatgggtttccctttgagggtaacccgacctttctctctggctgcccttaacattttttccttcatttcaactttggtgaatctgacaattatgtgtcttggagttgctcttctcgaggagtatctttgtggcgttctctgtatttcctgaatctgaacgttggccttccttgctagattggggaagttctcctggataatatcctgcagcgtgttttccaacttggttccattgtccccatcactttcaggtacaccgatcagacatagatttggtcttttcacatagtcccatatttcttggaggctttgctcatttctttttattcttttgtctctaaacttcccttctcgcttcatttcattcatttcatcttccattgctgataccctttcttccagttgatcgcatcggctcctgaggcttctgcattcttcacgtagttctcgagccttggttttcagctccatcagctcctttaagcacttctctgtattggttattctagttatacattcttctaaatttttttcaaaggtttcaacttctttgcctttggtttgaatgtcctcccatagctcagagtaatttgatcatctgaagccttcttctctcagctcgtcaaagtcattctccatccagctttgttccgttgctggtgaggaactgtgttcctttggaggaggagaggcactatgcattttacagtttccagtttttctgttctgttttttccccatctttgtggttttatctacttttgatctttgatgatggtgatgtacagatgggtttttggtgtggatgtcctttctgtttgttagttttccttctaacagacaggaccctcagctgcaggtctgttggaataccctgccgtgtgaggtgtcagtgtgcccctgccggggggtgcctcccagttaggctgctcgggggtcaggggtcagggacccacttgaggaggcagtctgcccgttctcagatctccaactgcatgctgggagaaccactgctctcttcaaagctgtcagacagggacatttaagtctgcagaggttactgctgtctttttatttgtctgtgccctgcccccagaggtggagcctacaaaggcaggcaggcctccttgagctgtggtgggctccacccagttctagcttcccggctgctttgtttacccaagcaagcctgggcaatggcgggcgcccctcccccagccttgctgcggccttgcagtttgatctcagactgctgtgctagcaatcagcgagactccgtgggcgtaggaccctcctagccaggtgcaagatataatctcgcggtgcgccgttttttaagccggtccgaaagcgcaatattcgggtg

SEQ ID NO: 1648 - DNA, 2300 bp, Homo sapien
cagctacctcaggaggctgaggcaggagaaaggcgtgagcccgggaggcggagcttgcagcgagccgagattgtgccactgcactccagcctgggcgacagaggaagacactgtctcaaaaaaaaaagggacaaatatccataatatataaagaattataactcaacaacaaaagcaaatgtcccagttaagaaaatggggaaaaggcttgaatacacatttctccaaaggagatatctcaatggccatgagcacatgaaaagatgcttgatgtcattagtcattagggaaatgcaaatcaaaaccacaatgagatactccttcacacacactgggatggctataattaaaaaaacaaaacaaaatggaaaatatcaagtgttggtgagaatgtggagaaattggaaccttcatccattgctgatgggaatgtaaaatggcacagctgtggtggaaaacatttggtggttcctcagtaagttaaccatagaattcccatataaaccaataatcctgctcctagttacatacctaaaattattgaaaacaagtgtttaaaaatgtggtatatccataaagtggactattattcagccttagaaggaatgaagtactgatacatgctacaacatgggtgaacctcgaaagcattatattgagttatagaagttagataagaaagccacatattgtatgattctatttatatgagccatctagaataagcaaatcataaagacagaaagcaaattattggctgagggaatgaagaatggggagtggcagcttaatgagtatggagtttcattttgggatgatgataattttctgcaactaaatagtggtaatggttgtacaaacttatgaatgtactaaatgccactgaattgtttgttttaaaatggttacctttgaacctttgtacatagttggtgggaatgtaagttactataagcactataaagaacagtttggaggttcctcaacaaactaaaaatagagctaccatatgatccagcaatctcactgctaggaatatacccaaaagaaaggaaatcaatatattgaagaaatgtcttcactctcatgtttattacagctctattcaaaatacccaagatttggaagcaacctaagtgcatatcagcagacaaatggataaagaaaatgtggtacatatacaaaatggagtactattcagctgtaaaaaagaatgagatcctgtcatttgcaacaacatgcatgcaactggaggtcgttatggtaagtgaaataagccaggcacagaaagacaaacattgcatattctcacttatttgtgggagctaaaaattaaaataattgagctcatggagatagagaacagaaggactgttgccagaggctgggaaaggtagtgggatggtggggagtgggaagtggggatggttagtgggtacaaaaaaccagaaagaatgaataagacctagtatttgctagcacaacacagtgactatagtcaaacataatttaattgtacattttgaaatgattaaaagggtatataattggattgcttgaaacacaaagggtaaacgcttgaggtgacagataccacatttaccctgatgtgattattatgtattgcatgcctattatcaaaacaactcatggaacccataaatatatacacctactgtgtacccacatacaaaaataaattggttatctttatgtgtattttactgcaataaaaagaagtagtaagcttctttttgcagcaattattcaaactgaaactgaaaagccacctattgggggtgctgttcagggcacttgcacagggtgctgaagcttggacaaaatgacttcaaaggaagtcagtgaatgtgagtgagcaaggcctctgcctgtggtgtcaggcaggctgggagccagggtcctgcatcctggctctgtgaccctgggcggggcttaaccctctctgagcctcctctgtaatgcaaggacaataattacagggttgttggaagatttatagtgggatcacaatgcctgacacatggtaagtgctctgtaaaggccaatccctcttacagttttcagattctgtaattccttaaaaggaccttcctcataatcaaaactacattttcaaaataattaagaagtgtttgggagctgtgagaagatcccagaaatcagggaaaatcctttttctcccatcttgttcctaaggaaacccactgccacgagatctgttttccaggccttgaatgcttttattcctcatatctgggttttcttctcttttctccagc

SEQ ID NO: 1649 - DNA, 2300 bp, Homo sapien
gggctcctacacccaataacagcaaatgtctggtctaaatgctttacttagagtaactaatttaattctcataacaaccctacgagggagtgcactttttactcttgttttatgcatgggaaaatagaggtacaaagcagtaaaatagatttggggttcacatacaggtggtctagacagggagtcctttgacttagccacagcaccccactgcccctatgcttagggaagctactggggagaggagtgagatgctgaataacaaggagacctatgacagcctggtaacagcaggtcatgcctgcttgggttcaaatacttggcccagtgcttaaagctgtttggtcttgggtaagttttttgtgtgtgtttatgtgtcagtttttcatctgtaaaatgagattttgagattgctcacttcatagagaggtattatgagaatgtaatgattatgtgtgtatgtgtgtgtatgtgcatgcatatgttcaagtgtgtgtgcgtatgtgtgtagctaagaataatctctggtcctccagttagtatgatttgagagtttgctatcatcatcattgcaaggctatgaagtgaactaatttccagacacatagcgcagacaagagtcacagattctgagaagagggagaatttattgtcagcaggaatggtcaggacaggcttcaatgaggaggtaagaagatgttaagtggatctcgaaggatagaatcacagagttgggagttgaagagacttcagcattcatgcaatcatatgagtttatctcatagaagaaatctaggaccacaagggagaggtgatcatgccatgtttatccagctagttggggacagggccttgactggaacccaggtctcctccaaaccatgcctgtctgaatttttctgggctagaaaaattagaaaccctgcatccccagtcaatactggtgctccctcttgtagtcctcactccactctaagcaccctttactacctttcctctgccatccctttgggagagatgcaagtgagcaatgaattcgacagtgataggaaagacctcctacagaagcaagggacttgataatctataaacagttcctgggtaaaaaccatgaatgtgtacagagcacctactatcaggtgcttactgaattttctcaatctccaccgtaactgctatcattctttgtacagataaaaaaccaaaaggcttagttttgtagtatcttagttttggtaattttcccaagatctcacaaaaagaaaatgtttgagccaggatccgaacaatggtttataagattcttctatccacccacccatccatccacccacccatccctgcacacacccatccatgcacacacttatccacccacccatcatccatctgtctatctgttcattcatctttccatccaagaaacctttactgagagtgtgttccatgtaaggcagtgtgcttggtggtatggagctaaggagatacatagccccctgtcctcatagagctgagtggggcctccttgagggtactgttgggatagtgttagggaggagagtgatgaggaaatggtttatgtggaaactgggcacttgggaagaccatgacaagaggatcagtgggttgctccctgactcctgcttctaaggttgcagatgagtgcccagctggccagctggccactggcatagtctgcctctttgtgtaaaaactagtggaatcacatatgtgctgctcccagatgcagtctcggcaccaacaccttccaagcaggaggttctgtcatggtgctgcctgccaagccttgtccagaggactgaggccacttggccagttgcactgggccctgtgcctgtgcagagactgtctcaccacagcagctgggggcggcagggaagggcaagagcttcttttgtgtgtgtgtgtgtgtgtgtgtgtgtgtgtgtgtgtgtgtgtgtgtgtttaagctggaaagaagccctttttcactgtgctctgtacttgagatatttcactgagtgggagacaaagaggctttgtgtgctcttcaaagtgctctctgctgactgtgatacacatccaggaaaaacccagaccaaagccatgaagtcaccccaagttcaaacccaaaatgcaatttgcagtggttagaaatgacaaaggatgggtggtaggatccagagaaaaaacagtgaaacccgatggaccttaaatagatctgagggcactgatttgattattttgggtgaaatcttttaagaaaatcttgtcagattcttcacagaaaatttggtaaa

SEQ ID NO: 1650 - DNA, 2300 bp, Homo sapien
aaatcgcggggcacatccactgctgcaacaaaagaagtttttaaagtagaaatatcagcattaaattacttcccccattaaaaaaaaaaaacagggcgacatgccagtcctttttaaaaaaaatcttttttttccttgagactcaaaagtaagaatctttgccgttttgaaaataggcagatgtgaagtgtatcttttaatacaccaaaagaaagattttaatctgctctggaagagagcttcccgagtacacactctgaacaataacttttcactgtgcctcagttacatgttgggaccgtcagccagaaacttctatcgaggaaacttggagcgcattgaagttatagatcccagcaaaggttctcgtggccagggatgttgtctctgtaacacagcttggcttttaggacattcctcccctactaaaatctgagaggaaccaaggaaaagcagtgggttaagtttgggaaaatggactctctcattaaaggctgaaatcattatttctcctcactccttagtaaataatcttgagagatttccaaggatgttcaggagggagggtgggagagagaatggttcttgagcattcgggaattattttggcaataaagtaactaaagtacaagcataaaataactttagacagatgcagaattatttcagaggttctcttttgctctttctccagtacagtatttcctgccccttgctttgaaaagaagtctgaatgagagtggccttaacacatcactcaccctcacttgttaacacatcacttaccctcactttcctacaggaatgtcccctctttagagactctctggttatgtcacctccaccgaagggcagattcccctgtgtgccagtgtctttcaacatgatacctacctctttccttttggaattttgagaagggttgtcaaatgcagcattttgcaaaccatcatgaggaagagaagtaaaataagggatgggggcttagaagaggcaggtaggctttcccccctccgagagaggagagcctagagagaaaatatgaggttaaaaaaaaaaaactggaaaagcaggcttactggcaacttgccaaaccctaaaaaccacccccctcttttctgccaaaacaatactttagcaaacctaaaataattgcaggaagctcttttccattttaagaactattacctgggggagggaaaaaagggattcttaaaaggcacccttccagaggtgtcccagaaactgggacggtaatgatagcctatgtccagttctgggcacgcgtttgtggatcagaatatctcccttccctaaggggacatccctttcacatatttttttcctcctaaaaagtaaaagatgtcacagctaaaccactgttgtttctgaacgtgatagaactttttctatggcgtctgtgttcaaacccactagtttcacagtcctgggagggataacgctcattaatctccgccttcttttctccagacccccgccccccaaatccggtgaatcttctgtgggcactgattcctcaccacccccgcttctgaatgccacaggaccgaagctgcacaaagtttgcaggattgtgtgcataattacctctgccgacgaatctattcccacagaaagcttcgctggagagattacaatgctttgagccttaccgcatttcagtgggggaaaaaaagttacctaggaggtctgatttttcaaagaaatttgcatacatgcaaatgtgccgcccggcctcctcctcggttctctacgtgcccacgcggtggcccggggggtgcggggcaacctggcaaagttgcccaagtcctccaccgaggtccgcggaggtctgcagcgggggtggggggatggggacgaggaaaagtagttttgtttgcttaagcacatcctgtggcagcctatagctgcccgggagtacagactgtaactgctcctcactgcgttacccagtaatgcgctgatcgggggagggggcgggggggccggggagcgagcgggagagcgagcaagcgagcgagcaaggagcgagccacggagagagccggggagcgagcgagccagcctgcgagcgcgagcggccgcggaggctcgggacccggctggccgcgcggcgccgcagccgccccctcccccacaccccctcccccccgcggcggcggcgcgagcgggcggcggctgtgcggtgcggtgcagagcggaggcggaggcgggcgcgcgggcagctcgcgggcacccggccgggccggcgcgggagcgggaaagggtgcgctatgcct

SEQ ID NO: 1651 - DNA, 2300 bp, Homo sapien
gttttagactaacttgcatgtatcccagagtttgcacggtgttgctgagtgtctcgttagacatacaccctacctactattctctcctgacataaaaaaaggtggtaattgagctggcatctagaaagtggtggtagcactacagattgtatcactaatcccaaacaaaggagttgcaaaacacctttctttaaatattttctcttcatggtgcaactggggagggccaaattccagccttaataaagttttaacctgaccagttggtagaaatggcagagtaatagaatgtttggtccagaaaccaatgtgtggactgtgtctaggattagactctgcatttctgtctgttccagatgagctgctcatttcttttctttttttaatttaaatttttaagttctggagtacgtgtgaaggatgtgcaggtttgtttcataggtaaatgtgtgccatggtggtttgctgcacctgtcagccatcttctaggttttaagcccagcatgcatttgctatttttcctaatgctctcccccacccagcccaagctcttcatttctactcagtacgtatgtccatgtatccaggagaaatggagagttctacttttggattcttctagagagattccctgtgggacttctaacccctaatcagtattcttccgttgatgataatctacttaaatgatatcctatcatcagaatccctttatggaattatctttgtattttgcacgttcttccattctagcttctaaatgtaatttttcctcccttaaatcatttttctaatggagacaacattcaaatacataggacagagcccacagccagggcgggaaacctgcatagtgaggctggttttgatacgcaggccatcctactggcagctgttttgtaggcagcttcatgtaatagtgcagagggtacagagagagagacctacactgtgatttctttcgtttgtatattttgtattgaaattgtagattttttggttggaatttatttgagatgattcaagacattttgcatagtactcaaatataggtgaaagaatttcaagtttgctcattttggcataattctaaaacaaaagtgttactgttggatctgggcatgtgatgggtgaatgagtgtttcagtgaaatgacataagtctgtataatttggagggtaatgatgccttagaacaagaataaatctggagcgatggaaaggctccatattctagatgaatgcatgcttcctcttatgactctgaaaaataaaattaaatctttatttatacaaatccagtgaggggggaaggctacatggtttggcttaatgatatatttcagaacaggaatattagccttaacctctttcctcacattgcatatgatatttaatccatcatctttgttttaaacaaacaatacacaagctgttgctggcattggtataaagctgatggtccatctggagagcaggaatatagatcaggaaaataagagaattgaaattgggtgcaagggcagatttgcatgtgtaaaaacctttctgttttaccagcttttatcaaattatttaatactgggcaaaacagattcctttttcttgaagctgagaaagatacctcctcctagaggaagagttgcttcagtgttctaggaagaacaattggttttgaaagacaataaaataatgagccattaggatcatgttttgtaatatagggagttggtgtggaagaggagagagaggactgctggtgtagtgagttcttgttctagctgtgtatgatcattggccagtcgttcagcttcttggccttcagtgcttcctttgactcaagtcaattcagcaaccatttattgaggcaaatgtgaggatgttctgtgggctacctatttagctaggcattgtggatccatagacaagtatgactgggtcctatgcttatgaaactccaggtcttacaatggaaacatactgtggttgaacgatgtagagagtgttgtatatgagatatgggtgcacaaaaacaggaaaagtcaattctgtctggtgtagacaggaagaattgtattacaaatccttcttaaggattttctattttgacatgcaagaggagcaggcattccaggtatttgaatactgagagattcaaattatcagcaaggttctttccagttccacgtttgttgtgttatcagtgtaaaattatttgaatagctttccactgatgagttattagctgaaaagtgtttattgtcatggttgaaagaaaataataatgaaagaagaaacgat

SEQ ID NO: 1652 - DNA, 2300 bp, Homo sapien
caatagatcccaagatttatcattcattgcaggaagtcctaagttttactcatttttcttttttttttttttttttttttgagacggagtctccctctgtcgcccaggctagagtgcagtggcgcgatctcggctcattgcaagatccgcctcccaggttcatgccattctcctgcctcagcctttggagtagctggaactacaggcacccaccaccacacctggctaatttttttgtatttttagtagagatggggtttcaccgtgttacccagggtggtctcaatcccctaacctcatgatccgcctgcctcagcctcccaaattgctgggattacaggcatgagccaccgtaccaggccagttttaccgatttttctaaaagctccctggctcttgaccaggtggagaaaccaagttttggttttagcaaattttattctatgtttaacggtatgattatcttattaacctctgtttattcagtcattcactgcacattcaacaaatatttattgagtgccagactcagttctggggatattgcagtgggttgaaaaggtatttacgaagatggagaaggctgggagaagtgtaagcttgagaggagaaggtaatgaaaattctgattcaaataggttatgtttgagacatcctcaattgtatgaccgatggcaaaatttcatctgttttggctcagatttgtttcttgagcccatagtaggagcctatgaatatttattgggcagattaaagattgcataaattaaagggttgcaccagaccacctgcaagacatggattggaaagttgcttcccctccaatcgcccatttccagtctttttgaaaactacagatgtcactctgaaccccatagcatgagccatttcagtcattagtcagaaagtgccccaatcatgaggagatcccggtagggaacaaagaacctatgcccagcaactaatacagatgcattctttttcacagcctttagccatgcaagtgggatagtggtagaagtgatggcctgtcttactgagtttctcttcagtattatgagtcattcttggtattggaaaggtcttattttccaaaatgtggacattcctgtgattttcagtttaaagatttaaaccgaagaaaggaaagataaatactttcatctcctctaatttgggagaggtttctctggctctcattgagaagcaagagctgctgctatcttggcttgacttggtttgaatatctgcaaccttcccatgcactgctcttatcctccagccagttttatcaatcatccttctaattcaagggcaaaagttctcttagagaagttattaggcacctcacataagtttttttaatctaatgtaatcttcttgttcacatgaaatttaccagggttcaaatgtaagggagcagtagttgtctgagtcttttatcagtttttatgggcacagggccaacattttagcaggggtcactgcctgcttaccctgtgggttcccctgctgtaacatatgtgcatttctgagtttgtctttgaaatggcatctgaaggcgacataaaccatccgtgtaaagtgaggcacccaaattgcatgggctcattaagtgatcatttactacatacttcaaaaaattttcatcctgaattagtccctagaaatttccttgaaaggggtataagaggtttaacaatgaattattgtctatggatagctcagcgtgaaaggggatccatatgtgcaaactagaatttgtcatatgtaatgtcagttaagtcaggtctaatctaccaaatacattttttattgcttgcttcattaaaaaggctcttaaggtaatgaataatcttcagcctcaccaaggattattaatgcctttataactcatgtccactgaaaatagaaagacagcttgaaactctaccctaatctaacctccgtgtttgtcttagagccttaaggaagaaaatctgtcagacctatccagtgttaaattcagtcacatgagcaatattgtgaatcgggccaggaagagaaataaaggaggaagttgaatcgggttcagctatgacaaagcaggtctttcttttcataaccctgatgttttcttttcctgcagcaagtccgcatgcaacaccatcgactcttcatttcccgacatcacccattatccagcagcctgggccttacttctcacacccagccatccgctatcaccctcaggagacgctgaaagaatttgtccaacttgtctgccctgatgctggtcagcaggctggacaggtggggtt

SEQ ID NO: 1653 - DNA, 2300 bp, Homo sapien
cagacacctcattgtaccagagattgtccagaagttttaaagacctttgcatccctgaactgggctatgggaaataataatagtaataataataataataataatgatgaaaccaatactgacacaaatgctggtgcccattcagatcaagggtacttgttagggaaaaaaaaaaaagtttgcacccccaaacgtcctgtatcttatgaaaaaaaaaacaaaaaacaaaaacaaaaaaaaaacacaaaaaaccacagaaacaaaaacaaaaaaaagtgcaagtgatttttctaccagacagcgaagcacccctttgcttcccatgcgacttcaagaaggtttcctatactatacatatatatacgttctggttggcaagccctgctgatcagagaaagtctctgcatgttctagtgttagtaactaatttttatatagttaatgtaggataaagtagagtgcattaagacacaatattgtaatccctactctaggcacttgcctttaaactatgtttttcagcccttcagaagggttctactactgtcctatacaatcaagtaactgaaattcttgggaagacactttgctcctcatctttctccccgaaacaatgttgttttgttttgttttttttccttaatttgcacgaaaacaaaaattccatatcaatgtgccttgccctggatagcgattatttgtggaattgttgcacatgctcctctattgaaaggggtttttccctagtcaagcatttggagacactttttgtaaatgtgacttttatgtcagccatcgtcagtttcaacatctagaactaaatagaaagctagttgttccgcagataggagtagtctttattgtcctgtacggtcggtggcagtgctattctgagatctgtagatgcttagaatatcagtattttggatgttgctgcattttacaatttatttggagtcttcctttattttcccccagatatatgaaaatatgcaatacctgcttatatcatgtagaaaagcttagcaattattaatttttcttttatttttttttatttgaccaaagtcggtgctgcacttgacgcagtgtgttttaggtgtttgtctttgtacttttttgtgatttttgaatgcacgtgcgcaggaagggctcctcttagagaagcagtcaaactgtgaagcactaagctgaccctgcttcaagcaattttgtttttacaactgttcctttcacaagcaagccttaaaaaaaaaaaagacaacttcctttttcttcagctcccacaccccatttttcttagcagactgcagtcaatccacattcaataaaaagtatataatgcccatttttatatgcacgtttttaaacttccaagttctgaaaattgtttactggttatctctatttaaggaaaaaaaaataaaataaaacattttggattttcatatgtgtctgataagtggttgaatagtcgtttggcgctgttgtatggtgtgattgtcagtgtatggtgtcacttcctatagccagccagcatactttgccttcccctatagcacttagctgggcattactttattatgacatatgtgcactaaaaaatgaaaaaaaggaaaaaaagaaaaaaaaaaagaaaaaatagcagctttcagtgcttcacagtgaagggaaaaaagcctagacaaacattttgtcagaaccttgcaataagccaaggtattaccagtaaattggttgtatatacaataaaattgcacccttttttaaacaaaacaaactaagcaatagtttgggcagttttagttgtttttagtgagcatgttgtagtcatgactgcaaagagagagaataaactgcccgctcagaagatatgtaatttgtattgttgtatagttttattgattacactgatttattctaccctattttataatgcaggacttttgtaatgttgtttaaatgaggaaaaatttctgtcaaattagcctagtaaaatttctgatcgttcattataaaggcagcgttcatagaattgcttttctttctttttaccccccctttgggaactggatttaagtttaaaactttcctgtttcctttttttttttttttttgtaagtatttaaatacaattatttttttctctcaatggtatagcatattcctatgcttgagaagtataggtctactgaaaaaccattgtaaatggacgttacaggtatgctgtatttttgaaggtattttgttgtattaagtttgatgaagctaaaattagggaactctgaacagatttgcag

SEQ ID NO: 1654 - DNA, 2300 bp, Homo sapien
tgtattccagcactttgggaagccaaggcgggcggatcacgaggtcaggagttcgagactagcctgaccaacatggtgaaatcctgtctctactaaaaaatacaaaaattagctgcgcgtggtggcgtgcgcctgtaatcccagctactcaggaggctgaggcaggagaattgcttgaccccgggaggcagaggttgcagtgagccaagatcgtgccactgcactccagcctggatgacagagcgagactccatctcaaaaaatagcagcggggcgtggtggttcatgcctgtaatcccagacctttgggaggctcagacgggtggatcacctgaggtcggaagttggagactagcctgatcaacatggagaaaccccgtctctactaaaaatacaaaattagccaggcgtggtgactcatggctgtaattccagctactcaggaggctgaggtaggagaatagcttgaacctgggaagtggagtttgcagtaagcgagaatcgtgccattgcactccagcctgggcaacaagagcaaaactcccgtctcaactccatttctgtctctaaatgaatgaatgaataaagcatagtaatgctacaaagttgttttattatgaaaattttagggccaggcgccgtggctcgcgcctgtaatcccagcactttgggaggcagaggcgggtggatcaccttaagtcatgagttcgagaccagcctgctcaacatggtgaaacctcgtctctactaaaaatacaaaaattagctgggctggtagtgggcgccgtaatcccagcctttccggatgctgagacaggagaatagcttgaacctgggaggcggaggttgcagtgagccgagatcatgccattgcagtccagcctgggcaacaacagtgaaactccacctcaaaaaaagaaaatttaaaaacgtagtttatgtttaaatattacttcaaatagttgtatgtcttccagaatatatattccaaaatgaggccaggcacagtgtggcctcacacctgaaatcccagcactttaggaggcagaggcgggcagatcacttaggccaggagttcgagaccagcctggccaaaatggtgaaaccctgtctttactaaaaatacaaaaattagctgagcgtggtggcgcacgcgtgcagtcccagctactcaggaggttgaggcaggcgaatcacttgaaccagaaggcagaggttgcagtgagctgagattctgccactgtactccagcctgggtggcagagagagattccatcttaaaaaaaaaaatttacttctcgtaaaacattataccagtgttctcaaagtgggggtccctggactagcaacacccacatcccttgggatctcctagaaatggaaattatccagtccctccctacatcttttgtatcagaaactctgagtgccggttctatcattctgttttaataactactacaggtgattcagatgctattcaaagtttgagaaccaccaaagttagtgctaaagtatggatgaagaagcaccactcaagttcaaatttttatattgttagacaaaaaaaagattaaacttaactttacgaaaacattttttcctcactgttaaagttccccaccacagaacttttagaacatatagaaatttaaaaacaacagatggaggaaaaaaaatcttcaacttttcacttaatcataaactatttggtttcctcttgttacagtttccaccccccaaattatcccccacctaaattgtcactttttttttttaaaaggcgtaatgtctctcacagtttttaagttctgttcgtggcagccttccaaaatccttctctaaagttacaggaggacattatgtcaattagtaagagcatagatctgaaatctggcaaacatcaatttcattccgactgagtcacttagtgattaaggtcagtgtgtttcagcgtctttgagccttgttccttatctgtaaacccaaaacctatcagggctaactgcgatgatgtcaggaaagcattgattccaacctctgacgccgctggcactttcagaggaccgagaagcctcagctaagggcgcgggaatgagaagcgggtgaagcacctgattgcctaaaccactcgtttccttcctccagcactcaaagattaaccttagctccttccaagggttcgtgggggaaaattcgcctcgagggactgggtacatgcatattttaaaagggtctcccaatgtgattccacgggctcacgggcagaagaacacgcgaagagacggaactggcctcta

SEQ ID NO: 1655 - DNA, 2300 bp, Homo sapien
tcacgaggtcaggagtttgagaccagcctggccaacgtggtgaaaccccatgtctactaaaaatacaaaaaattagccgggtgtggtggctggcacctgtaatcccagctactcaggaggctgaggcaggagaatggcttgaacagggaggcagaggttgcagtgagctgactgtgccactgcactccagcctgggcaacagagcgagactctgtctcaaaacaacaacaacaacaaaaaaaccaggtttgttacatagacaaattgtaggccatggggtttgatatacagattatttcatcacccaggcaataagtatagtacctgataggtagtttttcaatcctctcccttttcccactcaatctccaactttattttgcccccgacttggaaagcctttccttctccattttacctaaattaatctcagactctggttaagacctgtttaagttctaacccatgctttcaaaaaacataatagatctcttcattttctgaggtctggcttccatctggcaatttgcctgttatttccctcagtagtttgttagttcctaaaaagcagaaaccatgctgatattgtgtgtcttcttaccatgactaacaagtgttacatttcttttaaaacaaggaagcaaactacaaagcaccaagtgcatgatcttaattttatttatttatttatttatttgagatggagtcttgctctgtcgcccaggctggtcttgaacccctgggctcaagtgatcctccgacttcagccccacagagtagctgggactacaagctcacggcaccactccgggctaattgttgttgttgttgttgttgttgtttttgaggcggggtctctctctgtcacccaggctggagtgcagtggcaggatcttggctcactgcaacctctgcctcctgggttcaagtgattctcctgcctcagcctcctgcgtagaggggactacgcatccaccacacccggctaatttttgtatttgtagtagagacggggtttcatcatattggtcaggctggtctcgaactcctgacctcgggtgatccacccgcctcggccttccaaagtactgggattacaagcgtgagccaccgcgccccgcctgaaagtctttatgttgtagttgttttgtatctattcctcatcttcctggggacagggataccattttacacatcttcccacaatcaatcacagtgtttaacaattactgtatgtactctatgaataagatacctgaagattgattctctttatcgttaatgtgtggactgtatcaggcaaagtaaaacccctatcatcaaaagcctaaagttattaaagggagtggaagaaggctatcgggacatatttttctcgaaggtgtgacatcacaaataaaagaaaattaacgtatagtgaaatcatcactgtagttagagtcaaaatgccttgcctgtgttccaaactttgggccagtcaacctacagggtgcacggtttcctcattagtttcttcagagagtaaatgagacattgcataagctagcacctagcatacagcaggcaaatactgctggatttctttcttccactaaatgagaagaaaataatgactcccacatttacacgttttagaatattttattttgcgtcagcgaatagagaaaacaaaggagggatgagagaacaggaaaggaaaggggcaaaaagacaaagtgttaagcggattgacccaacgctttcatcgatatcctcctcaatttccttgatcttgggtctcgctctacacgcaggcctccaaccacaccggtctgtccggatctccctccccgtcagtggcggctgtccccaccacgcgcggtctgatccgccaccccgcccccacagcccacttttcccaggcccttggccatcccgcgcccggtaggaattcacctgcacgtaaacagccagggcaaccgtcctccctccttggagcccgcctcccgcggccccgggctccctcccccgccccctgcgccaccccggtgccccgccccgggcggggagagtcggggcgaggggagggcctgccaggtgaggcgcggtcaccctgggcctctcacttccgcccaggtgaggcagggccgacaccgagcccgcccgacccgggctcccacctgctcctccagcgcaccaggtaaagcgtgaggtcccggctgtgcagtgcgcgctcgcccctgggtgtccccgcgcctggaggccggccgggggcagctccctcggggcttcccgggcctgcctgccctgcccccgcgctc

SEQ ID NO: 1656 - DNA, 2300 bp, Homo sapien
atcacagctcactgcagcctcaccctcccaggctcaggctatcctcccacctcagcctcctgagtagctgggactgcaggcacacaccgctatgcctggctagtttttataatttttttgtagagatggggtttcgccatattgaccagcttgtctcaaactcctggccttaagtgatctacacattttggcctcccaaagtgctgggattataggcatgagccactgcacccggcaataaaattttttaaaatataaaaagatacttaaagtgaaaatatgatgttttctatcttagtctgtttggcctgctataacaagataccattaactgggtagcttataaacaaaacaaatttatttctcacagttatgaaggctgggaagtccaagatgaaggtgtccacacatttggtgtctggtgatgttagaggcaggaggcggacaaaggcttaggcagattaggaagggtccctggagaatctctgacctcccctacaagtgtttacaccacatgttttgtacagataagggaacctgcacagggagtttgcctaggcatgcccacagcaggctggagacccatgcactggggggaatggggtggagccaccaggaatttgtgtcttatgcaggggaggagcctggcctcttcagctgctgtggggtggcccaggtattcaatttgggatgtgaaaatctgcttgcgggaccccctctctttgctgagagctttctttttgcttaaaaattccaccctcctcactcttcagtgtgtccgtgtgcctaattcttcctgatcatgagacaagaacccagattagctgagttaaggagcaaaaattctgcatcagtgagggccccctttctggttcataaatgtcatcctttagctgtgtcctcacagggtggaagagtggaatgagctcccttgggcctattttatttatttatttatttatttatttatttatttatttatttatttttgagacagtgtctctctgtcactcaggctagagtgcaatggcctgttctcagctcactgcaacttctgcctcccagattcaagtggttctcctcagcctcccaagtagctgggattacagccatgcaccaccatgcctggctaatttttgtatttttagtagagacagggtttccccatgttggctgggctggtctcaaatgcctggttcaagtgatccacctgccttggcctcccaaagtgttgggattacaggtgtgagccaccacacccagccccttgggcctattttataaaggcactactaatcccattcaccagggctctgccctcataactctatcaccccacaaaagtccccacttctaaatatcttcaccttgggggttaggattttaacatatgaatttgcagggtcaggggaaacataaatattttagcattctggaagattgtgactttggaaaaccataaaaaacatgtatataaaagcaagatgggaggaaaatgcagttaagttatcaacagcacttatctgtaggttttaggttttaggtttgataacttaggtattcaccaggcagataagagtgctaacaaacgcttatagatatgaaaatttatcacatattttggagtcagcaaggaagctatttatttgtagatatcagagcaacacaatccaggaggctgtgtgtatcagcagttgaccttgcttgacttgatagatcttttattcctctaccttggtaaatgtttatttaaatccacttattaatgcttataaaacagtttttttggttaaaaatccaagttttagaataaacagattttgttagcctatactcttgcagatattgttaccagcatttgttactgcttaccacagtataaaccattacttgagaatgcctgtttgcaaggccagttttccactatcattattacttggcttgatcaactgtacagtaatacatttttttcataaagtactaatgcatttctatttttcttcctctcaagatgaaagaaaattttgtcatggagtccctaccatctgtaccatcaactgaaggaaacagtcaacaaggcagatttgacgacctggaaaatcttaattcattagcaaaaactagtctggatttaggtttgtgacttttgtttctcataaacacaaattacattattttgcaagctttcagttttatgtttgtatacatgaatttcaccgtcatatttttattcattatgatgctttgaatttatgtctgcttaataattaatctgcttcagaattacctgaaagaataaa

SEQ ID NO: 1657 - DNA, 2300 bp, Homo sapien
tgtgcacacgtatagtcccagctacttgggaggctgaagcaggaggattacctgagcccgggaggtcgaagctgcagtgagctatgattgagccactgcactctagtttgggccacaaagggagatgcaatctcaaaaaaaattttttaagttaaaaagcaaacaaacaaggtttggtgtgggtgtgagtgtgggtaggtgtgtgtattttgtctatcttgtcacatttttgcaagaaatattcatttctttacttcatatgaacttaattctgaggctccatacttctggactaaggtgaaattcaacctcagccattttggtggctcgttaactccaaagggtaccaaccaaacacccagacattgatgacgcccctgtggtcattgccatcagcactgcctgctcatcatcaagcctattcttggccaagcctataagatctctcaagtccagaagtcctgctgcttgacttctttcatgcctggggtcctataggtgtcagcctctaggctctgacaagtgtcaaagatgtcagcccttgaccattgccagcagggtcttaaaacctgtgtgtgtgcactgggggcaaggaataggaggaccctgggcactgcaggactcaaatccccactgtgggacccatagacctctgtttctaatctccactcaaaagctgtgtccctctcggctgggtgcagtggctcacacctgtaatcccagcactctgggaggtgaggcgggcggatcacaaggtcaggagattgagaccatcctggctaacacggtgaaaccccgtctctactaaaaatacaaaaaattagccggacgtggtggcgggcacctgtagtcccagctactcaggaggctgaggcaggagaatggcgtgaacccaggagacggagcttgcagtgagccaagatggcaccactgcactccagcctgggcgacagagtgagagtccatctcaaaaaaaaaaaaaggagaagctgtgtccctctctcagcagccctctaagacacctatcataatccattcagcactcttcggttctattaaaaacagaaagagccaatgacttctggttacttcagttttcagctccacaaaaatccccaaagcgaagaatttcaaagcttgactacttgctcaacaggagggggatgagggtgggcaagctcaatttaatatttttagaatagtctctcatcaaaatatataaatatttgggtgcataaatgtgaattgtctggagagatccttggaaactatgagtggtgattgatgggactgagtctgggtgggaagcagtctatttttgtgctttgcaacaacctgtggtagtattacttgaatcctatacgtgggtacatgtcatttttatgatgataaataatttttaaggttatgaatctgaagagatacaaattattttttaattcattaactatgaaacacttttcccaaccaaagcttacctacagtagatattgttgtcctaattttatggctcagattgctgagttcagaggaattaattgcccaagattacaagaaggcagagtcaggatttgaacccatggctgtttcacacttaagtccatgaatgctgtttcccctgctcctgttttcttctcctccaggacccattcattccactaagttcttttctttcattgcccaagtaataaggcctggcaaaacctccttcatcaggccacacatctatgccaaatcctagaataccaataaatacctgaaaccgtgtttcaaaatacactataaaatgtaaataagaatgacacatagttcacctcaagttcatacacagcagcaatgtacagggttaacagtaaaacacatggaagaactttaacatgaagtattaggcagagccagttttaaaggaatgaaataataatcttaggaaaatttaattatacctctgaatatatcataactgtgtatattgtttatctttatgtcagataaaatataacattattaacaaatagaaaattatgggttgctgcctattggttgtttgcttaaggaagcatttgtggttgttgaaaatgagtaagattttattttttatagaatgctatagttatccatgaagtctatgaagaaggggcagcagccagagatggaagactttgggctggtgaccagatattagaggtatatggttttgaattttattttatatcagtaaatgtggttcctttgctggtctcgatccataaagttgtctttctactcaactgtattttcactgattcctctcccatttaaca

SEQ ID NO: 1658 - DNA, 2300 bp, Homo sapien
tgggttcaccttgcccactgcctacacagagcccatttatcaagacaggggaattgcaatagagaaagagtaattcacacagagtgggctgtgtgggagaccagagttttattactcaaatcaatctccccaagcattcagggatcagagtttttaaggacaacttggtgggaggggggaagccagtgagctgggagtgctgattggtcagatcagagatgaaatcatagggagtcaaagctgtcttcttgcgctgaatcaattcctgggtgggggccaccaagatcatatcagccagtttattgatctgggtggtaccagctgatccgtcaagtgcaggatctgcaaaatatctgtggaatatctccctggtcttaggttttgcagtagtggtcttatccccagaagccatttggggagagtcagagtcttgtagcctccagctgcatgactcctaaaccataatttctaatcctgtggctaatttgttagtactgcaaaggcagtctaaatccccagggtttgtttcgggaaagggctgttatcatctttgttttaaactatgaacaagtgatcctcccacctcagcctcccaaagtgctgggattttaggcagtaagaagaaataagggattaaaagcaaaagaccgaattctctttgtttattcatatgctgtgtattgactgaactaccagatattgaggcttctttgcttattagctgcatgactttgggcaagtcaagttccacctgagccttgcaagtcaggcctggggagtccaaccacccagaacctttgagtctctgttagagagcaagaccctctcttaagaaacaaaaataaaacaaaaaaagagtattgggatatggggagtttggctcctgtagaaagggtagtctgggaggcctgttagaggagttaacattggacctgagacctgaggatgaacagaagccatcctgaaagaactgggaaaataaagaggtggccaggcgtggtggcgcacgcctgtaatcccatcactttgggaagctgaggtgggcggatcaccaggtcagaagttcaagaccagcctgaccaacatggtgaaacccccctctactaaaaatacaaaaactagccaggcgtggtggcatgggcctgtaatctcagctactcaggaggctgaggcaggagaaatcgcttgaatccaggaggcagaggttgcagtgagccgagattgcgccactgcactccagcctgggtgacataagaaaactctgtctcaaaaagaaaaaaaaaaaatacaaaaattttccgggagtggtggcgtgctcctgtaatcccagctacttgggaggctaaggcaggagaattgcttgaacccaggaggccggggttgcagtgagccaagatcatgccactgcactccagctgtggcaacagagactgtctcaaaaaaaaaaaaaaagaaagaaagaaagaaagaaaaagaaaaaaataactcgcagaggaaacagccagtgcaagggccctgaggcaggtagttccgtgttttttgaggaacagaaagagagtgtttctgttgtaagagtagtgctaagacaatgttgaaggggcagtccggatagaatgagaaggtagaaatttaaccgaaacaggaagccactgaacagtattggagggggagaaggattacagaggggtcgtgggagaggccagggagcagttggaggtgatttcagtgatccaggtgagagacaacgggggcttggactgggctggagctgtggagttggagagacgccggcaaattcaaggacttaggaatggattaactgcgagggttgaagaaaaggaatgaggtgaccttggggttcaggcctgggtgatgaggcgctttagtggtgcctttattcagatttgagtctggagtcgggtctgaggggtggggctcgttcaagcggaggcacggtggagacagagggaattggactcagtcggggggcagcaatggaagtcagcaattgcttagggcggaatgcgatttccggggaggaggcgcgggtatgtagacagagggggttgggacacaccaggaggggaggagccagccccagagatcgggaatcctctcagtccttagttacaaggctccatcctcactttgttcgctcctcagtcgtccaggcggattcctttttcgccaggtaaggctggcccgggtgcatggggcccggcgtgccctgggtaaggctggcccaggcgcgtggggtccggggcgcgccgggtaaggctgggccaggcgcgtggggtccg

SEQ ID NO: 1659 - DNA, 2300 bp, Homo sapien
gcgatgtcagctcactgcatcctctgcctccctcaggctcaagtgatcctcttacctcagcctcccttattactgggactacagtgcacgccaccacaccaggctaatttttgttagagacagtttcaccatgttacccaggcaggtctcaatctcctgagctcaagtgattcacctgccttcaccagggaagccttttctagatctccctgtactctaaaaatcaatattcttggctgggtgcagtggctcaagcctgtaattccagcactttggaggccgaggcaggcggatcacgaggtcaggaattcgaggccagccaccaacatggtgaaacctcgtctccactaaaaatacaaaaaaaaattacctggcacctgtaatcccagctactcgggaggctgaggcgggagaattgcttaaagctgggaggcggaggttgcagtgagccgagatcgcgccattgcactccagcctgggtgacaagaacaagactgtcaaaagaaaaaaacaaaataaaaccaacgaaaactctctttctctctctctctctttctctctctctctctctctctctctctctatatatatatatatatatatatatatttttttttagacagtcttgctgtgttgcccagcctgcagttcagtggcttgaacttggctcactgaaacctctgcctcccaggttcaagcaattcttatgcctcagcctcctgagtagctggtattacaggcacgtgccaccatacctggctaatttttgtatttttgtagagacggggttttgccacgttggccaggctggtcttgaactcctgacctcaaatgatccacccacctcagcctcccaaagtgctgggattacaggcgtgagccactgtgcctgcctaacaatattattctgttgagacaaggtctcactctgtcacccaaggtgtggagtgcaggggcacaatcacagctcactgcagtcttaactttccaggctcaagtcatccttgcatctgaacctcccaagtagctgggaccacaggcgtgtgtcactatgcccagctaattttttatttttttgtagagacaggtcaccctatgttgcccaggctggtctcgaactcctggggtcaagtgatcctcccacctcaacctctcaaagtgctgggattgcaggtgtgagccaccatgcctggccaagaaagtcattttgaattgacttgataattggttttcagaaaaagtcttaatgttaacaatctctgcaattcaaaagggacaactatttctcaattttgcgtaagattctattcaagttagcttagatttggatgatttggtatgatacatatgttggtttcttaaagaataacatctattataattaatctcattatagagaacacagacaacaaagttaatagtatggcaaatcagacagcttcattcttagttatctgctctttggttaatttattgcattcaaatcactatgtaaagggaattttcatgataatttataaattttgaattctaattttctaatcttacccattttgctagtgaactttttattaatttattatggagtgcacccagcatagttttcttaactaagctcatattcttaccaagtttctcaagagaattctttagtaagtaatttttcatttttttgtatttcagattgacgtattttaagatttttttaacttctgaagtctagcaggcctgtaagaacaaaaatcattctgtaggaattaaaaacagaatccagtcttgacaacatatccacaatgtctgatgtatctactagtgtacaatcaaaatttgctagacttgcaaagaaaaaggaaaatatcacctatatgaaaagagagcagttaacagaaactgataaggacatagctccggtattagatttaaaatgcaaggacgtatcagcaattatgaataagtttaaggtcttaatggaaattcaagacctgatgtttgaggagatgagggaaactcttaaaaatgacctaaaagcagttttagggggaaaagctacaatacctgaggtaaagaattcagagaactccagtagtaggacagagtttcagcaaataatcaatttagcattacaaaaaacagggatggtagggaaaatagaaggagaaaactctaaaataggtgatgataatgaaaatttaacctttaaattagaagtaaatgagctgagtggtaaattagacaacactaacgaatacaatagtaatgatggtaagaaattaccccagggtgaatcacgaagttacgaa

SEQ ID NO: 1660 - DNA, 2300 bp, Homo sapien
cacgcctgtaatcccagtactttgggaggccaagacaggtggatcacttgagcccaggagtttgagaccagcctgggcaatatggcaaaaccctgtctctacaaaaaaatacaaaaaattagcctggcatggtggcacacgcctgtagtcccagctactcagaggctgaggtgggagaatcgcctgagccccagaggttgaggctgcagtgagctgtgattgcaccactgcactccagccttagcactagagtgagatcctgtcacaaaaacacagagaaaaaaaaaaagaaccaatatgtgatgtggatgttgatcaaaactcctgtcacttattcttaattgaattatcgaactaaggtctttcttagctcttcattcaaaatccaccactcgaccggtcgcagtggctcacgcctgtaatcccagcactttggaaggccgagatggacggatcacctgaggtcaggagttcaagaccaggctggccaacatggcaaaaccctgtctctactaaagtacgaaaattagctgggtgtggtggcccgcgcctataatcccagctacttgggaggctgaggcaggagaattgcttgaacccaggaggtggaggttacagcaagctgagatcatacaactgcactccagcctgggccacagagcgagactctgtctcaaaagaaaccaaccaaccaaacaaacggacaaaaacaaaaaacaaaatccacccctctgttccttaatattaggatctttctccagattttcttgaagatcccatggataaaggagatactctgatttattaaagtgtttcagccacaaaagattccactgattctgctctagaaaagtgatcagaggatatgcaagcccggcaccacacccatgttaggatcaaagcaccggatactgtctcccttgcccccatcttagaggaagaagcaggtgtgtaaggacctcactctgtagagccatggaaggtaaggggccagtccccttttactcctattttataacaggacaagtaaggatcaaaaaggttgtatgacttccaaggtcccacagctgagtcagtgattttatttatttatttatttttattttttaatttgagacggagtttcgctcttgttgcccaggctggagtgcaatggtgcactcacacacaacctccacctcccgggttcaagcgattctcctgcctcagcctcctgagtagctgggattacaggcctgagccaccttgcccggctaattttgtatttttagtagagacagggtttctccatgttggtcaagctggtcttgaactcccaacctcaggtgatatacccgcctcggcctcccaaagtgttgggattacaggcgagagctgccgcgcccggccgagccagggattaaactgtgtcacatcgattcagtgactcccaagtctaggactcttcccagcatgagtatgcaatcatttatcataatcatttctcaatagcttctcttccccattaggtaaataccctttaaacactgagctcatgtcacacacaagagttgatgtcattggctctggaactcttctcgttcatggtcccagaggagctgaatgctgcagatagcagggtcctgccgtgggttcttaaaccatttactctcaaggtccttggaaagcttaaaagccaaacatgtcaagcacacctgtttgggttttatttcaagcataaattggagatgttgtttgccttcgcatgcatgtttcccattagtaagatgttgcgattttccagctatgcctattaaacacacgcaggtgtcctgatagagtctggggaaaggtcattgtgggctggctgtgtgagggggaaggagagggcctttgtaattgtgcgcataccaggggtttgagctaaacttcttactggggggtgtgagctaaacttcccgcagactcaaactttttccagttaagtgccttgttactggttactaggctgtcctcccagtcttcctttccactcccagagggggctgatcgcacaagtacaaagtatgttgctgcattcctaaccccaccagctctgagcccttcaggaataaatcacatggcaagctggagggagctgcagggacagaggccaaagctgtctttccttgtgtaagggaggaactcttgctggccggggaacctcttggaattggtcttttttggggtttcagaggcaaagcttgaacaccatcagtcaagagtggttccgcgtctccagccggaagtcgtctagccccgccgtggtggcctcctacctc

SEQ ID NO: 1661 - DNA, 2300 bp, Homo sapien
aaacttcagccttcctgacagtggggctcgcccccctgcagccccgcccctccaaaactggtctcccgtggtgccaagggaggcatcacttgggacacaggagcaaaaccagtcaccaccgcttggtaatgccccccaggcctcaacaagcaggagtgaggtgagctaccacaggaaggctctgttggcagaggccaccagacagttggaagctgctgagccagaggatgccgagctcacttttgggagtggacggccccagctcttgagagcatccagcatgcctgccacgctgctgcacagcagggcttctgaggagccaggcctgagcctggggccccctgcccctcctgccctccctccccttcagggtgaaggcagtgtctgtgatggcacctttgaacctgcagaaggattggcaggtttccacagctccagcccacgagcatcaactcggattccagagctggtccaggagggagctgagcctccagagggtgtggtgaaggttccaaatcacctccctctcccaggccctcctttctcattccagaatgtgcttgtagttctagaggacaaggaagatgaacacaatgccagagaagcagaggtgttgttcacccctggctcccctacgccaagcccgccacctctgccatcacccatccctgagaatgagctcctcctggaagaaatcgagctcaacatcagcgagattccacccccgccacctgtagaggtggacatgagaagcattggcatcagggtaactgaggaaagcctgggccttgccagggtggatccaggcagcatctccagcctgaaacagcaggtctcggccctggagggagagttgtctggaagaaccgaggaactggcacaggtcagaactgctctccagcagcaggaagaggaaatcaaagctagggagcaaagaattcgagagctggagttcactgtagcccaactggaaggacagtttcaccaagagaacgccaaagacactcagggccagacggacgtgatggtgaacactgaccctgtccatggactcttgaccagggagtcgtgtgataagggcattgaagtcaaccttctaggcagcatggagtctgaaagctgggggcaccgaggagaggagaatggcctcctatgggggccagatggtcataaacaagggaatcagagcccagcagaacgtgtgcttctgccccagctgtcactgccacagggacccgagcaggtccttacctcctctgtacatagcttcctctccactgaactcaggattgaagaagcaggcactgaacaggaaggaggccctcagggaggaaccaggggagcaggaggctttctgtggggcagcgacagaaagactcccccagcagggagggaggagaccagttccaatctcccagggaaggagcacccgggaaggccaccaagctcgccaacggatgccactattgggcagtatgtgaagaagatccaggagctcctgcaggagcagtggaactgcctggagcatgggtacccggagctggccagcgccatcaagcagccagcctccaagctcagcagcatccagagccagctgctgagctccctcaacctgctgctgtcggcctactcggcccaggctcacccacccaaggagccaccggcctcctcctcctccccgccagtgggtaaataccatcaatataggggcctgagacagggagccatttctccttcacatgataaggcagagggaacaaggttttcaattatattaacatgtttttaaaaagattttagcagctgggagcagtggctcaggcctgtaatcccagcactttgggaggcggaggtgggaagatctcctgagatcaggagttcaagaccagcctggtcaacatggcgaaaacccatctctactaaaaatacaaaaattagccgggcatggtggcaggagcctgtaatcccagctacttgggaggctgaggcaggagaatcacttgaacccaggaggcggaggttgcagtgagccgagatcataccactgcactccagcctgggtgacagagcaagactccatctcaaaaaaaaaaaaaaagaaaaaaagattttagtacttccaggaacccagtggaataaaaactgatgtgtgtgacagtggaggctcgggacctctactcttgcctttgctctaaggttgggtctgactatgggcccactgcctacagctgtatggatagcacagggcacaaagatgccagccagggagggcaaatgagagttgaaagccagcccacact

SEQ ID NO: 1662 - DNA, 2300 bp, Homo sapien
caaagtaggtatttccttacttggcatgggtttatgaaagtgaatttcgtgtttgttaagcactaggcagttttcacatgcaaagagcgtaggccatggatgattacttgttccagctctctctgatctgtgcatacctgaggcgcaggcatctgcacaagcttaaataatgtaaacggcataactcattgatacctccggctttagcaagatttacttctaccaatttgagtcatgcaagttagggttgtttttgcagatttcttttttactgctgagccacttgtgtatcttatcctttaaacccttccatatccgtaattgccaattagtaccctgatttggcaaattcctggctacttcagtgcagcaattatgtgattcaaacccagaaaagcagtacaagaccatttggttttgccagtctgcaggcagattccccagtagaaacccagatgacatactgcaaattggaaaccattccctctccctgtttccttgcagacattggctaagtacacattgatttaataagatgattttccaatacagccaaaaagactgagcatctcagcataatttcgaggctagaacatttagaagaagtctcaagtgacagcgttaagttaaaatcagagatattaggcctcatcgccctgtaatgcttaattaaatttgtgctttttttttttaacttgtcttatgtctcccagccaaagaccagtcctctcagggggatgaagagaaagaccctccgaagagccacccttattctgtggagaccccatatggctttcatttagacctggacttcctcaagtatgtggatgacatcgagaagggaaacactatcaaaagaattcctatccacagaagggccaagcaggccaaatttagcactctgccccgaaacttcagccttcctgacagtggggctcgcccccctgcagccccgcccctccaaaactggtctcccgtggtgccaagggaggcatcacttgggacacaggagcaaaaccagtcaccaccgcttggtaatgccccccaggcctcaacaagcaggagtgaggtgagctaccacaggaaggctctgttggcagaggccaccagacagttggaagctgctgagccagaggatgccgagctcacttttgggagtggacggccccagctcttgagagcatccagcatgcctgccacgctgctgcacagcagggcttctgaggagccaggcctgagcctggggccccctgcccctcctgccctccctccccttcagggtgaaggcagtgtctgtgatggcacctttgaacctgcagaaggattggcaggtttccacagctccagcccacgagcatcaactcggattccagagctggtccaggagggagctgagcctccagagggtgtggtgaaggttccaaatcacctccctctcccaggccctcctttctcattccagaatgtgcttgtagttctagaggacaaggaagatgaacacaatgccagagaagcagaggtgttgttcacccctggctcccctacgccaagcccgccacctctgccatcacccatccctgagaatgagctcctcctggaagaaatcgagctcaacatcagcgagattccacccccgccacctgtagaggtggacatgagaagcattggcatcagggtaactgaggaaagcctgggccttgccagggtggatccaggcagcatctccagcctgaaacagcaggtctcggccctggagggagagttgtctggaagaaccgaggaactggcacaggtcagaactgctctccagcagcaggaagaggaaatcaaagctagggagcaaagaattcgagagctggagttcactgtagcccaactggaaggacagtttcaccaagagaacgccaaagacactcagggccagacggacgtgatggtgaacactgaccctgtccatggactcttgaccagggagtcgtgtgataagggcattgaagtcaaccttctaggcagcatggagtctgaaagctgggggcaccgaggagaggagaatggcctcctatgggggccagatggtcataaacaagggaatcagagcccagcagaacgtgtgcttctgccccagctgtcactgccacagggacccgagcaggtccttacctcctctgtacatagcttcctctccactgaactcaggattgaagaagcaggcactgaacaggaaggaggccctcagggaggaaccaggggagcaggaggctttctgtggggcagcgacagaaagactcccccagcaggga

SEQ ID NO: 1663 - DNA, 2300 bp, Homo sapien
gaaacaaattctccatgagatcagagaatgcccagagaaaaggttccaggaccaggagttgtggaatgtctggtttcagttccagctccaccaatttgcttgtgtgactttgggccagttctggagcccacctgaactgggcttcctcttccctaaaatggaaatatgatccacactgggtctatcccacagggatgttgggaagcccaaatgaaaatagtgtgaagtgcccccaaacaggagagcacaaacccctggcctgtaggctggatctgatccataaagccatttcctttggcttgaacagtgttgacctatgtagaaagtgtttagcattatacaaatgagctcctaacaaatttggggccttcacttaaatatctgacttatggctttttttttttttttgagacggagtcttgctctgtcacttaggctggagggcagtggtgcgatctcggtgcactgcaatctctgcctcctgggttcaagtgattctcctgcctcagcctcctgagtagctgggattacaggcacgcaccaccacaccttgctaattttgtatttttagtacagatggtttcacatgttggccaggcttgtctcaaactcctgacctcagctgatccacccaccttggcctcccacagtgctgggattactggcgtgagccaccgtgtccggctgatggcttctttttcaaaatgggaggatctggccacatgaatccctttccctagatgacaaaatagactgagctgagtagcagcagccccttcccttgggcaagaacctggagctgctatcaagctcaccacagtccccaccactccctactatgtcccaacactgggaccaagtctctgctgccatttattattgctctgggatattgatttgctccagtggagctctagtggaagtgaaatcgttcaaataaccatatttctataaaaacgtaaaatgaaagtcctagaaagtactcccccatctgggtcacaatgtcaaaaacgaaacccctttgcctaagtgttagcccttgccaatgggcccatgaaggatgcccattgtgggggtcagagctggcatccggagtcttacggggtccacggccctctacttgcctatctctgttgtcttcatctgtaaaggaggagtagcagcagctcctttttcctagggttagggtgcacaacgcccaccaggcacttagtgaactgttcattcaaggttagcggttgaaacgcaaacattttgaactgataaaaaactctggtgggccgggcgccgtggctcatgcatgtaatcccagcactttgggaggccgaggtgggcggatcacctgacgttcgagacccgcctggccaacatggtgaaaccccgtctctactaaaaatacaaaagttagctgggcgtggtggtgtgcgcctgtagtcccagctactcgggaggctgaggcaggagaatcgcttgaaccagggaggcggaagttccagtgagtcgggatcgcgccactgctctccagcttggccatagagcgagattccgtctcaaacagcaacaacaacaacaaacctttggtgggaggtcggagtgtgaaatgaaagacttagggttcctgagtgggactacagcaaggattgggaagaaaaaaaggagatggaaaaagacgatttaggagaggtaaaagttctgttactaggaccccagccctcactggcccacatccgctggcgaggacctaacttactgcacccagcttcccagtggccagacctaggttccagtcctggctggggcaagtcattaccttgtctggtgctgtttctgcacctatcaaatgaggatggaaatgtctagatgaaccgagataaacgcatacgaaagcactttgggaatctgaaaagcgctatgaacaggttaggagtttttggtctcttttcaaaaagtttttcttctaagctcatgtttatcaagggcttttgagtttatcgaggctaagaccctcccctcggtttcgcaattctgccccttcctacacaccaaagtccgcgccgcgtcaggagtcttttttttctcccctagcgaaggcggggactcgggcgctgttggcagctggcgacgcggggcgaagccgcggctggcggcgcctggccagtcccgcatccgccgcggtgggtgtgcccgcaggggtgcgccggggccagggccgagaccgtcggccagagggcgcctggagggtgtgcgcgccgcggacgaccagggtgcgccagccccggggtgcgcgcctgggacgcgga

SEQ ID NO: 1664 - DNA, 2300 bp, Homo sapien
cctatttaatcaaccctcccaagtattcaatatctttgtgtttatactagctaaaatggattctattttccgcaaatgaatcttaactgataccacacattgtgtacaggaagaatagtggctgcagacaataggatctcaggaatatgggaaagtagaattgcttatctgttctcgtagagtttgaaagtagcaataattatgctagtactagaaaatgagacactgccactctgtggtgcacaatggctaagactgacctatatacattttctaatcttgtccttgtgtatttcgtgatctgctggttcaacatctgtttgtacgttaaacacctcaatcttaatattctaagaacgatgatccttcccattgagcctactaagacccccattttagcaaggaccaacactgagttgctcaggttaaaaaaaaaatcgttactctttgtttttttttcttttttcgggtgggagggtggagggcagggcctcacactgttgcccaggctggagtgcagtggtgcatctcggctcactgcagccaggggatcctcctccctcatcctcccgagtggctgggactacaggcacgtgccaccacgcacggccaatttttggagttttttgtagcgatgggtcttgccatgttgcccaggctgatcttgaactcctgggttcaagcggtccaccggccctggctacccgacctgttttttcttacattatcatacagccaatccatcagtagagctcgttggctgtgctcaaaatatatcttgaaccctaccagttttcaacatcccaccatcttattccagactaccataatttattccttggcttattgaaccagcatcttggctgacctttccgctggtacttttctttttttgagacagagttttgctctggttgcccaggctggagtgcagtgaggcgatctcggctcaccgcaacctccgcctcctgggttcaagcgattctcctgcctcagcctccggagtagctgggattacaggcctgcgccaccacgcccggctaattttgtatttttagtagggacggggtttctccatgttggtcaggctggtctcgaattcccgacctcaagagatcagcccgccttggcctcccaacgtgctgggattacaagcgtgagccaccacgcccgaccctgcttgtactcttgaaggtcaacgtgtaatcccgccactccccagctcagaatcatctaacgactcccatctccttactcggcttacccagggtcctgcctttctcactcatctcatctcctcccatcttatttcccaaattgactgcgctctaagcgccctggcctccttgcttcttttcaaaacaccaaccacattaagcttcaggacgtttgtaacttgctgttctctctgcccgcaccattcttccctcagattcctccaagctttttcattcagctctgctcaaatgtcaactcaaagaggtctttccaggctatcgtatctatcacttatcttagcgtcacttgtatctccctctccagaatgtaatgctcctttatgacagggaatgcctttacatccctcgcgccttgaaaaatgcctggcacatagtaggcaccttaaaaatacttgattaaatggatttgggctgaacgtatcctgcttaactgcagcacttgagctgaggtcacctcaccaaagcaggcacacaaacacaaaaggaagcacacaaccagatgaggcctgcctgccgctcctgaaccctttgggagggctcgcgcgggaaccctgggaagctcccgcggccggagctgggcctgaaactgttctttcgtttcctcctgcggccgagaaagggaagaggtaaacaggcgaaaatgaggcgagcaggggctgaggaccgggcctcagctctacagcattcgcctgagcatgtattgttatccgtggcagcgccttgtctcattggatggccctaggcctagtgtggccgcgactccgaactgaaagcccaagcgcggcggcgtccagccgggcagccattttccgaagctgctctcttggtaaccccgcccgggcgcgtacgcacgaacggaggcggggcttaccgcgagggcctcgctccggaagccgcaccctccgcggcgtcccaccgtcgaggattaacaaaacgccaaacaagattttaacagtcggcagcgaaagcgcgcactcgagcgccaatgagagcggaaggaggggcaccgcgcctgaggaacactccgtatgtcgaacaatgattggctggagcccacctttc

SEQ ID NO: 1665 - DNA, 2300 bp, Homo sapien
taagaacgatgatccttcccattgagcctactaagacccccattttagcaaggaccaacactgagttgctcaggttaaaaaaaaaatcgttactctttgtttttttttcttttttcgggtgggagggtggagggcagggcctcacactgttgcccaggctggagtgcagtggtgcatctcggctcactgcagccaggggatcctcctccctcatcctcccgagtggctgggactacaggcacgtgccaccacgcacggccaatttttggagttttttgtagcgatgggtcttgccatgttgcccaggctgatcttgaactcctgggttcaagcggtccaccggccctggctacccgacctgttttttcttacattatcatacagccaatccatcagtagagctcgttggctgtgctcaaaatatatcttgaaccctaccagttttcaacatcccaccatcttattccagactaccataatttattccttggcttattgaaccagcatcttggctgacctttccgctggtacttttctttttttgagacagagttttgctctggttgcccaggctggagtgcagtgaggcgatctcggctcaccgcaacctccgcctcctgggttcaagcgattctcctgcctcagcctccggagtagctgggattacaggcctgcgccaccacgcccggctaattttgtatttttagtagggacggggtttctccatgttggtcaggctggtctcgaattcccgacctcaagagatcagcccgccttggcctcccaacgtgctgggattacaagcgtgagccaccacgcccgaccctgcttgtactcttgaaggtcaacgtgtaatcccgccactccccagctcagaatcatctaacgactcccatctccttactcggcttacccagggtcctgcctttctcactcatctcatctcctcccatcttatttcccaaattgactgcgctctaagcgccctggcctccttgcttcttttcaaaacaccaaccacattaagcttcaggacgtttgtaacttgctgttctctctgcccgcaccattcttccctcagattcctccaagctttttcattcagctctgctcaaatgtcaactcaaagaggtctttccaggctatcgtatctatcacttatcttagcgtcacttgtatctccctctccagaatgtaatgctcctttatgacagggaatgcctttacatccctcgcgccttgaaaaatgcctggcacatagtaggcaccttaaaaatacttgattaaatggatttgggctgaacgtatcctgcttaactgcagcacttgagctgaggtcacctcaccaaagcaggcacacaaacacaaaaggaagcacacaaccagatgaggcctgcctgccgctcctgaaccctttgggagggctcgcgcgggaaccctgggaagctcccgcggccggagctgggcctgaaactgttctttcgtttcctcctgcggccgagaaagggaagaggtaaacaggcgaaaatgaggcgagcaggggctgaggaccgggcctcagctctacagcattcgcctgagcatgtattgttatccgtggcagcgccttgtctcattggatggccctaggcctagtgtggccgcgactccgaactgaaagcccaagcgcggcggcgtccagccgggcagccattttccgaagctgctctcttggtaaccccgcccgggcgcgtacgcacgaacggaggcggggcttaccgcgagggcctcgctccggaagccgcaccctccgcggcgtcccaccgtcgaggattaacaaaacgccaaacaagattttaacagtcggcagcgaaagcgcgcactcgagcgccaatgagagcggaaggaggggcaccgcgcctgaggaacactccgtatgtcgaacaatgattggctggagcccacctttcttcttttttgctattagatgggcttgctgctcccgcccatctaattggctttggtctaggtacttctgattggcttcccccgggcggtgggaggcgcggttttggggattgttcatcatggattggtgaatttgggctccttctcgaggtggtggcccatcccgtctgctctctgtcccgtctcccgacccgtacgcttttccctcaactcgcgcgcacgaatggttaaaaaaagggtgtgaggctcgagcccgccagccaggccgctagcacctcgcgcgcgccctcagcgaggacccgcacgagctgcccggctctgtgcctgcgttgtttgaaactgtggaacccgtt

SEQ ID NO: 1666 - DNA, 2300 bp, Homo sapien
ctctgaattcttattaatagaatcttacttagtgcagcctctcccaaatattgtcatggttagtttattcccaggtttctgttcagttaaactatttgattaaaatgtcaaagtagatgaaacaaatcatagtctctcagttcctcaattttctactctgtaaaataggattaacatccttttaagggaattgttctgtggcttgttatgtgtaataatgtttttaaatgcttttaaaacttttattctgggcatatagcaatttttgagcctgtatttcttaaaatgtcatctgaacaagattcacatacttttcagattatacaacttttgggaaaagactaaatctacagaagtaatattttcaccttgtttctttaagataactacttatcgttctcccttctatatttcatagtgatcaagttgttcctgcagcacagtcttcacctataaactgtgagaagagagaaaacttgttaccatttgtgggactgaataatctcggcaatacttgctatcttaatagtatacttcaggtaaattgacaattttgctatatcataaagctttagtaggcaaagattgatgtagcatttaatgtttttgagttattggaggactttaatgtccatactgtctttgcctttgattgttaataaaccagaataggctaaaataataagttacatgttattaaacttcctttggggtaagagaaaatgatagactaaataaaggtgggatagcaaaattgagtagaccttaagtggaaggtcaaacctttaatttctttctctgattcctggtgctacagtgtgatatatgtcttatcccttggaagtaacgttggcattgtgttgtgtgtccgttggcgctgtgttgtgtgtccttgtaaccttaaagtcttagcaatatctgcccaggtgcagtgctttgtgctaatgagggaagacactgggctactactgatgaagtggagaacaaattttgacacaaaacttaatctcagaattttagggtaatacatgttaaaagtgctctatagaaagcatgatgttgttttaatgattttacgtgtattgtttgttcagtaaacacttaagacaatctcactttttataggtattatatttttgtcccggttttaaatctggagtaaagcacttatttaatattatttcaaggaagaaagaagctctaaaggatgaagccaatcaaaaagacaaggtaagaaaaataaagaacagaaaataatgtaaaaagcaaaagtaaattaatggaaatttacttgcctggaaatgaagaggactgggggggtggatgacaaagattatttctctgttagcgagctattgtcaggcaattatttttcattctttcaaggtggctaactagataattcccttttacaatgtttgctcctgtaatctgtgtatcaaacttttgttacttgtatactatatattactgtatactataatcacaatatgttatacccatgtacaacttatttacccattgtgttttcaaattgagttaaaatttaaatacagtgtatttaaagaaatctttaacttccataattaaaaaaccattgtaattcacataaatagtaattcataattcctcttaaaattacaaaaaagaccagacgtggtggctcatgcctgtaatcccagcagtttgggaggtcaaggtgggtggtggattgcttgagcgcaagagtttgagaccagcctgggtaacatggcaagaccctgtctttactaaaaatacaaaaactagtagggcgtcatggtgtgagcctgtagttccagctaattgggaggctgaggtggaggattgcttgagcccaggaggttgaggctccagtgagccgcgatcaagccactgcactccagcctgggcgacagagaccctgtctcaaaataaaaaaataaaaaataaggcttatttgtacatcccttaaaattagtgctattatgcaacttagaaaatctagtattcttaagtgagacaaagacaaagggggaaggtacttaatttgttcataaaattattggtttgtgtgtttctttcttgacagggaaattgcaaagaagattctttggcaagttatgaattgatatgcagtttacagtccttaatcatttcggttgaacagctccaggctagttttctcttaaatccagagaaatatactgatgaacttgccactcagccaaggcgactgcttaacacactgaggtatagcctataatataattttagggtttcaatttagctacttgtttata

SEQ ID NO: 1667 - DNA, 2300 bp, Homo sapien
attaattctaataatttatctgtagaatctttttcttgtcttataatgatatttaggacgtccagtactctgttgactaggaatagagaggacatcattttcttgttccttctctaaaagggttttcaccactaagtatgtttgctacaggttttttgtagatttttaattatggttaaaggactacccacctatttgtagttatgcaaagagtttttaatatgacaggttttaaaagtttgttatcaagtgcttttattctgcatctcctttaatcttttaatctaaaaacttagtgattttataacccaacttttcatttattccaggaattaataaacttggccagtgtggtaccttatgcctgtaaatcccagcactttgggaggctgaggcaggcagaccgcttgagctcagaagtttgagaccagcctgggcaacatggcaaaacattatctctgctaaaactacaaaaattagccgggcatgatggtgcacgcctgtagtcccagctaattgggaggctaaggtggaaggatcccttgagcccaggagatcaaagctgcagtgagctgagatcgtgccactgcacttcagcctgggcaaaagagcaagaccctgtctcaaaaaaaaaagaaaaaaagaaaaatacttggagggtgtgtgtgtgtgtgtgtgtgtgtgtgtgtgtgtgttcaatacattggcacaagttttctgctaaaattgtccatcagtgtgccttctgtggataccaaaatctgaagacaagtttaatatgttatataaaatggtgtagtatttgtatataacctatgtacatcctcctgtatactttaaatcattttagactacttaaaatacctaatatataatgtaaatagttgttaatattgtattgtttaggaaataatgacaagaaaaaagtctgtacatgttcaacacagtttttttaattattatttcaatccatggttggtctaattcatgcatgcagaacccacagatagggagggccaactgtgttttgtttggaagttttacaattatttttatgggtgagcttggattataatttttttcttatagtctccattaggttttggtatcccagccttgaaatatgagttgggaactcccctcaagaatagttcttttcccctatactctggaatctttttttttttttttttttttttttgagacgagtcttgctctgtcacccaggctggagtgtagtggcgaaatctctgctcactgcaagctccgcctcccaggttcatgccattctcctgcctcagcctcccagtagctgggactacaggcacccaccaccacacctggctaattttttgtattttttcttagtagagatggggtttcactgttagccagaatggcctcgatctcctgacctcatgatccgcccgccttggcctcccaaagtgctgggattacagacatgagccactgcacccggcctggaagcatttttttatatactctagaataattgcattacattcgggtattggtccctaggatgtttagtagaagttagtgttttctttgtagatagatttgtgacagttgtttcaacctattggattattttaggattattgccatttttttcttcattgagtctgttttgctaaattatattaatctagattaacagattattaataatttagcaaaaaatctacattaatctattaatatcaatgaatataaattcagagggtttttttgtatgaaattgtacagttttgtaaattgtacaatcccaacactttcgatggctgaggtaggcagatcacttgaggccagaagttcaagaccagcctggccaacatggagaaactccatgtctactaaaaatacaaaaactagccaggtgtggcgatgtgagcctgtagtcccagctactcaggtggctaaatacgagaatcacttgaacccaggaggcggaggttggagtgagcagagatcatgccactgcactccagcatgggtgacagagcaacactgtctcaaaaaaaaaaaaaaaaagtacattatatcctctctgccttttaaaacttctgctgtatttaactttatgttccattttaaatttctggtaggggatatttgacctctttcatttaatcttgccagagcttagtttgtttttttagttttttcaaagaaccaacttttgcaatttttgatactctattttaaaatcttatttcctttctaatactttaagttgcttaactcttcagttttagccttctaatataagcatttga

SEQ ID NO: 1668 - DNA, 2300 bp, Homo sapien
agtcttccatctccttcagtctttgctcagatgaaacctaccctgaccatcttctttgtcccttttgttcacagatttttttttttttttttttttgagacggagtctcgctctgtcgcccaggctggagtgcagtgacgcgatctcggctcactgcaagctccgcctcccgggttcacgccattctcgtgcctcagcctcccgagcagctgggactgcgggcacccgccacggcgccaggcttatgttttgtatttttagtagagacagggtttcaccgtgttagccagggtggtctcgatctcctgacctcgtgatcccccccgccttggcctcccaaagtgctgggattacaggcatgagccaccgcgcctggcctgttcacagatttatcataaatatctagaacagtttgctaacacatagtaagggctcaataagtatttgaatggatgaacgctttccctaatatttgtatctgccttcccctgaccctctatcagtgttccttccttcccttccctgtccacttggccgtttattttgagtagaaccctatgcattacctctgttgtgacttacttgcaacaagattaatcttcccttatacctctttttagtatagcatatatccctttgttttgtaattatttgaatacattttttactctcttgggaagcaagtctaacttatttttactttcctattactgaagatgaacagtggctaacataataaacacccattaattatttttccttgaaccgaatgtcatgagaaaatataataaaaagaggtaggttagttttaagctaccttaataaaattcagtgttcagattgaaggtgacattgagcccagcaacacaccttcattggtcagatcacatcaacagtattatggttatatctgggatatcacactttaaaggatggcattgtaataaagtgtcaacagagtagaaattactgtcatatgaagattgaaaactggaaagtttaactaaagggaacaagtcctaattgttatcttcaaatatttaaagggccacaatattgaagaattggaatattgttttaaactggaaacctctgagaggaggacagccagagtagcagcatattaatattacaggtcacacctgtaatctcagcactttgggaggctgaggcagctagatcacttgagcccaggaattcaagaccagcctgggcagcgtggcaaaaccccatctctacaaaaagtacaaaaaattagctgggtgtggtggcatgcttctgtagtcctagctactcaggagactgaggtggaaggatcgcttgagcccaggagacagaagctgtagtgagctgtggttgcaccactgtattccagtctgggtaatggagtgagaccctgtctcaaaaaaactaaaaactaaaaataaataaaaaacaaaaagtaggaatgtatatgtatatatgtgtatgacatgttttgaaaaaaatgacaaatttttaagtaattttcttaggttcttttttttatttttcatgcagtgcctttattacttaagtcagaatttactattattatgttgttcttttggcttacttatggttttaatcagaattttagttgaatcattcaatctatatagatggattaatttgctgtagaaatcagttaatttttatgtgtgttaaattttgaaataaagtaactgaaaaaatgtttttaaattagaagcctcaactttctttagctccaaatacatttttctttaaaactttacatgtttttggacaaaaatgtagggatatttttcatcactatacctttttttttggtattataaaactggtaaattaaggattagagcttcccattttgcttaattatgtgtggcatttctagcttattttatatgcccttttgctttttcagtataggaaaaataaatataaagcagattaggcttaaagagaattcagaggtatttacttacttgtaatgcgcatataggcaccaccagagaatcctaaaataattttgtatctaaattgtaaaaattagctgagcaaggtggcacacacctgtaatcccagctactcaggaggctgaggtgacacttttttaaaaaaaattgtaaaaattgcatagaaagtgtccaaatatttatctttattgaaagaatttgtcttctgatatgctgtgtgagagttaaggtgatcttaatgtactttgtacctgacatgaatgtgtagttaatgcatgccaatgggtggtttgggtgatttagaataaccaactcatctca

SEQ ID NO: 1669 - DNA, 2300 bp, Homo sapien
tatctagtaaaatatagtagcctggagttctacagacaaatatcagctggagacagaaacatgtgtatatactggttgaagcaaagacatggatgaggctctttagagtatgttaagtgagaaaaggtttttgacagaatctttgggaatactggtatttaggaagaataaccaaggaataaaatagaaaaagagtcgaaaaagaataggaaaaccaggataaagtggtgccactgaagataaggtaggagattttcaaggtgaaagtaatttaaatatacaaagatgtaaagtagaatattgaccaaaaaatattggatttgacaattgatatattatcaccaataatctcttcagagtgatttcatggtagaaaatggtggagcagaaatgaatttacactaaaaaaaggaagaatgtaagttataaactgttaaaggcatcactccaaaagattctaccttacattactttatgcatgatgtgtgttaaattactttcatcatagtatggatgtcatgaaatggactagaatttaaatactccatctaccatttaagaattttataatgtcagtcaagctatttaacctcatctgtaaaatgttatattaataacatatgcccataataaataaatgtaaagagataagcagaatttctaattcaacccttaacacatgacttcttaaaatcctgttttgtagcacattattcacaacaaaattctaagttttacaacctttctaaaataagattttgatatgcatattttattactttaaaaaatattttgcttagaatggtattttttcactaaatatacttttagcaaggaaaaatagcagactttttaaagcttttctatattaagtattgactggacaatttctctgttacagaactttgccagggttaaaatgcaggtaacaatgtcactatcctccttggtgggcacatctcagaattttaatgaagaattcttaagacgttctctaaagactatattgacatatgctgaagaagatctggaattgagggaaacaacatttcctgatcaggtcagaaatgctgctttctagatcattaattgaaataggcttgttaaataggcactttccaaattgttaaatcaaaagttgatttttgctggaggatcatttatttcattttcaatccacacatcatgtgccatagataggactgaatctctttgttttattaagctacccttctttttggaaataattaattctgtggtgtttaattctgtgcatttataataagtagaacagcagacttggacagtgcagacaaagctttatgatgaaacgttcctacttattaatcaaacaataatatgccttaaaaactaaagtttctacaaactaccttttagtaaaatcagaaatataggagagaattttccttttgtattcttgtatttcccatatccctctgttttatttctacttacagttctgcttgtttccaggtgaaagaacaaaaataaacatagtctgctgaggaatttatataaagtttactacccttcacttaccatatccccacatacctatactgtacagaatcatatcagtatcctacaacttgttttgaaatctttagatatttatctgaaatatctctgaaactaatttggtgattatggatgaatgacaattcaagaatgtttttcatataattctctgctgcaggtccaggatctggttttcaatctccatatgattctttctgatactgtgaaaatgaaggaacaccaggaggatcctgaaatgttgattgatctaatgtacaggtagcatttatttgattcatttatgctttgtataagggacttagtaagacatacagtaagcattagatgaaaaaaataaacacacaaaaatgatttgtgatttttctttatttacattctttattgtttttatttttattttttacttttttgtagagatggggttttaccatattgcccaggctggtcttgaactcctgggctcaagagatctgcctgtcttggcctcccaaagttctgggattacagacgtgagccaccgcacctggccttgagtgatttttctaatggtagattgaaagtccaaatgcactttttccaggtggcatctttggatcttctgtgtctcttcttttaagaacaatgcaaatgtacttattgattatcaaaaacgaggatttttttaagtattcataacacacatttaacaccttggtgtcctgggccccagagttcctttgaaggcccataccaatattttc

SEQ ID NO: 1670 - DNA, 2300 bp, Homo sapien
gatacattgactgatcctactgccataaacacctacaatacacttacatgaatcttcttactgcccaagtggctgcaggtaaacttttctggcttgagatttggcactgagtcaaggggctaaaatttttttcttgagaatttctaattataagttagcccgcaagtagcttcactggcccataaaactttgagaatggagtgaccaactcatttcaggtttgcctagcactctcccagttatagcactgattgtcccacatcccagggagccctttagtcctgtcctaaggcaaaccaagatgattgattaccctatctgagaaccatcatcagcccaagcctcagaagattctcacaaataaactttcacaatattttctcacagacagtaaaatcataaaacagaggaaacaagtgagagccagcagagaaacaagtttcagtaccatatgtatgagagcttgaaataatcagatattgaatgtaatataaatatattaaaattcttaaccttggaatgtgtgctttcctttctttttctccgtctgtccaaatctatttctctgatggtttttctacatgtgttattttttagaaatcacagagtagccaggtactgtactatcagtatagtagtgctttatttctgcatttgtagaatgtgttctcttggcttatcttgctgtgttttgagggagacttttttggtgttctcctgattctttttgtttaaaccatcttatgtttctttataaaatgtcactggaaattttaagtttgaacattaaatattttattttccagtttaattttgataattgtattcttttttttttttttttttgagacaagatctcactctgtcactcaggccaaagtgcagtggcacaatcatgactcactgcagccttgacctcctgggcttaggtgagcctcccacctcagcctcccaagtagctgggattatagctgtgcaccaccacgcccaaataatttttgtagagacagggttttgccatgttgtgcaggctggtctcttaactcctggtctcaaggatcccctacctcagcctttcaaagtgcttttattcttaaattgaatttgtaaactgtaaattaatgaagtattctctttagtggtaataataaagactcacagacttacagatctaaaaacttagaaaagttagtgtttaatatggccttgtactttatgtgttattttgtctactttggtgtaatatatagtatctgtatatctattattgctaaaacaaaaatctcaactatattcataaatcatgtgtaattattcttacatttttatttgcattaaatgatacttttacaaatattagtatttaagtaaaccactttattgcatcaaactgttttgttcttttttctttattatttttctagctttattgagttataattgacaaaattgtatatatttacagaatataacatgatcttttaatatatgtgtacaattgtgaaatgattaccacaggcaagctaactagcatattcgtcacctcacatccttttttccccaaatttgttgtgtttccaatgagtaattccatctagtctcactgaagagttaaattatcatctgagcatatttatataaaaaaaattgggggaaaattagatgaaaccttagacaaattaagtacatttatcctgaatacagacattggaaatatttgaaatagtaagatgaatactaaatatttgaatgttgttttccatgaagcagtcctaaatacaagcccacatagcaccacctagtgtcagtgtcacttagaataaaactgtctgctgcatgtttgaaagctaaaacataaacatttatgcttttagtggcattacacttctgtaatggggtgagaaagtgtgtattgttgtggttaacaaaaaagctgcataaatgtgtaaactactgccttttttcttattctcttgtaattttttatcaggcaaatattgaaaatggtttgaaattttttatttctatgcatccttaagtcttttcagaattgtagttttcaaaaagataaatataatttcttacaatattttgtattagatcaagagcagagattgaacacgaagcactgattgatggaaacctggctacagaagcaaacctaatcattttagatacattagagattgttgttcaggtaagaatgcaaagaagagaaatttaaaatacggatttggtaaattgaggttggagggaaaagtgtttactgtgagccataaaattacattttattaaatatt

SEQ ID NO: 1671 - DNA, 2300 bp, Homo sapien
atcagattttcagatatgcataggacactttttgtgttctttattctgtttcatttgactgccaaaaatatgccaaaatcaaattgtcctaattattttagttttttagtaactgcagatatctggcagaacacattcatctccctgctccccacatcccaccttgttcttcttcaagagtatcttggctctctgcttttcccccattaaatttaaaaatcattggtcaaagttccaggaaaacctgactgggattttgattagaattgcactgatcctatagaacaatttgatggaaaactgacatctttacattactgagtctttttcatgtttgtcttaattcttcccagagatgtcactgtgttactggcaatttatgtgggaatataagagatgtcagcatatgcctgtttgtcaagatgagaataattttttattgtatttctaaaaaataggtacttgaaaattcagtcagtgctgtgtatttatgcatatctgaaagttcggctataaaaagtgtctgtctttaaaataaaggagcattttccttatgagaacaattgtggatttagggatcagggtcaaagttcttttgtgcccagctcagaagcagtatagcaaaatagttaagcaagcttatgtgggtgaattcacttatatgcatgggcagccatgagaggcagtaaacaaagtggatatgagcttggagcttgtgtctcgggagccacactttctgtgttgaaactgttgtcccgcctcttattacaaaatacttctggtggtcaggtttttttttttttttttctgtaagatgaggtgagtaataatacttatttctttgagtgattgtgaaggataaataacttaatacacataaagcatttggtcattaattatcatccactatagaaggaagattggtgaggtagttgagatcatgacttcaacagttgtgtatgttcagctttcctatgtctttcctctcaacatcccctctacttcttcctcatttttagttagtatatttgtcagccgagtattagaacattgtataatagtgaagagtatgggctttggagtctggttaacctagactaaaatcctagctttaccctttcttggtatagtaaggcaaattactctctagccttcagttttcttgcctgtaaactaataataataatagttaatgttatagtttacagttgttgtgagagctaaataaaacatgattagcatagtttcttgcacatttcaaattttattttttgccatcatcattattattattattatcatctgtatttttatctgtaaaattgggatgatacgacctgcttggcaatactgttggaggactaaatcaaataatgtatgtaaaatgtttagtatgatgactgaaacagagtgtatgtccaataagtggtactgtaaatgtgtttttattttttcatttctgttttacatactatatactaatatagattgatgattgaaaatagcatttcaaccttatatgctataagtagaaatagctttttacttctatatagcctaagacttttcctttttgtatcagtggtgcttgattaaaaacaatagtcttctaagtctgacatacatgattttgtcattactttctactcttagcccactcttatttactgtgagtcagttgcttttttcctttattttcattatatctgatattctgtgatatatatcttttagtttttaatggtagaatcttttagtttttatctttatgttttttattaacatttatttatcccctgctggcagtcatgcagtagattaaaacaaacttctgttatcaggaaaggttcattaaacttcaggctcttaaccttaaggttatatatgatccttttgtacaagtgttgtctgaatcaaatggtttttaattatattatttttaagcaacttttgttttattgtttttagaagaaaacagttgatagccaaaaaacaagaaatggtctttgatcaatctgtctcattctactgctctttattttcagagtggcaggcaacacactaccttttcagcagaatcaagtcgaagccttttgatctgtctactttgggttctcaaaaatgcagatgaaacagttctacagaagtggtttacagatctctcagtcttgcagctaaaccggctattagatctgctttatctctgtgtgtcttgctttgagtataaagtaagtggtcattgtaccattgcaaagaacaagaaaggagaaacataatgtggaaaaaatagaagaaaattt

SEQ ID NO: 1672 - DNA, 2300 bp, Homo sapien
aactctaaaaaggcaagttctgttattatacccattttgcaggttagaaaaacagaaacacagaaaggtcactgagtaaaaagtggcagagccaggttttgaaccaaggctttattttagagcccaagttctttttttttttttttttttgagacagagtcttgctgtttctcccaggctggagtgcagtggtgcgatctcggctcactgcaacttccgcctctggggttcaagcgattctcctgcttcagcctcctgagtagctgggactacagacgtgcgccactatgcccagctaatttttgtatttttagtagagacggggtttcaccatgttggttgtccaggatggtctcaatctcttgacctcttgatctgccggcctcggcctctcaaaagtgctgggattacaggcatgaaccaccgctcccggccgagcccaagttcttaaccactgttttatattcctttcatagacttaatgcacatgtgaatgaattcacctaaataaacttactaattaagatgttttcacaaattgagttctcttgaagcagacaccaagaatgagtttcaaatgcaagatgtgttttagagatcaatacctgtgaaaggaagtgggggatgaagcataattgaacagagaaagaagtcaaactgcagtggaggcatgacaaagccctgcttaactctcttgtatccagaaaccccaaaggaaaccagatgaaaattgatgggtttttcagtgggtggcacttgacttcaacagctagtaggttctctgtagatgaaaaagtgttattgtagcagttaatatgtatgtcctcttttataaattgagatgaagagattttgtggttttagtatcagagaagcctatattttcctttgtccagtgaaatactcgttctactgtattattcctgaggcaaggaggctactttttttaagctcttaatttctaaagtgaaagttagttaatcttaatacttcttaattttgttttcaatatatttaattcctgaataggattctgtaggtgatatctcatatgcgtgatttaaaaaacaaaatttaaacttcagctagaaagactagaaaacatcaaagagtacccacaacttttcattttatctctgtaaaaaaatcttctggatcagcctatttttccacaaactcttcagtctggctagcatgcccttaatctaatggatgaggctggcctttttctttctttccctgtcctctgccaaagatgtagctacacaaagacagattaatcataaatatggttgctaacacccttaaggaaacatatttgtttatatctaattccttactgaacatctctttcagccaggaaatgctcatagaatttcttctgttatcttgttgcccactttctcagctagctatgtaattttcagattctttcagataacagagacatcactcttttttgaaaggctaagaagagttttatattcttattaggagaagatttcgccatagagaaatgtgaaatctattgttgcactaagaaaccccacatgagtcctgaatatggactgtatcttggagaatgctataatattttgaagtattaagatgttaaaaaaaaaactcagacaacaaaatgatggtaattttccagagatagtatattctgtgaaaaacaattgtactggtgtttcgaatttctctggaaaccaatagccttgactatgaatatttctcttgtactttggggtaagtgcatactatgtcatttggatttagttgcttcttttttccatcagagtgtggtattgaaaagtggctaagagaataaaggggaaaatatgtaggaaagtatatgtgaaaaaagaaatgtaaaataattaaattttcaatgattaatttctataataaagtaattaacttaataaagcaatctcatcatagtttcctgtcccaaaagtctgaaaagttgctttgtcttcagtgttagtaatataaaataaactaccctgggaaaaagtatttcatttcttatattgctctgtctgtaggatgctttgttgcactgctgttatagtcttgttctgcctcactttccaacagagttctggattttctacgaatgtacaagaccaaaagattgcaaatatgtttgaattatccgtgcctttccgccaacagcattatttggcaggacttgtgttaacagagctggctgtcattttagaccctgatgctgaagggtgagtacactagtttttaccttgtagaatatgagtttgattttgaacagtggacag

SEQ ID NO: 1673 - DNA, 2300 bp, Homo sapien
tactggtaacataatcatattttgtatgttattcatattatatactgtgttcttagaataagctagcgaaaagaaaatgttattaagaaaattataaggaagttaaaatatatttgctcttcattaattggaagtggatcatcataaatgtctccatcctcattgtcttcacattgaataggctgaagaggaggggttggttttgctgtctcaggagtggcagaggtgggagaaaacctacatataagtggactcatgcagttcaaacccatgctgttcaagggtcacctgtacatataaacttgtatatgtaaacacacacatatgtaaacaaaggcaacaaacattacaaacatttatcaagtgggcacaatatgccagtactgccctgtggcctaggtattactaaggcacagagaagttaagtaacttgtcttagaatgcacagcttgtaggtagcaggactgtaattaaaactcaggcatttcagcacttgggaccgtcttcttcaccttcgtcttcagcctctataaagctgaaatcactgaaactttttcttccaaaaaagaagtatgtaaaaaaatataaaacaaaacaacaaaaaagagaaaaggatcttccagagtatgtcatagggtggtcctcagcattgaatgttacctatattatgggtaagaaaacatttcttctagagatttaataatctacagaaaaaataaatcagggactatatataagtgacaattcatttttttcctagaaaataaaccttaaattcgtaattcatgtacatctctgctcctgtaaggtaaaaattgtaattttcaccgttttttagtagtcttacatatatgttcaggtttctaaaatacaaaatagtcaaaagactgcaatttaaaacttggctgtgctctatattaagtttaggactttagcttcaatttccctgaatttaaagtttaaaattctttgttaccattaccacagtgttataataaagaatctgcacaatattcagtacaaatacaatacaatatagtcctcatatttattgtattcccactatatgctatcatctgtgtattagctactgaggacactatagtgaagacagggtttctaacctttcaaagcttagaatttgggagctttggaatggcaaaattattgagtcttggaaaaatttaattaaactttttttggctggatgtgatagattacatgcctgtaatcccaacattttgagaggccgaggcagaggaaacacttgaggccaggagtttgagaccagcctgggcaacacagccagaccctgtctctataaaatttttaaaattagctgggcatggtagtgtgcacctgtagtcctagctactcaggaggctgaggcaggcaaatcacatgagcccaggagttggaggctgcagtgagctgtgatcatgccactgtactccagcctgtgtgacagagtgagaccctgtttttttattggaaaaaaaaaaaaaatttaaaggttgaaatttttttttgttgacatacacagaatttttttgtcctattgttagctagcataattttctgaaagtaatatggtggtttttttattttattttaagcaaatacaaaacattgtagggaactttaaaaaatatttgagaagctaaaaatatttcagtcatctattaaattacatgccatattttaaaaatagtccaagtgtttagagttgttgtaattgttaaatatattcataggaaattaataatttatatctttttttcaggtaaagagcatggtgcaccatttatactttaatgataaacttgaggctccaaggaaaagtcgttttccagaacgtttcatggatgacattgcagctcttgtcagcacgattgctagtgatatagtttcacgatttcagaaggtaatgataactttttccccacttatctctctttcaagctcagattaagctatcatactttaatttgtttttgttttatattctgtttcacaggacacagaaatggttgagagactcaatacaagccttgcattctttctcaatgatctgttgtctgttatggacagaggatttgtttttagccttataaagtcctgctataaacaggtaatgcatagttaggaataattagtaatcaaataatttaaatactatgttagttcttttcaaagttagagctaagagaccttaagagcacatttatatactgatgttaaaacaaaaagtagccaaagtaacatatttttattagcaaggcaaaagtaaattacacatg

SEQ ID NO: 1674 - DNA, 2300 bp, Homo sapien
aaataacacattatcctttataaagtgatcttcctgaaaaaaattctaacctaaatatgactaaggcgctagattcaattctcaatttacaaaaaccacagaagaacatctcaaatgacactacaggggtgcaatcagtaaaatctaggctctggaaaatctacagagaaacttcactttcttcaacaaataaatcacaaggctagaaaagatgggggatcttataaatgaaaagacttccccacagacagctaggtacctattttttcctcctatagggcttttgcatgcctgtcttgtaacactgtgttgttttgaagtggtctgtgtataggcatttttatcccattatactatgttcctcaagaccagggaatgacttcttaatcttcctatttatttttctagtgcccaacacaatgcctgacatttgttggagcaatcagcaaatgttttctttataaattttactggatgatttcagtggttggtcagtcatagtcatctttgatcttaagttttttagactagcaagctgaccagtcataacagttctgtatttgccttttatatgttttgactattttgagcacaactgattcttcttctttttttagtacttctagttggtgtgcttattgtcaaagacattcccatcctctggcatggcaattactttattgctttttctaattgtaaagatcatatattttcactgtaaaattgtaaagtataaaaaaagaaaaccattactattaactaaaacacactcaagcccagccatcattattagtttttagaaatataattttatccactctgtctctctaccttcccccacacccccacacagagttttccacaaatagggtaatgttactatacatcctgctctggaacctgcttcttcctcactgtatatcccattcaacatgctaggtatctctttccacatcaataaatatggctgtacattgtttggggatacatgatattccttcttattaaggtatcttaattaaccaactcagtactgataaacgttgtgtttctttataattttgtgtaatcattctcttatcaaaaatgttgtaatgaattactttgaacacaatcatttgcacatgtgtacagttttctccttaggttagaggtgtgtttgttgggtcaaagtgttatgttcatttaaaatttctatattgccctaccactcttcagaaaatttagacctgttttcattgccccagcagttgattagcaaggttctattatactaaacgtcttgttcattggctctaaacgctagtcttcaggtaaagtaactcttgattcttttttttttttttttttttttttagctatttggtgtcttttcttgaattatttctcttctgtgtgttggcagcaaggactattaaagtttgtctatgatagagatgatgagctggacaagaattcaaataaatgcaaattaggatgttattgttttgtagtaactacctaactctattatatccatcatattgtaatgtgtttttgaaaaataatgtggaatattatacctcttaaattcttaatcacatttatacaaaagccacatttataaatgtcatcctatttatatgtgcttggaggaactaagataatattagaactatttttttaacttaataatgtgtcagtccatattcatttattccagaagcctcttgtagagtgaagataatgagttttgaagtctgactgacctttactctgatttcagctttgtcactcacttggttatatgcaaaaatcagttaacttttctgaatctcaatttatctgcaaaattgggacatgttttattgctgtgtatttgaatgattgctctcaggagtaaataaaacgtcacatgtgaaaatacttagcataattgctagccaatatcagtaattcagtatttggtcacttattttgtggtattttgtgagtgatacatagtgtttcttagatatgtatttactatcatctatactgttgctttcacagaaatcttctctacatataccctcagagtcttaattttgccaatcgtcaaggttctgctagaaatataacagtgaaagtccagtttatgtatggagaggatccaagcaatgccatgccggtaagaaatgttcttttacttttctaattttttgtattaagttcaaatagacttttttctttctctttggttggcaactgcaacctggaaattaatgtgatcttttaaaccaaatttctaactgcattactttctgtatagatagtaatga

SEQ ID NO: 1675 - DNA, 2300 bp, Homo sapien
tcactggagagatgagaaaacaggggttcagagatgtgaagtaatttgaccaaaggtcacaaagctgaagaatatgaaatccgggattctgattcaggcagtcttattccagaatcatgctcttaaccactatggaatactgcctctactgtaactattatacccaaaacccttaatcctaagtcatcaaaaggaagagcctctattttacacaatgaagaggcatttctaagaatagaaatttagggacgagcacagtggcttactcctttaatatcagcactttgagaggctgatatgggaggttcacttgaagtcaggagttcaaggtcagcttgggcaacatagtgaaacacagtctctacaaaatatttaaaaattagctgggtgtggtggcatgcatctatagtctcagctacttgggagacagagggaggaggcttgctcgagcccaggagttcgtggctatagtgagctatgatcatgccactgcactccagcctggacaacagagcaagaccctgtctctaaaaaagaaaagaaatttggaaatggtttattttgtattaacaatttataatttacactgaaatttattatgataaaacttttccctgtgttaaaaagctattaactttatgaaaaatttcttttaggtaaggttgattatatatacccacacacatacacaggttaaaagttagtttcatgtgacataataactagcattttgagcactacctgtttgcccagcactgttctaagtgctctacatgtattattgttaaattatcataacactatgaattatgtactataattaccccagctttacagatgaggagactaatccatggggaggttaagtaacttgtccaaggccagacagctagagccggcttttggacccacaccacagtctgactccagcacccatattcttaacaatttcaccatattaatatgtcaagattaagcagttttaaaggatgctattttctcacaaatttcttaatatgaacactcaataagaataatcactaatataagcatttagtatttttttaacactaagttggaagcatagtggaacatttatttttagaaatattattaattggctgggctcacgcttgtaatcggctgggctcatgcctgtaaattttgggaggccaaggtaaaagaattgcttgagcccagtatttccagaccagcatgggcaatacattaagacatcatctttaaaaaaaaaatgttattaatctcctctttttgttaaatgtatattatcaaaattgttactaagctaacaaacttcagaaaaacttatgatgggcaagctgcttgtgacattgaaggtatttaagattcaattctagtttggtcctagatgaccacatatccattgttccttcaacgagcacatggtaaagagcctagaacacagagacacagaacacagtggagaaaagggagtgaaatgtctttaatgacacttactatatatgggattttgtgacaatatacaaggatggttaagacatataaggtgatgcaaaaaaacatattaacaattatagtgacaaaaaatgaggagcatataattatacattgatttatacagagtaccagaggaacacagcattgagagccgtaacaccacctgagggagtggagaaaggcttcagagagaaagtgttttttggaatggatcactgtttccaaaagaactaaagtacagtttgagaaatgcatacttaattcattacttttttcccctcaactttaataataaatttacccaacaaaaaagtttatttttgacttgtaaatctcttaaaatcataaaaaagtaaaattagcttttaaaaacaggtagtcaccatagcattgaatgtgtagtttataatacagcaaagttaaatacaatttcaaattacctattaagttagttgctcatttctttgatttcatttagcattgatctaactcaatgtggaagaaggttacattcgtgcaagttaacacggcttaatgattaactatgttcacctaccaaccttaccttttctgggcaaatattggtatatatagagttaagaagtctaggtctgcttccagaagaaaacagttccacgttgcttgaaattgaaaatcaagataaaaatgttcacaattaagctccttctttttattgttcctctagttatttcctccagaattgatcaagacaattcatcatttgattctctatctccagagccaaaatcaagatttgctatgttagacgatgtaaaaat

SEQ ID NO: 1676 - DNA, 2300 bp, Homo sapien
gtttcaccttgttagccaggatggtctcgatctcctgacctcatgatccacccgcctcggcctcccaaagtgctgggattacaggcgtgagccaccgcgcccggccagtaataacattttttaatgacatcatcatcagaagtaagacctaattattttacaaaaaaaaaaaatttcctgtcatcataactccctgggagaaactaattactacaagtgtttgatgacaggtagtataggccctgtactatcctacgcacattacacaaattatgccacttaatgttcacaacaacactatgagctgggtcctattattattctcatttgccagacgaggaaacggaaatttggcccaacaacttggccaaagtcccaagctagaaaataccaatcaggatttgaacccatgtcggggtctgagagtagagcccatgctcttaaacacttgctattttgccccttcaggaaaaaaaaagtgctagaacgctggaaagaaagaaaaaaaaaagcctctgcctcgaaagcagctaggacgacaggtgcaacaccacacctggctaatttttttgcagagatggggtgggggggactcgctatgttgcccaggctggtcttgaactcctggcctcaagcgatcctcctgcctcggcctcccaaactgctgggattacaggcctgagccactgcatccggcccaaaatttttaaagaaatgtcagcaaactaaaaagactcagagccacagaactacaactgccccaaaacaaaaaaaggtaatttaatatgaatgcttcttttcttgggacatcataattcacacaaatatgattttattaaaacaaaaatgtctactgtctcatacataagtatactccacaaagaaattctacaaatattagagtcctctgtcatttaatttttatttggcgggtgggagaaaggtggcaaccaaccaccacaagtaggtgaaaggctttgaaacctccacctcaatcacttgctttacttcaagactgcaatcacttgctttacttcaagactgctaacatataaaaggatgtcagtgtataaagaacactgcctatcatccatcttctcgggtgctctgagaaacacaggcgcacagttaaattcacaggcgaactcagaacaagcttcagcctgcaatccgtcagggattcggcagctgcacaccgaaggtgcagcccgcagctctcaacttttcattctgtccacacgttttcaatcctggacgcacaagtccactttgaacctggcccgagggtgcaaagagggttcctgtcagatttctcaggaagagagagacgcgtgaaggaggggcggcctcccacccgccccgagccgccgcgcgtttctccttttgttggggtggaggagggcggaccccgcaccctctaggggccaagaggggtgggcggagagacgggagggggcgaaacgccgcggcggcccccgacgagcccgggggtgggaacacaaagaatttgggaagcggccgaccgcccttccataaacctccgcagaagtccaggcccgggccgccgaggagcaggaggaggcgggcgcgctggagtccgcggccctctccgctccctgccgaggctcagcggcgggcgcgggctgaaggccggggttcgagggcggcgcgaggcctccgctaccccctcagccaccccgaaccccttccgccccgccgcgagccaggccgcgggatcccggtgccggccccgccacacccacccgcctcctaggccaggcctgggaggactccgcggctctttctcgggcggcggcggcggcgcgccccacgccggatatttacctgctgatcttctgggcgaaggcgcggcgctcggccatggctgctgcggcgacggcgacggcggcggcggctgcggcgggccgggtgcggaccggcgggcgcgtgcctcctcgctcgtgctccctccctcgcggcctccgccagtccgggctccggacctgggaggctggggctggcggccggagccaggaacgagccctgccgtaatgttccttagaggcgcgcaacgagaaaccgctcctcccccagcgcgtcaatcccggcgggaaccccggctgcggaaggcggctgcggccggcgggagccgaggggaagaatggagcgctgaggaagcgaggcgccagccccagccgcttcgctgccgcggagcctgcacgaccgagaggtcgcggagagaagccagagacaggccagcgacctggcgaggcaagaaaataagataaccgaacgcgtag

SEQ ID NO: 1677 - DNA, 2300 bp, Homo sapien
tcaaacacccaggacaagcttaagtataggatgaataatgacagtaacagtgataataataacaacagctgacacacatcgtacttaccatgaaccaggccctgttctaagaactttatattaatcaattcaataaatcttcacaacaccctttcaagtagatataattattttcctccttttagagatgaagttaagtagcttgcctaaggttacagagtaagaaagtggcaaaataagtctgggttcctatcacagagggtcttaaaagccaggtacagtgatagccttgacttacagtctgtgagtacctggttcatctttcccaatggactcaaacattctgagagcaggtctgtgtctagttcaccttcgtgttttttagaacacctaggtgggctctatacttaggtagaagccaaatatctgtcctctttgaatagactatcttttcctttagtaaacaagcatctgaaaacagtgtgttactggagggcgccttggcaagagcctgtggtactagctactcctccagaggctgaggcaagaggattgcttgagcctaggagttttaggctgcagtgccctatgcattccatgcttgagcaacacagggggattctgtctaaaataaataaatcaataaataaaagcagtgtgttactgcaatgagcattgttatataaatacacagtcttccacagaagttacagcactagacaggaagttatggatctgactaattgaggctttcacctctgactcagtgtgtgactctggcaagtgacctaatggctccaagctacagattttccaatggtaaaagagaggaaaacaggtatccaacatattccaccaggacatactgagaatataataataacaataaataaatacacattttaagttcttgcaatacttaagaggaaaggtactacaagaaaccaagatatttttcttagtgtcaccataatttcagtatcaacagatatgcattaggagccaaatattctagacattatgggattacaacagaacagatgaaaacaaatctctgctagtctctgttttataggctattatggacaaggtcagtttcagtggtcaacacagagcttatttaacagaacatcaaaatgggggtgaacgttagagctcacctggattttatatatatatatatatatatatatatatatatatatatatatatatatatgtatgtatgagagacagagagagatccaaaaggggttaataatacggaaacaactgtcctcaaagaaaagaaccggctctgggtttgagtctcagtggaagagtttaccatctgtgcgacctggggccagtcacttagcttttccaagccaatttccttccctctaaaatagtgatagtaacgatctacttcaaagcgctcgtgcttgaaaaactttaatccagtggctggctaagcaccagaagtcaactattactattgttatcgctgcaggagcaaggtattttctggctctttctctataagaaaaaccactgtttctccagttaggctgcattcatgaggccgaagcagaaacccaagtgctttaaaaagctcggagaccggtgctgcagaaacatgaacccagtcatccagggctttggttaaagcacagccccctcggcaaagcccacctttcatttccttcccttccatttcgggaaagccaagctccccctacgcgttcggttatcttattttcttgcctcgccaggtcgctggcctgtctctggcttctctccgcgacctctcggtcgtgcaggctccgcggcagcgaagcggctggggctggcgcctcgcttcctcagcgctccattcttcccctcggctcccgccggccgcagccgccttccgcagccggggttcccgccgggattgacgcgctgggggaggagcggtttctcgttgcgcgcctctaaggaacattacggcagggctcgttcctggctccggccgccagccccagcctcccaggtccggagcccggactggcggaggccgcgagggagggagcacgagcgaggaggcacgcgcccgccggtccgcacccggcccgccgcagccgccgccgccgtcgccgtcgccgcagcagccatggccgagcgccgcgccttcgcccagaagatcagcaggtaaatatccggcgtggggcgcgccgccgccgccgcccgagaaagagccgcggagtcctcccaggcctggcctaggaggcgggtgggtgtggcggggccggcaccgggatcccgcggcctggctcgcg

SEQ ID NO: 1678 - DNA, 2300 bp, Homo sapien
attcctcgagaattataaatttcctttcataatgttaaaatacattggttgtttcttattttcattcattttgtgacaacatccttcttggaggtctctgttaaccctgcccccaacgtgaacagattgctttctagaaatgttttgcaggtgtcactctaggatctcctgcatgctcctcctgaggagtcagttctcctgcttctgttggagtccctattttctggatcctctttcttttatgtttggccttcttgctttgtgcttccattctccagtaattcccaagaaagagtacatgttgggtataattttaagaacacagacatctgtaaatgtctttcttctacacttgaattaaagcttggctacatttagaattctaggttgaaaccattttccttggaatactgaagatattgctccattgtcttctcacctgaaacattgcaaactgatggtgtgtgaaagaaagcctcagccttaatgggtatgtaagactagagagcattaattgccattcctgttacaaatatgatcacacgcgtaagtattataaagccaaactatagggaattgtggacaattgtaataggggaattcagtctcatctggggtttgtggaggctttccatacagaagcttacagtttagccagagaagccgataagcagatcattttaatgcaaaggtggtaggtaggaatgatatgctaagaacgcgtaggaggggcattgaaagcgcagcccggatggatgtggtgtggaaggggttagtgaaggatacagaacaataatcaattgtttcagagaggttttgaaccttgacatgctaggttgaaagttttgagacaaatgtttttgactgtcaaaataatatctgagtttgcattattttattttatttatttttgagacggagttttgctcttggtctcctaggctggagtgctatggcgcgatctcggctcactgcaacctctgcctcccgggttcaagaaattctcatgcctcagcctcccgagaagctgtgattacagggacctgcaaccatgcctggctaattttttcgtatttttaatagagacaaggtttcatcgtcttggccaggctggtcttgaactcctgacctcaggtgatccacccacctcagcctcccaaagtgctgggattacaggcgtgagccaccacgcccagccttatttatttgtttttgagacaggatcttgttctgtcacccaggttggaatgcagtggtatcttggcttcctgcagcttctgcctcctaggctcaagggatcctcccacctcagccttctgagtagctgggaccacaagtacttgccaccatgaccagctacttttttaaattttttttagcaacgaggtctcactttgttacccaggctggtctcaaactcctgggctcaagctatccagctgccttgacctcccaaaatgctgggattacaggcatgaaccaccatgcctggtggttttaatattttaataatctctttatagatttggtaaagagaggggaaaataggccaaataatagcaattttttgtttgtttgttttttgagagggagtctaactttgtcacccaggctagagtgcagtggtgccatctctgctcactgcaacctctgcctcccaggttcaactgattctcctgcctcagcctcctgagtagctggattacaggcacctgccaccacgcctggctaatttttgaatttttagtagagacggggtttcaccatgttggtcaggctggtctcgaactccttacctcaagtgatcccctgcctcggcctcccagagtgctggcctgggattacaggtgtgagccaccgctcccggcctaatagtaatgttttaaaataacaggtgtggaaaaatctctatttactcaggcctgagaatatttcttgcaagtcatattcccttttttttgccttagagatataagaaattaggagaaatcagggggtatcaaataccctcatactcttttcctaggaaaaaaaaatttaaagaatgtattgcaactttgctcacttatatttctttcaatgggaatattgttcatcaataaatgctcggtgctttaaatttgcaattaccatatttgcagaaacttgaaaaatcatcccaattaaatgacaaaatgtataggaggattatctttcttttgcccttacaactcaaattatattcgaagtaacatttttacagcagtcaaaacttttaaccaaaaattcacacctgcagtctcataagtttaacaaaatgg

SEQ ID NO: 1679 - DNA, 2300 bp, Homo sapien
gtttgtatgacagctgatgccatgtcagtgttgcagaatatagtttcctcctgtgatttctgtgtgaagttgtaaaaaggaaaggtactctactcctttttttctaaccaattaaaatttgttgtggcaaatctacagaaaacccaagtctgtagtatacacacaatttacttttgtatatatagttattttaagaatccaagcattgtttctcatggcctgttaatgcacaataccaaaaataaaatacatgcattcttgtaatccaggtctttatgaaagttacaaaaaggcatctaaacagcttgttagatgcatgctctctctcctaaaaaaaatcaaaacagagtttggggatttcgaaacaggaaaccacaagctatggaatcatgcaagaaaactactttgctcactctaataagtgtgccatttgtgatcttatcatatcctttgtttgttgttttgttatttagctgtccaagtacatgaataaaaaataaatagatccagctacctgtttctgtgagaataaaaaaaaatttaaaccaccaaatccactaaaaaattgaaaaaatttcaagtttaattttgaacttttcaactcttcattcttgaaggttttcattcccatgtggtttcatagtccggtggcatagacttcatattttatttttagtttttagtataatttcctatgtaattcagaagcatgtctggtagtccttgctccaacaaaatctgcggtactgtaaaacggcataggattacattttacagtaacagtatttctcttgacatcatttaggagtgaagataaaaatttccacttatttatttatttatttatttatttttacttttttgagacagggtcttgctctgtcgcccaggctggagtgcagaggcacaatcttggctcactgaaaactccgcctcccgagttcaagcgattctcccgcctcagcctcctgagtagttgggactacaggcgcgcgccaccgcacccggctaattttttatatttttagtagagacgggatttcaccatgttggccaggctggtctggaactcctgggctcaagtgatccgcccgcctcggcctcccaaaatgctgggattacaggcgtcagccgccgcgcctggccaaaaatttccacgttataaaaagcatcttcggaccgtccttttttctttctttctttttcttttccttcttttttttttttttttccccacaaagcctcgctctgtcgcccaggctggagtgcagtggcgcgatctctgctcactgcaacctttgcctcccgggttcaagcaattctcctgcctcaggctcccgagtagctggaattacaggcgcccgccgccacgcccggctaattttttaattttttaacagagacgggctttcaccatgttggccaggttggtctcgaactcccaacctcaagcgatccacccgcctcggcctcccaaagtgctgggattacagacgcgaaccaccgcgcccgactgtcctgtgttttaatgcttgaaaataatctgaatatggaaaatgagtgcacatatcccttgatgttttataaataacctacagtcctaataatggcttggcttagagttccttcacaacaggaaaagaaggcatcctggctttttttttttttttttttttaaatcaaagtgaggcttgggttggctctatcttggtcctgagtgcgaggaaggagggccgcaatgcatgctggatcttgcagttcctacgccagaggcaagggcgtgatgctgcatggcctgctggtagttgaagtccaagtgctcgagaggaatttatggcagccgtaatgtggtttgtctatcagagagacaatgctcacagacggatactttctcttggttctgcgcttgctgcattggtggattagcggcttggggtggcgaacaggtgggaaaaagggatggataaagtaagcatagcagaggcctttacgccgctgctatcgctactgccaatcgcaaggctttcgtatcccggaagtggctgatctgttggatttgacgcggaggcggttcctcttactacggtggccggggtgctcaaagtacctgtagctgcggcgctgaggtcggaacgtctgcgtgtgtgcgggctggttttgtggcggctgctgctagagctggagcatttgccgggttggtggctcctgcacatttttacagttctccagtccttctctttcggtgagggatcggcttgaggctaaaggagtcaagaagtttgggacttagcgtctctggt

SEQ ID NO: 1680 - DNA, 2300 bp, Homo sapien
acttcccaggagagatttaaaaaggaagatggcagccagctgcctcacctgctcaaatgtttgaaatgtttcaaccaaaggagaatggaatgaaaccccttcggttcctctggagcgggcagagtacatggtaccccgctgggaaagccacctggacgcggtgggaatgaggggtgcggggagtggggatctaggttctagcaacaggaggcaagaagaatggagtccggatcgataggaaggaaattgagacgtctccaggggaggggagatttagtgtgtgcgtccagtggggggatgggggggaagaaatggatagaaaaatttatgatggagaaagggaaattaattacagctcattttgggttcttaggtggtcaacactggaggaggggcacggttagagtgcggaaggcgggaattgcccacctacccctcaccaggcccaagtgaacccatatgcctcttttctcctcttttaagtcagagacagtgccagtggcttgaataagtcgttggcgcgatgtgagatagaatcatcatgcccgcgcgcgggtgcacttttcttacaatacggggagttgggaccaggttccgcggagtgaagggcgcgtcccccaccaagagtagttactctttgtccaagagggagcaaaacgtgggtgggactattagaaaaattcccctcctttctccccaacacccccgcgcccgcaacaatcaaagtctgctgcttcttgaaaatcttcatagatttgttaaactattaccggcctctttgtctggatggccgccaccaaggaaggtgggaaagggcagaggtggtacccaaggccccaacccacccagattacttccatttcccaaagcgggggattttcaactctcttacccaccactacccccttgtatacctctccggatcttttcggggtggaaaaaaagaggctattttaatgttcttgtttggatttgcatctcaaaacttcatttattttcaagatgtctgccactcagggtccacgccaaggcgtgcctgtaaatggcgagagaccaaaaggaaaggaggagagaaagaggaagagagagaggatggtttcgaatttatttatattggaaatatataaacatccattctgtaaaaggcaacacgtttaattaacgatgagagagcagttaggggcagaaagctagtaaaattgtgtgataaatttatggcattgttagcgtgcttttaattatggctattatgttaattatttcacattagcatggagttatcagcagcatgtcggatttaataaaaacgagcctttctctcgaaaattgttcttttcatccacgaggagaaaggtcctggacaggatcggggcttaaaaatgacttggcattgaaagccggagtctttctgacaccgtttggagcgatgcggccaggcccggctgtccgctgggtccctccaggctaccggcagctcgaggaggagcccagggctgggtttttaggaattcaccattttcacccccttcggagccgacacttcatcatgcgagatcattctgtcaaacaatatgatgctgctcatttttatctgtcccgctttacaaaatccccattcagccggccgaggagcaacaaaagcctctgagcagctccgcagccactggcggccacagcctccccggcgcgcgagaaaggcgagaggggccgaggaaagcaggcggcgggcgcgcgcccctctccgccggagggaacgctgcctgccggggcctgccagcccaggtgtcgggtcctcgggtgtggcccgggcgggacacgcctccctcaggcccgcgcccgccctcggcctccctgcaggcgccgggcgaaagcccccaatccctcccctcaagcgactcgcccacccaggccacatcgattctttaatcaccgccgatcgatttattgggagcaaataaatagaccgttttggaaacgtttcaattgctggcttgacggttggggcgctgacgcgggagggcgggcagggccgtggggcgcgcgcgggaagggacttgtgggaaggaagggagcggaaaggccgagcgccacccgccccgggagtctccagagcagcgcgcggggcagacctcctcgggtcctccggcgcttcggtctccggagacgcccggcctcctgaagggttcggcttgtcctcctctggcgctcagctccctctggcggccgggctggcaggacctcagcgcccagcccttccgtcttgttacgtccaggcaagttggcctggctttcggatgcct

SEQ ID NO: 1681 - DNA, 2300 bp, Homo sapien
tggggaaacagactgagggaatcagaagcaccactgtccatccggaattaaatccacatcccagcatcttctgcaaatatttcactaattatttcctctcggaactcctcccctcgtgctccttcctctggtgaggccggcgctcccctcccaggccgcagcggacagacagggattgggttccgtgtgcctgccacaccaggcaggctcttgcggctcccaactaggcggcctaaatgagggaggaaagaggaggcgcatcgctgattcaccgcgtcaagagcactgactttccttggaggtgtgaggtccacgcaccccagccacgcacttgggggtcggtttgcggtgcctccccctccagtcccagtgaaatccccacagtttttcctactatcactgacttgccttgcactccgcgtgcattggccacacatcctcgcctcctccacccgctccgccgccggttttcttggaagttaaatcttggaggatttgtccacaccttaagagaagaaaatccacgttagctggcagcaacggagatcccagcatgctggcatgcccaagtctgcccaggttcccccaaggccatgcccgccgcccgggaagtcactgcccgcacccctcacgtttcttcagccgcccctgggcgctgcgtctaacctgaagacaccaggcctcttcccggatccactcgacttacccaggccgctgccaatcccagctccttccccagcgcctcatttccgattttttcatatgctaagtcgtttaacaactccaagtagccagttatggcttctttatttataggttccctgctattttacgtcgtttttatttctctcggcaactattctagtagattaatcaatagccattttctgaccttcgggaaccccagctgatgctttttgtggccgcacgaaaaaatacatacaggaaaacacgcccgcatcaagccgggaaagagcaggtaggacctgagtggtttggttgggggagggggaaaaagacatctcagcaggtgtcttccccggaatgagcactgaggccagaggggaatctgaaatctaattagcaggagggagccgggtgcgctgctcttactctttaaagctaaaaacaatgaaacaaaaagcaaaacagagactaagttttgctttttaaaacacgatatgggaacctcgttctaggtcgcccagtccctgtctaaggagtgtgacaaagtgggggggagaagggcggaagggagagggggcggggaaggcagggcagcgacagtcgcacagtcccgcggacgctcccaggcccacgccctgactcgctcacacccacccacactcacacccacccgctccctgggccccagggcccggatccagcctgggtgggggggtctccgggcgggccgcagcgccctccgtgccccggggatgctggcgcacagtgcggagcggagttgcgcgtctctcgtccctttgttgacaattccctgaaccaacttgagtttggccggctcggccgcggccctgacgtcacgcacggtcacgtggccccgcctcccgctggatctttaagtagaaagtaatctatcaggccagtccttaaaacgggactttcgactaccggggcttcggcgtccctgacacccagccccctgcccccccgctactgtccctgcccgcgccctcccgagctgctcggcgcccggcgtcccgcgcccgcctggaccgctcctgcgccccacgccagggccagaggccgaggaaggcgggctaagtgagggggcgcggcgtggagaaccgccggggccgggagcggtagcgagcgcctagtaccgagcgccagggacggcaggagttcgcggagcgcggccgctgggggcggacggcagagcccgcgccacgcgatgcggggccgccgagtgtgagctgagcccagcgggccccaagccacctgcggccccctcccctctccctgccccccatctttcgggggcactcaaaccctcttcccctgagctccgtggcagcccccgaacaccctcatcgcccgctgccccctccccgccgccgctaccaaccccgaggagggatgaccctctccggcggcggcagcgccagcgacatgtccggccagacggtgctgacggccgaggacgtggacatcgatgtggtgggcgagggcgacgacgggctggaagagaaggacagcgacgcaggttgcgatagccccgcggggccgccggagctgcgcctggacgaggcggacgaggtgcccccggcggcacccca

SEQ ID NO: 1682 - DNA, 2300 bp, Homo sapien
cataactgacacctgagtattacaactttcttgtctttatgttaccgtgaactcaatacaatgaaccatctttccctccaagccagattattctccaggcttcccaagatctatcagttcttgggaactgtaatgcacacttgaaaccttgggagccatccttgattcttccctctcctttgtttcacttgtacatatctagtatgctattaagacctgtacacgaggccaggtgcagcagctcacgcctgtaatcccagcactttgggaggccgaggcaggcagatcacctgaggtcaggagttcgagactagcctgaccaacacagagaaaccctatgtctactaaacatacaaaattagccaggtgtggtggtgcatgcctgtaatcccagctactcgggaggctgaggcaggagaattgcttgaacccgggaggtggaggttgtggtgagccgagatcgtgccattgctccccagcctgggcaacaagagaacaagagcgaaactgcgtctcagaaaaaaaaaaaaaagacctgtacatgtttcttcttgcattgatctctccctttgcagttccactattgccatctcagtccaagcccttgtctaatcatgcgtggactgctatagtctccctctgattcatctgatccattttcaccactttaagttttctctaacactgtaactgtactgtatacttgactccctgctaaaagtcatttaatagccccttactgatcactggatacattccagacaccatagcctggtattcaaggctctctacaattaccagtcctttccagcttcatcacccaccacctaaactagaggaaatgttctacacttttcagctgccacaatatttggcttgaaccatttcctttgtctagattcttactctcattctctgggcttatccagccaggctttccttcaaagctcagctgactcctccaggaaaagcatttcctgatggtttgcagtttacagtgaaccctcttctcctaactcctacagtgcttagtgcatatgtaagtaatgtaacatttagtatgtgtttccttctatagctttttatccttttatgcataaaaatgtctttccaatgagaattaaatgccttgagggcagggacctgccatatttctccatattcccagtgctgatggtcttttagatataatcatattttagacctggaagttcacctagccctactgatttctttcacagttgaagaaactgaggcccagagagaagttattcagactcagtagaaagccatagtcctagccaaatatttgctaacacttacaaattataggggttggcttacgtagaatggcaagattcagaagtggggaatgagggcactctctgaacaaaggaaggcaagtaaaaatcatcacagccgtccatgcgtgattggacagaagcctagactgagatggaaatagtggaactggaaaggaagggatcaatgcaaaaggaaaagtgtgcaggtcttactaacttactagataggtatttttggcaagtttgggaccaggtgattcaagctgcccgctggggcacgtgtagtggctactcgagggcagggctgtccttttgcacaacgcacaggctctcgcaaatggttggatgttcaatgtttcttactttagggggctgcccagtcttcttcttcgcaggcatgtggctagaagaaagtgaagcaggttggctttctggctcctcgagggcacaggcccagaggtggtgaggaccggccaaggctctctgctcagtgcagcaagccagggcccgcccctgacaggaatccgttggctaagcagccgctccggccttggccacgatcccaggaaagaagagcaaggggctttccacctgcccctagcctaacccggggctggggacctctcgggttccatcggctcttgccccgcctcctaagccggccgcctcctgtccaggccaggttgcccgcccctcccctcacgctcgacgggctcgctcccgcaccgggcgcgcgggtggtgcgcgggcacacggaggcggaaggccggaggggcagtccgccgcgggggcgagcgcgcatgcgccttcctgggacccacggcaggcgcgaatcccagcggccggcgggcggcggggtaagagcatgggatcccggaggttccggaccccaggccagtgtggggaggtgccgggggctcggacgcgccacgagccggcgcagagctggcgacccgtctcccagctccgctccactcccagggacgcgacgcgagg

SEQ ID NO: 1683 - DNA, 2300 bp, Homo sapien
aatgatggagattctctactaacatgccattacgttttatgcattacttaactgttgatttagtcttaaatcactttgctaaaacttagaaaattagcaaagtaattgctagtttcacatatatattagctatatatgtgagatgttaacctcaactttaaggttgtgtatttattaccagaatatacttatctaaaagcctaatataacatcttgtgtgcatatgttaggaagacagttgtcaaaaaggtccacttttaggcctgacacagtggctaactcctatagtcccagcacattgggaggctgaggtggaaggatcacttaagcccaggacttcaagaccaggctgggcaacacagggagacactgtctttacaaaataaaaaaattaggcatggtggcatgtgggagcccaggaggtagaggctgcagtgagctgtgatcacagcactgcactccagcctgggcaacagagccagactctgcctcaaaaaaagaaaaaaaaagttccacttttcatagttttttggttccccactcctatacacagatacacacagttcaggaggtattaccacttgtttggcaaatacacctctgttttcactgtattcttagggattttgtgtgtgtgattgtgtgacattatctttgcagctttgtttatttgagaactggatgatttttctaatgcaagagtagggaaacaagtctctttgcttaattctggggaaaggaaaacctcctcaataatccataacttttaagggcatcagtaaaacatgcatttattggcagctgtgttgaacaccctattaggtgatgggtttctttatctgtaaagataatagcagcccccatcccctaaagtattttaggattcaatgaaaaaacgtagataaattgattaatacagcacccacattgtaattcaagattcaataaatataggttatcatttctgtacagctttcccctttcatgtcaattcctatttgatacaaaaatttccccagctgtgttactttgcattttacttaatcctgaaataaactaaggaacaggttacactagagggggtacctaaatcaacctgaggacaaggacggccaaggagaaattacaggtgtttgatatccaccccactcccccaacctttaatggcttttttaagtttctatagggtagcaactattttatgcatctcaatataggatggatgaaggatatgaaaaacagatgaatcttatctagcacaatgcctattcccactatggtcattctcaataatcagattattggtcatagatgggaatttagagatcatgcagtacaaacttatttgtgtaagtaaaaaaaaacgaagctcagggtcgataagtgacttgcccaacagtgaaagagtcttatctggaatccaggtatctagacccactcagtccatgagttctcccacgggtttacacgaacgcgccacattaatgaaggcaagggactgacaaactacgaaggcgtgttttcatctactctgtcccatcctgtgtgtcaaccttatttatgttatttcaagttagacatcacctaaatacagcccacagtttacgaaatctgtcaaaagcatcgtagaaacagaaagcgaaggaggactatcgtatgagtaccgctggaggagacgtagagttgagggtaccaagcgaagggaattgcctgtggacagaggagacaagttcatactccgaaaaaataggaaaacgagaaaggctactgggccacataatatcttctcttcttgcagagggcccccaaaacagcaatacctggggaggagatacctacggcattctgagattcgggaaagcaccactgccgctgaataaaacgaacccagcaacttccgaaaacagaaaatccgccaaaggaaacgccaaggcatgaaaagcgcgcgctggacgttgcgtcaagcccaccgcggccgggcggaaacatcctccccgcgacgaaggatccgggtgtgcgcgagcaaaggagcgagcggggagttctaggcccaggacagcacctatttcctgctggtgtaacagagcaccttctctcactactctggccataccacccccgcgatagaggagcaacacagctgtctctgtgcgctccggatcagcgcttcctagatttctagccggatcgtttggagaagggctctgcatcttatttccggtggcggtgaggtgcagttgccatggtgattagagaaaggccgagatctgtccagctgcggtgagaggaacgctgaatcg

SEQ ID NO: 1684 - DNA, 2300 bp, Homo sapien
tatgtatatatataattgttcaaatatgtgataatagccaaaagaacaaagatatacacaagagaagaatcactgaacaaaggaagagcacacatctattctctcaaaatacgaaagtcagatgacagtcttcatcaggtttttaagaggagcaaatcagttaatacatgtgaagcatatacaatattgcttgacacgtagtaagtgctaaataaactgcagataatgagaaactccagaataatgagaatcgggatatgagtggtagttgacacccatcttccacagcaggatcaacaagatcatttcattaacatctcaataatgcagccccacatttcaaatagctatattttaaaagtcttatttatagcattatcatagttttactgtgttcctttattaataacaatatttggggtttgtatagcacctctgtacataagagcttaaagaactgtcatacatcttgtcttatccctattacagcggtcaggtatttttttgtccgttttacagatgaggaaattgaggggtagcaatgtcacccagctagcagtaagtggcaaaaagccgtaaatttcacgaacagtttcttctttgttaatgtggatatagtactgaacaatggttactatggggtattagattctactggtggtctaacagcttccaatattactctacccagctttgacttctaaaaatagatctccaacctaataaattgaatatttcaagttcaataataagataacacaggtagggtccccttcaggactcattgcattcctactcaggaggcctaaatcacttgcaccttttcgaattatatagatcatttacacttgggaaagaaagataataattgcttatcatggatgaagtaccctatttataatacgcaggccgcctgcctgacactttcatattacaccagatttagaaggaccccacagggatgtggtgtcacagtctggttactgcaaattggtaatactataattaagcatcagagttctaaacacatatgtgtgcatgcatctcctcacaaatgtgaaagaaaactgtttcaagaagtaagggagaatgaatttcactttgcaataagcaattttaaaatataagtatattttaggatcgtcctcaaatattctttccaaacaaggcaactccctcacatggaaatcccaaggcagaaatgtgccagaattttattcttttcctttctgtgacgagaaaccaaactaaagcttaaataaacatataattgcaccccccgcaggcttggaaacctcccttacttaaaactccggcccgagactgagacaggggcctagagagtacattgcagcaaacggctccataaataaccagccacacaatagcaagaaaaataaactgttaacaagcgcctaaggcttctacagggccaagtgaaaacagaaagccgtccagtcaccgtccctacacagtgaaataccgtcacaggtaatctcgggcaccatctctctatttttgtattcctctggaaataaaaccgcatttacatgtacattttaggtacatacatggaccaaatgtttatgacagagaagtagacaaagcagaggaaggagaagcagctgcacagagagggacagagggagcgaagagacagagacagcgagctgtttgctacctaattctagctcacaaacaaggaagcgcagccaattctcttcggcgattcagcgttcctctcaccgcagctggacagatctcggcctttctctaatcaccatggcaactgcacctcaccgccaccggaaataagatgcagagcccttctccaaacgatccggctagaaatctaggaagcgctgatccggagcgcacagagacagctgtgttgctcctctatcgcgggggtggtatggccagagtagtgagagaaggtgctctgttacaccagcaggaaataggtgctgtcctgggcctagaactccccgctcgctcctttgctcgcgcacacccggatccttcgtcgcggggaggatgtttccgcccggccgcggtgggcttgacgcaacgtccagcgcgcgcttttcatgccttggcgtttcctttggcggattttctgttttcggaagttgctgggttcgttttattcagcggcagtggtgctttcccgaatctcagaatgccgtaggtatctcctccccaggtattgctgttttgggggccctctgcaagaagagaagatattatgtggcccagtagcctttctcgttttcctattttttcggagtatgaacttg

SEQ ID NO: 1685 - DNA, 2300 bp, Homo sapien
gatctcggctcactgcaacctctgcctccctggttcaagtgattctcctgcctcagcctcccgagtagctggaattacatgcactcatcatcatgcccagctaaattttgtatttttagtagagacagggtttcaccatgttggccagcctggtcttgaactcctgatctcatgatccacccacctcagcctcccaaagtgctgggattacagatgtgagccaccgtgcccagccaactttatttttcttacttcttctttaccttatatcttttcctaacttttcattattgaaatgctatctattcttcatgatataattcatcagttgcacactcagtttacatcagtcccccaaccccaatcaattagacagtaaatatttgttgagccaatgtgttaggcactattttaggaacttagattatagtaaattattttccatgtataattatctttttgtgttaaccatatattactgccaattataattggatttttttgagacggagtttccctcttgttgccaagctggagtacaatggcgcgatctcggctcactgcatcctctgcctcccaggttcacgcaattctcctgcctcagtctcctgagtagctgggattacaggcatgtgccaccacgcccggctaattttgtatttttagtagagacagggtttctccatgttggtcagatgatccgcccacgttggcctcccaaagtgctgggattacaggcgtgagccaccatgccctgtgtataataggattttgttatgtctgttttctacctcctaactatgttgcacattcctggagagcaatgattatatttgacatttcttttatatccccctgtgttttctcctcattactatgcatactggaaacatttaataaatattgtttgaaataattttttccttcatttcaggactggcaacacatgcaatcaaaaggttgcttcttcttagaagaagatggtgaaatcattagtcatcagtacaggatgcaaatagctcagaggtccatggtttatctaacaattaagccattaaacctgagtcaagttgaaggcaagtttaagttttttgtatatttttaaaatgtcaatttgtaccctccttgaaagtacttatgtaagtattccatagtcctagttagggaagaaaataatctgcctaagtaagaatttatggttacatttcaagaaagtgttggcttatacatgaactgtgttaatcatatgaaaagcaagtagattgctttatatgtttaaagcatgttttattaaaaataagaactttttccaaacttttctacagctaagatagaagaaaataaaagaaaaaaaatgttaactggtttcctcatgatatagaactaactttttttttttttgagacggagtctccctctgttgcccaggctggagtgcagtggctcgatcttggctcactgcaacctccgcctcctggattcaagtgattctcctgcctcagcctccccgagtagctgggactacaggtgcacaccacctcgcccgcctaatctttttgtatttttagtagagacagggtttcaccatgttggccaatctggtctcaaactcctgacctcaggtgatccacccgcttcggcctctcaaagggctgggattataggtgtgagccaccatgcccagccagaactaagtttttatttgctaattaatcttagctttttccatttgtcaatttttaaaattaatatgtcaaagagaagtactgcaaggggataatttggaacaatatgaagctgaaagtatttttaaataccttcaaaaccctttgtctgtgacttagacaatatttattaataatctttgtattcatggtaatattctagataaaaatacttttctagtgtctaaaatggttatgtaatttttaagcaatgaaagatatctatctataagggtgatttccctagataaccttttttaatgttggctgttctaaatcaatatttatttttcttttataatgtttacatacaagcattttcttactaaaggattcccacctccccattctttttccctcctaaagtagagattttgaaagttttcactgcatctcttgtgggatacgtataatgtttggcagatgatacttttaaatgacaataacaatagttatttttcagagagaggaatcaagatagccctgcaaattcagtgtagttgttaattctctgtattcttattaacaagattcctttattcatttatttatcaaatagttatcgagggccttata

SEQ ID NO: 1686 - DNA, 2300 bp, Homo sapien
ggtaccaaacatttcggataagggatactcaatctgtaatacaaggggattgcataaaggcatgattatcaggaggcaaggaacatggggatcatgttaggtctgtataaggggccacagtaaccctgtccagaacagcagaactgccagttaactcatagaatcatgaactataatcatgaatgggggttgtcttaagccactcagatttagactggtgtgttatgcagttaaagctaattgttacaacttctggggtgagagaagtatagatcaattcctcttaaatgaaaagctccatcatatttccaaagatactgaagaatatagaaagggcatgagatctgaatttgggcccgtgactttacaagttatcatttattgatgacttacttattagcactgtggtaggagctgtatattctctatctaaaccatacaactctaaggtaggtattttgaaggctcagtgaatctatgctatattttcattttgtggagttagataaccttgattacattcaccatccaatcctcaattctctcgtctataaaatgggcttgattatattatttaattcacaagattacactgctctgtaaactcctgtgcaaatattagaactcattactagcagtccagggttccgttttcacataatatttgccaccgaaactcatctatagtgactacatcaacacactgtatctacatagcatgtactatatgagcatgtatatcaacacttggtttgtgagagtctgcactcttatgggtctgttcgcctccctgcttgatcaagacataccaattaactaccaaaagaatataattcacaggtgaatgatatgctctggttttggaattggggaaggggagctaatatttttgaaggcctctatgtttcaggcaccaggctagatgatttacttctaacagctgattatgattgaatttgtttggactgggtcatttagaaaccacctcaagtaattctactgtgagcatgggtcacagtaggattctactgtgtatccatgactgagaatttctgacatacaaaaccccattaaatcttgcaaaaatattccaaagtaggtgatatgtttattttacagtaaggaaattgatgcccacggacattaactaactttcccaagagcacacaccttgtaaagccaagttttttgccactttaccaaaatgacaggtttcttgaacagaggagacaatcactctcatcaaattaagggagatactaaaccgaaaagcaagaaagactgaagattcctacttaataatcaaatccccttggttgaccttgctatcccccgtgaaacttttccagccatgtcagtccttgtttgttgatctcctcactttatttctattacatgagtaactggctaattttgatggtgttcatacttatccttaccatatatttgctcctacatttgtcaagtcctgcttgtacatttcctagttgccaacctggtgtcacagcgggcaaatcatgggaagagccctggttttggagccagaccacctgaattggcctcccgcatggacttagctgtgtggcaatgagacaaggcattttattctttgaatttcagttttgtaagcataaaaaggggaaaaataaaacccagagtttagtaaggtttagaaacgctacactcagcaagtcatagctaagtcaccgtcaccaatggtagtcaagtgtgtggtgcagcaggaaacatttggagtcgactcctttacggaactcaaatgccctcacatttagggagaaatagaaagaattacgactcatgaaatcgagctggggctggcacttctgaccctcccaacaggtttccagaaagctatttacacacgatgcattcgccaaaccactggaaatcattctaccctgtacttttttccaccctgcctcacgtccttgccctatgaccgggttcctaccccaacctctgccccaacacttagaggaggagttgcgggcctctttttacagtggataggattccgaaggggagagtaaatcagtaaggctccacccatttcacaggaggcctagagaccggcgctcccctttcccctcccgccggacctgccaggaggtgggctggcgcggagggagggccctgtcccctgtccctttaaggaggagggccaaacgccggcctagagtgcggcgtagcccccacccgccgtgccctcaccccagagcagctgcagcctcagccggccgcccctccgccagccaagtccgccgctctgacccccggca

SEQ ID NO: 1687 - DNA, 2300 bp, Homo sapien
tgtatactcagcactagcagctgtctgttacctaagatacctgggcctaggagttatagggtgggggctgggggcagggtgggtggatgagaaaggctccttgtctgacaactgtgtgtattgactgtagacaacagaggactgcccagcactgtgcagtgtaactgagtatcctctgatttctgggctgtgatatactaagactgaccatcaaagactgtttcccaacaagagaaccttgtgcagtaagttcctcaggcaagaagcgagataattgggacaggattgaatagatctcaggcagagaaacttgggggacagatcaatgtaggtaatgaactggttgacccaaggcctctctgtctatcattttttgacctcaggtcagagcgatagaaagggggaaaactaccgacacagctcctgccatgaagtcctggagaagaataagtgactgtttgtcccgcatgggttagtcattcacctgcctgaaggcaaagggctgggagtctggagtccatgacctgctgggacatactttgggctgcattttttcccccttctaatgtctcagctctcagggatctgcttttcctggtgccaaggagtatggatgaaattttgtccctcctccatgcacccctataaaacaaatatgatgagaaattaatattttccaaatggtgacctaacctttgttcattaattgagctcctattgcattccaggtactgttagaggccagcaagatacctagatgattgagacagagtcctcgccctccatgaagtgactgttcattttaaaaccctaaagctgggttcttagaggctactgcaacagcaacaactcccgagtgagtgcttatcatgtgccaggctctggttacaggctttaactctctcagtggaaacagcctgagtgctggcttggctaccccatgtctgtgagactgtgggcaagtcatttactttccctttgagtttcaatttctaaaactgtaatatggggataatatatgtaaaacagctaagaagtatatacttttaatgactctttttagtgtcaatggaggatttgtgagcaaatgcatataaaacacaaggcaaacaggaggtatttagtaagtggccacgtgattattgagagactatgggcttcttcctgttcctccagagcaagactgacaggtgtcctattacccttgcatcttcagagcctagagcacagccctgaaaacagcaggcgctcaccactttttatgatcaaaggcagtctctacagggaaagtcaaatcattatgggtatttatgaattacaaaatccataaagttaaaccaggagaaatggacaaaaacacactcattgtagaggtctttaatgatcccttggctcatggcagagcagctagacaaaaaacaaacaaacaaacaaacatgcaaagattcagaaggcctgaaaaaataatgaatacaaagaagataaatcgatacagtattctatcttcacattcggaagacaaaaacacctttcaaaaaaccatgggacattggcaaaaataaccacagataatcctcaataaatcttgccaggaggcagtacagatgacattgaattcagtgagactacaaattaaagacaaaaaggcgaagtataaattacttgtgtaagaactctctcaactcttgggtccaagaagaaagcaaaagggaaattgtatgatagcaataaatgtgccattacccagagtcacacagctaacagtgacacagctgaggctgctagaacctgggtctactgtcgtccagccacgaactggcttgagatcccggataagtctctctgagcctcggtttccccttctgtcaagtagcctcgaaggtccccggcgctcggttcggtggcgagtttgaggagtgtgggggaggggaggggagggagcgtgcccgagacgcgggagccgcgaccgctttctgcgaagtcggggagggtgcgggcgttgagaggctgcagcagagggcgctgggtcgccagcctgggccgcgtctcccattggtcggggctggggcgctgggctggagagttggtggaaagtgacaagttgagcgagagagggagcgtggagagctggagcagccgccaccgccgccgccgagggagccccgggacggcagcccctgggcgcagggtgcgctgttctcggagtccgacccagggcgactcacgcccactggtgcgacccggacagcctgggactgacccgccggcccaggcgaggctgcagccagagggctgggaag

SEQ ID NO: 1688 - DNA, 2300 bp, Homo sapien
gaagcgacatattaagctgaagaattccgatggtgtgatttcaatgacctaactgcatgtcagtcatgttgcacgttgagatggcctcaagcagctctaagagggcagcaattgtgcaagaagctgacacttccagcttcagtcatcagcttgggctttctactctctacccctggtaggtgaggctcatcttggccccaagttcaccggtcatggtcccacatatagaaggagttaaaggcagaggcacaattcaggggcagagggagaaaatggactgagttcccatgccaggagtcatgccaagcactttaaaatttatccttttaatccacatatatcaccacgagtaagagtgtttttatcttcattttataaatgggggcagggaggcgattgttaaatgttaaagttgggcctccaacccagatctgtcagattccaaaagaaaaatccttggatctgtttaaactttatgctttcttttttctttctttcttttttttttttttaggacgaaacactggaactctccagaataaattggtacctgggtctcttctgaagtgagctgctcttaggagcttcaaatgagggtctttgaagccacatgaaaattgatgagtggttgtaacatccaagctaccaaatcagacacacttgtaattgttcccaatgtgagttttcaccccaaagttctcttgtctctctccctcatttttcccgagtacatgggggagaaagtcatgatgaggggatgatctgccttccagtttaaaatcataagaatggcttggaaacttaagagcagtgagattctggaccattaacgaccacactaacttgcagcttcctcatctgtacaatggggctaatgactcaacggctatctcttcggcctactgcagaatatagggatggtacctgtgaagccctttgtaaactgcagagtgctatgtctactttcactgattcactctttccatagatatggtgtgcctctttgtgaaatgcacggtgttaggctatttagtgaaaaccaatgaagaaaatacaatctcttcccttaatgtatgcacattcttgaatagaaaagacatttacagaaataactataaaagagtgtagaagagaagaaaacaggcaccagaacaaagagaaacaaaagatgcaggttgaggggcacctgagagcagggttaagtgaggggattcagaaaaacggaagaaagtagcttaggtaagagcagtctggaagattaaatctatggaaggtggcaactgtttcattaaattatgcattctttcatctattaccaatttatcacatgcttattatgtactggctactgtgcaaattagtgcggcaatgtggagaggtgaaatagggaatgctggcaggctgtccatagggaaatgtccaatgggaggctggaaatgcaggtcttgcattcgggaaaagagtcagggttggctgataaatttcagtcatccttatagaactgccagttgaacctataagaattgatgagcacactgggtatgcaggtgagattagatggtgagggaaggaggaagggcagggacagaaacttgtgggggaatccacaaatatgaggttgaaagaggaagagaagtcaacaaagcacactaaaaagagtctcaaagaggtgggaaaaaagggtgaaagatgctatgaaagggtaaccagctgcatcctattctacaaagttcactggtgactgagaagaaaccactgggcgtatcaattaagacactgttagggctctatgagtcagcatacagatctcccaagtccaggacaagttactacaatcatctgattcgtggccactagtaatcatgatagaatgcctgggttggaattctaggcctgccacttactagctatgtgacttggacaagttaactttttttttctgtgccccagttggagataatacctttactgcttcatgtggttatgatgaggatctgataaacatcacaatagcacttacccaatagtacacacacaatagcacatcacaatagcactcacccacaatggaacttagaacaattattgatatatgatcagctctcagtatgtgtaaactatgacatgcaggccaattcacctagaaaggcctattttcaaaagctcatgtcctctgaattgaggaaccacagatcagatcagcctcttcaaccccccgcgaggctcccattcatgtaagacacccatggctttgtaatggcacccaacgctctgggctggcatgaaaattgtgtgactca

SEQ ID NO: 1689 - DNA, 2300 bp, Homo sapien
cctccctgttcagacacatgaaagaaagtagattttaccccaaagtgtatcttgtcctatctcaccaatatccagtgggccatatagcatataatcccaagtcttctccaaggagtcatttactagagctactgaaaactaaatttggggggtttgctttgcaaagaggcatggaaagcatctaaaatggcagagtccacaaaatcttcccttcgaacacctgtgcagctgccagcaaagaagtgcccagaaaaaaaatgctcctagcttggtttcaggggaacaatttccacagtgatttgcatttttaaggtgctcaagttacttggtacaaatgaatcctaactatagactcattttcaaattttacataaatcctgaactagttaaaaaatcataaaaacccttaaagaagcagtcagtagactgtacggtgatggcaggaaattagctgtattgttgaggaacagatggtttacattatacaaaccctttaggctaaacttgtttaggtctggcatattgtaaattatattttagtaatgaaagtgaaatgacctctgcttgacctcaagtggagtttgtctgtttgaaccaatgtggtggaaaactatgaaagaaaatgaagtcataaagttttggcagttcaattttggctcatttcaagttaaggggttataaatctgtttagtttttgtttgacaagtatttgtcatacagggatgtacaaaatgtaaagaagtgtaaaatacacatgaggcatggtgccaaagtaaaccaagtacaaaggaaaactggaatgaatagggtcccgggctcctatctctttatcactccctccattagttgaaggacaagatggcctcggtttattatatgctgtaaggcaattaagtaccttaaaactgaaacaggctttcagtttcaatgttaacatttttacttctcaaagtaaacacacatctgcctttaaaaaattatataaaattattatatgaaataaaagttgatgcagaagttaatacattgttccaagatgcttctttctttagaaatttttgaaaagcaacagtattagagtttaaatgaactctttacggaaggaaaattaaggaaaaacattttagatgcgagtcatttagatgtgagtcagatgggaaaattgtagtactttctaaactgctgataagagagaccaggctgatactggtggcttttttcaccttagtcatgactgctaagtggggatgtgggggaacttttagatctcttaactttagatatgaaagcaatgaactatgagtagcgtttttaaaaactgtaattaccttggtggctgtagatggataaagagggcagactcagtggctttatctctttccatctttgggaagttataccttaggtgacaatacatttgaaatgactcctggtgaagcagcctactactaacctatttcctgcttactttaaggaagtgattaccataggatatgcggtgaggattttgcaatagctgccaacatttgtatgcaacatgaagcctgctctgtcactttttgccttgaacataatgtcatataattgctctacttttgagtctaacttgaagtagacacacagatgaaaaacagagctacattagggtgcagggaatcgagcccagggtggttctctgggacagaaacggggctttaacaacagtaggtgctgaaacaggatccatattcataagtcagctccaaacctccccctgtggtccctttcactcaaggccagttaattccccatgttctaatgtcccaagactgactgctgccctttttcaaatctatgctattcttttgaagctgattctggctggacacaagtgtctacagaagaatagcaggtttcacatggcatttgtgcttgcctcatgatatggtttggctgtgtccccactcacatctcatcttgaattcccacatgttgtgggagggacctggtgggaggtaattgagtcagggggcagatctttcccatgctgttcttgtgatagtgactaagtctcatgagatctgatggttctataagggggagtttccctgcataagctctctctgtgcctgctgccatccacgtaagatgtgacttgctcctccttgccttccgtcatgattgtgaggcgctcccagccatgtggaactgtaagtccattaagcctctttttcttcccagtctcaggtgtgtctttatcagcagtgtgaaaatggactaatattgtaaattggtaccagtagagtggggtgctgctgaaa

SEQ ID NO: 1690 - DNA, 2300 bp, Homo sapien
gcatggaccatgctcagctggttgctatcaagaccttgaaagactataacaacccccagcaatggacggaatttcaacaagaagcctccctaatggcagaactgcaccaccccaatattgtctgccttctaggtgccgtcactcaggaacaacctgtgtgcatgctttttgagtatattaatcagggggatctccatgagttcctcatcatgagatccccacactctgatgttggctgcagcagtgatgaagatgggactgtgaaatccagcctggaccacggagattttctgcacattgcaattcagattgcagctggcatggaatacctgtctagtcacttctttgtccacaaggaccttgcagctcgcaatattttaatcggagagcaacttcatgtaaagatttcagacttggggctttccagagaaatttactccgctgattactacagggtccagagtaagtccttgctgcccattcgctggatgccccctgaagccatcatgtatggcaaattctcttctgattcagatatctggtcctttggggttgtcttgtgggagattttcagttttggactccagccatattatggattcagtaaccaggaagtgattgagatggtgagaaaacggcagctcttaccatgctctgaagactgcccacccagaatgtacagcctcatgacagagtgctggaatgagattccttctaggagaccaagatttaaagatattcacgtccggcttcggtcctgggagggactctcaagtcacacaagctctactactccttcagggggaaatgccaccacacagacaacctccctcagtgccagcccagtgagtaatctcagtaaccccagatatcctaattacatgttcccgagccagggtattacaccacagggccagattgctggtttcattggcccgccaatacctcagaaccagcgattcattcccatcaatggatacccaatacctcctggatatgcagcgtttccagctgcccactaccagccaacaggtcctcccagagtgattcagcactgcccacctcccaagagtcggtccccaagcagtgccagtgggtcgactagcactggccatgtgactagcttgccctcatcaggatccaatcaggaagcaaatattcctttactaccacacatgtcaattccaaatcatcctggtggaatgggtatcaccgtttttggcaacaaatctcaaaaaccctacaaaattgactcaaagcaagcatctttactaggagacgccaatattcatggacacaccgaatctatgatttctgcagaactgtaaaatgcacaacttttgtaaatgtggtatacaggacaaactagacggccgtagaaaagatttatattcaaatgtttttattaaagtaaggttctcatttagcagacatcgcaacaagtaccttctgtgaagtttcactgtgtcttaccaagcaggacagacactcggccagaaaaaaaaaaaaaaaaaaaaaacaagcaaacaaaaacattgtgggatgtgcactccattggagtgcatgacatggcattgggattggaacatgtggtttcgagcactgaaagctgcaaaccagtgaagaggaaaagaaccttgtgattaaatataaaaccaaaagtcaaatggtgctttgtgttttagccttcagtcaccatgactggtctctcccccagatgtatatataccatagcatttgtctacctgctgtcttttcttcaggacagatgttcaggaattatattgattgaatttagactctgtgcatgttcttatggaaatgatgttcagaatccatgaagaaacttcaggccaaatttgaaaccctggagggaaatgagccataagggaagtataacaagccctgaagccttttatgtcgttgtgcttctttgggaaggtgtagagtgtgcctttttgtgaatcctcctctgatcatgagggtctttcccacagtttctcacagtgtgtttacactgcccttggaataacacagcgcatcagaccataagaaggctagatgtggatgctagaattgattgttggttgatagttctctttgctggattaggaatgaggcgccaaaggaagcacagccaggaaaatggccccacagcctagatcagcatctgtgggaaaggaaaaagggttcccatggggacagcccccataggagttttctggaaccagtaacactgaaaaataagtgtgtggctacagatgagcacgcccaccccttgcaactccctgtttacaagt

SEQ ID NO: 1691 - DNA, 2300 bp, Homo sapien
ccggccgcccctactgggaagtgaggagcccctctgcccggccacgaccccgtctgggaggtgtgcccagcggctcattgagaacgggccatgatgacaatggcggttttgtggaatagaaaggcgggaagggtggggaaaaaattgagaaatcggatggttgccgggtctgtgtggatagaagtagacatgggagacttttcattttgttctgtactaagaaaaattcttttgccttgggatcctgttgatctgtgaccttacccccaaccctgtgctctctgaaacatgtgctgtgtccactcagggttaaatggattaagggcggtgcaagatgtgctttgttaaacagatgcttgaaggcagcatgctcgttaagagtcatcaccactccctaatcttaagtacccagggacacaaacactgcggaaggccacagggtcctctgcctaggaaaaccagagacctttgttcacttgtttatctgctgaccttccctccactattgtcctatgaccctgccaaatccccctctgcgagaaacacccaagaatgatcaataaaataaataaataaataaataaataaataaataaatcagagcatgacactctcctgtttaaacccattaaatggattcccatagctattcaaataaagcccaaacttcctactgtatagtgcccatctttatcacacccctcccaggctcctccacaacctccctgaccttcccttgttcccttttcaagacaagctctttcctgactcaaaaatatcttgttttcctcttcctagaactctctgccctcaatatttcatgtagcaggctccttctcatctttcatgtatgagttcaaaaccccattccttacagaggcatttcctgactaccatttctaatccttaatgacctaccccaatctctatcatggtactgttttattattgtccacataacgtttatcaccatctgaaatcatgatttttgttttgcatacttgtttattgtatattggagccataaagacatttacttcatttgaatctttcaagtaaaaaaaaagtatttaataaatatttgtaaaatgaatggactaaatgaacatccggattctataaaattagtaagtaaaaagtaaaaaaagaaagtattctgaacaaagatgccaggctttgtagttggcgctggcaatggaaccgtgtctttcagtagttcccactctggtgaagacaatagacaattgtgatgccgtatggcaaatgttaactaggaggcaaatagaaggtcctgtgggatcacaaaagaaaggatcccttaaagagtcgttaaaatctgaaggatgagtgagtgaaggggaaatgagggctgaaggggtggaaggaatgtggtaaactcctaggtagaaggaacagcaggtgcgaaactgtgcgggaagagatgggaatcagagaaattttaagcagttccctgttcctggagcactttcccagggtgattgtagggtttgatgacataatagcatgcacactactgtgaatggtaactcgccatgtaagttaagatattgttatgcagacctgtacctaccagtcacttactatatcttttgatagtcaaagaaaaaggaaggataatttcgaagaaagacttcgtgggacggcttctgtgacttacatgctgggtcctgggacctcaccccatcctctacactagttttgtacagtccatgttcgtggcctgagaaggcgtggtgttgccttgaccacgaatctcattggcctttcaaaggggaaactgttgtaggattggctgtggagatagcaagaggcctgccccctgtcgctgattgggtgagagcggccaaccccctgcctccgtctctcggcggccccacgggggcctgttggttggcaaccgatttgcttcctccggtgcgtggctgcggggttgcacctgtgaagcgaagacaacctgctaggaccctgataggcgtacacctctcactcccactcacgcgccgacgacatgggcttgtctccgttactcatccaagtttgtcttgagactgggctgtgagccggcactgcagtgaaacgccgcagatgaggaagtgcccaagtcttccttcgggaagttctcgtttagaggagtcaggagaaaaagtcattgttatatcccaactttagaagccgcttatcttggtaccgttctgaggttctagaaagcaagtaacttatatcagtttactaagtgtgggaaagtgacccataacttcaaacatctgcctcagagtaaa

SEQ ID NO: 1692 - DNA, 2300 bp, Homo sapien
cattgttttgggctctaattctaggccttgctagccatcagcatagtgacctgtgacgctgtttcccttccttttgtaaatgaagaggttggggatagtccttatataatagctcttgtcattctgcctactttggaaatgtaggacaagcactgacctcttctaatataaaggtaatcctggtggacacaatggagatgcacatgaaaaggtgaaaatatttttatttttttgagacagggtctcactctgtcaccaaggctggagtgcagtggtgcaattatggctcactgtaacccccacctcctgggctctagcgatcctcccacctcaggctcccaagtagctaggactactggcgtgtgctaccatgcctggctaatttttgtattttttgcagacatggggttttgccatgttgcccaagatgatctcaaactcctaagctcaaaccatcccacctgccttgtcttcccaaagtgctgggattacaggcatgagccactgcacccagctgctgaaaatgtcttaaaaggagaagacacctattttacttaaatgtgacacaacatttaatcactggaacttaatggtatgcattagaactgtttcttgaggaacacagtctctgacttaatgaattttctagcaagtctcaacctttctcttttgggtgtaccagaattctctcgtcagttttccattagttggatttacctgttgggtttaattctttcattttgtatataggtacctctgcttggtttcattttgctttcctaagcaagggagtagaaacagatgttaagactgaaattctactatatttaggaagaataaataaatatatcttccactatggtataatggaaagatatactgacctgggcatactcatgggcaacgtacctgttgtaaatcccctcctttgcaaattgtacctactttgaggtggactgcaagttctatgaggcctgggacctccctgcaacccttttacaaagccggcagtgtagtgctatctatgcctatctgattgagacactgatcagatgtttgaatggattgtgaagacggtgcgaggatgtacaccaggagcacacagtggctgttcaagaaatggtgatagtttttgtttatattttcatttccatgaattgatattttgatattgataacagcagtctttgagaccaagacttccaaacttttttctggaaataatttttttcttcctcacccagaagaacatttattttctggatgtagttcagatttcttctaaactttatctcacttggtgtgaaactagaggtatagaggtaactttttattataccaccacccaattttaagctccggatgaccgtgcaggaactgcttttgttttcccaaggccaccatccccagtgcagatggaaaggaacaagatacaggagggcagtcaagagcctctggggagcccctgtactggtacctgctcagccccgggagccacaggcattactgtcagggtggctgtctccttattgctcgtcttgcaactgtcactatgctgcgaggtctggaggggaggggaggggaggggacattcctcctgctgcacccttggaggctgcgggctttcctgggcctcggagagcggctcagcgaaggccctcagctcaggagcctgattaggtgcataaaatcgctgtagccagaagggacctccccgcccccgggccgcgccccgccccgccccctcctctggggcacaccccgccccgccgcccctccccctccctgggcacaccctatgccgccgttcctccccctccctgggcgaaccccaacacctccacctcttccccctccctgggcgcaccccatccacgcccgaccatccccctggaccccgccgcccctccccctcttggctgcgccccgccccgccttccgggcgccctccttccccggtctgccttctccctgaccctcctcccggtcgccaggaccccgcggcccgcgaggcagctctttgttccccggcctcgccccgccccgccccgccccgccccgccgggtcccccgcttcgtccccggccgcccgcttgtctctcccctcgctgttctgcccctttgtcttccacgcctgccccttcaactcctcttgccctgcaaaccccgggtcgccacctccacatcccttccacttctacctgcctgccttggcctgcattttattttcaaccaaggttgaaatggtagccccacgcaaaatccgatggtgtgtggaggaactgcccagtcattgcagt

SEQ ID NO: 1693 - DNA, 2300 bp, Homo sapien
atgcagtagctcacactcgtaatcccagcactttgagaagctgagatgggaggatcgcttgagcccaggagttcaagaccagcccaggcaacatagggagacacccattgtctacaatttttttctttttaattagctaggagtggtggcacatgcctgtagtcccagctattcaggaggctgaggtgggacgattggttgagccaaggaggttgaggctacagtgaactgtgatgatgccgctgcactccagtctggggaacagagcaagacactgtctccaaaaaaaaaaaaaaaaagtttctattttgccttttttcttaaaagatatttttgctttagatagaattctgaattgacagtttgttttttgaacactttaaaaatgttccactgtctgctggactctgtagtttctgatgataaatcagtgaaagtttttgttaccctgtatgcaatgttttttgtttattcatttaattattctggctgcgctcaagatttttctctgcttccgttttcagcaatttgactatgattatgcctccctagacataatggtttaaatattgattctgcttggtgtttgttgagcttttggaatctgtaaatttgtgtctttcatcaaatttggggactttgggaccatgattttttcaaatatattttctgtctcattatttgctctccttgtaggtctctgattacaggtatgctagatcttttgatattttactacaaatccctgagacagtgtctttttcttctctttttaaattttttttctcttggataaagataaagatggtttattcttatgctgcagaatttcctttttttttttttttttttgagacagagtcttgctctgccaccaggctggagtgcagtggcatgatctcagctcactgcaacctccgcctcccaggttcaagcaatttccctgcctcagcctcccaagtagctgggattacaggcatgtgccaccacacctggctaatttttttttttttttttttgtattttagtagagatggggtttcaccatgttgaccaagatggtgtcgatctcctgaccttgtgatctgcctgccttggcctcccaaagtgctgggattacaggagtgagccactgtgcctggccctatttgtttctttttaataattctgtttctgtactgaaatttctcattttattcaagcgtattatctttgcattcttgagcatagttataatagctgctttaacatttcgtctgctcattttaacatctaaaaatggtttgaggtttatctctgttgactgtcttttttcttgagaattggtcacactgcttttttcttcatatatcaaaaagttttggttgtatcctggtattgtggaaaaatctggattctgttatattcttgtgaggagtgtttgtttgttttagcaggcaattaacttgactggaatcaaactgctaatctattttttagacaactgctcaaaactcagctcagtttatctttagatagagtttgccctgcacacatacagttcagggatttaagaatttttctgccccacccccacccagtactctagtatttaaaatatattctgacagacagttttttggagtatttttctgagttgttatttgataatgagaattttacaggaaaggtttaaaatttgatgttttatttctccaaatatctgctgggacattgtaaaggagaagcagtttggttttataagaaaatgatacttagcaggtattaatactccaaataattattttactcaagtatacactcaaggctctagacatgaagaattggaaaaggtcaaagcaatgaactagaattcacctgaaagcaagatatacttccagatgtagaccttgcatgaaattctatccttttgttcatatgagaataaagatgcctggtagcagaacaacttacatgtggcctacaaacacagaatagctctttctttaaagaaattttgaattgagggtgaaccttaaagagacagcactttatgtgccccgatgtgaatcatcagtcctaactaaggtgatgttttagaattttggagctggtatactcagataccatggagacaaggccaaaggggttaggaaacttttctctagtcttttttggacagcctcagtaagggtagtgtgggatacagaatcaaagagcctcatcttttgagatggaaaactcaaggtccaagcaagactctgtcatttactgtttgatttgtaacaggtatttagcctttcagtgtctacatcaatttt

SEQ ID NO: 1694 - DNA, 2300 bp, Homo sapien
ggtacagctggactattaagtacagtttttagattcattgtccattgatctttcaagttcagctgaatctaactgcttcacaaaatagaaaaatgtatttagtgttgctgatgttttgcactgatctggaaggtcttatctttttaggtgaaaaagtagtggaaaacatagaaattgcctccttttaaattaactgcgctatctgagctgccaaaggacgctctttccctcccactctaactcatttattaggctgtctgcaaaggcaatgcttgattactggaccacatgggaaacttttcttccaaacaaaattgagacagctgatagaagccttcatgattcaccggagcacagttccagtctttgtccaattccttctctgctggtctttagatttattttgtttttaacccataggtttgataatgactgtgagtaaaccctgttattttggaaacctacttctgggaattgtaggtgtggacgtgaatctggcttacattcttgaagacgtgacgtattaccaagactctttggcttcctatacttttctcatagacgacaaaggtaatctgctaaatgttcatcctaagaatacttttttagaaacctaaagaaaataaggtatagatattctacaaacaaaataggaaaatgatagtgtaaagaagagcattgtgactaagattgctcatttgtagtagaacaccgtaaagatggcagagtggatctccaaattacacatgtgtttctctgttctttgaggggtagggaacggttatttgtaacatcaggaaattagactggaggattgaatgacacatagaatgtcatcctttgacctgaacagataacttttctaaagaagaaataatgcagccaacaagcctatgaaaacaatcgcagtatccctgatcattagagaaatgcaaatccaaaccacaatgagatgccatcctacacctgtcagaatgcctattattaaaaagtcaaaaaatagcagatgctggcaaggttgcagagaaaagggtacacttgaatactcttagtgggaatgtaaattaggtcagccattgtggaaagcagtgtgatgattcctcaaagagatgaaaacagaactaccatttgacccagcaatcccattactgggtgtatatatgtacccaaaggaatgtcaatcgttctctcataaagacacctgtatgttcattgcagtgctattcacaatagccaagacatggaatcaccctaaatgcccctcagtggtagactggataaagaaaatgtggtacatatggaatactatgcagccataaataaagaatgagatcatgtcctttgcagaaacacagatggagctggaggccattatccttagcaaactaactcaggaacagatactgcatgttctcacttataagtgggagctaaatgatgagaacacatggacacaaagaggaggacaacagatactgaggctacctaagggtggaaagcgggacgagggagaggagcagaaaaaataactattgggtgctatgcttagtacctgggtcacaaaataatctgtacaacaaacccccgtgacacaagcttacctatataataaacctgcacatgtacccctgaagttaaaagaagttaaaaaaaaaaaaaaaaaaaaaagaagaatgtcatcctttggatcttttttttattaaattgttatcttagatttattggcattaagatttatgtggtagattagaatgttttataaaacaacaaaacaaccaatacctccaaaatactcttgatgagacagatgtttgataatttaagacatctttctacgcctcaagagttttatgtaagcacatataaaacaggttcagtttttactggactggtgagttgcagaatgagaagttgagtatcgggcagccagcccagagtaccccatatttcaaaacagtgattcagaacttcctacaacatgtttcttattaacatgcattttgttttcttattgcaggatatacacttatgcacccatctcttaccaggccatatttattgtcagagcccccacttcatactgacatcatacattatgaaaatattccaaaatttgaattagttcggcaaaatatcctaaggtaaggaaaaggtgagggtcataggattgtttttccctgagaatgggacccatcaaagccacatacgagtatttactacagagtataaaacaagtgtataaattattttaatgttatcaaaagtattctcagtaatgtttccgtaagaatagcacccaa

SEQ ID NO: 1695 - DNA, 2300 bp, Homo sapien
ttccttgtcactccaatcagatcctaacttctttgagttcaggaactaccctctctctttttggcaggtccttgcatggagggcctgcaaaagaatatatacatgaatccacagcatgctgctaggcaccctaaccttttccagcctctggttgtctttgctttggttaattaatataataataatctcccagggtagccaatgaagatatcatcagaattaaatgaaacataacattatttaatgttttctgggaatggcagactaggtaattctaacccaacctactgaggacaactatttaataaaattcctggattgaaacgtaatcctggattaaaatcttggaaagcatcagagctaacatgagagagaggaattactgggcaaaaatctcagagaaaataagaacccagagaagagagccaacactcaaagccacttttgcaatgcacatgtctaccaatccagaagaaacagctgtgaaattaaacagtgctttaagtagctacttcaggcaaggaagagaagcaaaaatcaaatccagggtccacaaaaggtgaagactctaataaattttttactcccagccccacatacatacatgcttttggcagagattctaaaagactacatctttaggggaaggcctgaagttaaatcaggccttgacttggggttcctatcatctgagtggtttggggaacttcaagcattagcctttgaaataggattagttgaagtcatgcagtgcttaggtcagtatcctggctcctaattgggaactgtttccaacaccccacctgctacatcttgcagtgtggcaccggacaggatgaaacaacaatcctctctggagaaggatcccccatcttcttaggcctcaagctatttctacagattactttttaagtgcaatgtccagcacaatcagagatcaccaggctaccaggagacaagacatgacgtgtgagaactaacaaaaggagtagaagatgccctatgtgattaaatgagataggacacatgatcatgctttctaaagcttttaaaaatactataaggttgaatggtagaaaatctcaaagacgaagatttagtgtttttgttctgcactgtgattcactgtgagaatttttatcttaaatagagaactaggattttcctgttagatcagaccaataatgaaacatgtatacattaattactatatttctagaagcttttgtttgtgtcaagttttgctgccaccatctgagtgaataatttttatttgatttttgcattgatttcactgttccatctttctttcttaaatagtactactaatatgaataatagttaatactcatttgctttacaaatattaactcattgaattctcaccgtatttctgtaagattgctgctatgcaaatgagagaaacactacatgtattataacctgcccaacatcacacagccagaaaatggctttaatccagactggtttcatgtgtgtcataagctgtcccctcattcctcataagatattatatgtagatctcagatagtttgaagaatttctactcccagcacttgtgtttattggcgcatgtctttactggttcattcttaggactgtaagctccctgaagggagagaatgtggccctttagatattaagccgccgccgggcgcagtggctcatgcctgtaatcccagcactttgggaggacgagacaggtggatcacgaggtcaggagatcgagaccatcctggctaacacggtgaaaccctgtccctactaaaaatacaaaaataagccgggcgtggtggcggttgcctgtagtcccagctactggggaggctgaggcaggagaatggcaggaacccaggaggcggagtttgcagtgatccgaagccgcgccacttcacaccagcctgggccacagagcgagactccatctgaaaaaaaaaaaaaaagaaaaaaaggaaaaaaaaagacattaagccaccatagctgacagattggcagagcccgagtgatgcctttgtttgggatgagatagagtctccgcattctcaggcctgctttgtttgcttctctttcagaaagtcccaccatcatgctgtctgctggcagcttttcctccccctatgagcacctcagccagccagagacaaagcgcatggtagagcactacaccgcctatctcagcgacaacacccgcctcattgctaacccgggcctcaaagtaagcattggcgcagagctccatttctggtgtccccctccacaggcccagcagggggtgctgg

SEQ ID NO: 1696 - DNA, 2300 bp, Homo sapien
atatgcttactctagatgcagaaattttgcttctagttcttcactctgtggaaaagtaatgatcttcaaatatgtatagagggttaaactcagtgctgtttacaatagataaaaataataggaaatactaatgctaggaaataagtgaattttctaattcaacagaataatatgcagccataaaaaccatggtattcaaatacattggcatagaaagggattcagcagacatactgtaaaaagcagaaaacagagctgtaaactacagaatatcattcaaaaacatttttatgcagtaatagtcacgtaataaaattaatattttaaaagtgaatagttcagtgactatttagtacattcatattattgggctactgccccctctgtctagttccaaaactagattttcatcattccataaggatgtttgcacccattaccttctcctccagcccttggtaaacaccaatctgtgttccgctctatgaatctacctattctgatattttatacgcatggaatcatacaatatatgaccttttgtctctggcttctttcatttaatgctttggaggttcgtccaccttgtaggggtccttaattcctttttatggctaaaaatatttcttagcatatatatatcccacgctttgcctatctgttcatcaataaatggacatttgggttgtttctatcctttggttaccaggaatagtggtggtatagaagggtgtattgccgaatatcattttaatgatacaagtattagcagccattatttttgggtggacggattacgggtgaattattttatgttattcagaacactgggctttggaatcaatcagaacagatcccatttcctcacgtgtaaagtgaggaaaacaaaacctacgtaattgaatgatcatgaagagtaaataaatatgtatatgtaaagcatttagaaatgcgtggttggggggagcacatggtaaggactgaatttgtagtatttttaaaaaatctttaaaacattttgtttttcttttaattagtgttaaagtcttttttttttttttttttttttttttgctagtgtacttgcatgctacacaattaagatgcatggtccccttcgctgatggtcacctgggctagtgccaaaggctgctggattgtttgatctgatgacatccgtttgactaagtatagttctacactgtaactctccctccaagtttcaattaaaataatgttccaagcagcgtattctccagcccctctgccacagctccttttccattctagtctttgtttcagcatcactttccatgttgcagacccaactacccaggttttacattttaggaactgcatgacagggacagagggacaggtgaagggcacaggctttctcatacacagctagcaaaatacattacgatcaggttttaccaaatacataacatttctcccacaatgtccctctttttactccccagaaaatctcattgtaaactcaaactttgccaaatatgctcttcttgaaccaacagaagggttaccatcgggagccagccgggctgcaggaggcgccctcctgccacccctccagccccatctcgggtgtgggaagaccgagttcgcgcccgcagcccccgggccgccccagcgcgggagtttcgaggggagccgggggagagctgcggcgtcacatggggggccagccggggacaggcgcctggggctgagtctcccggcgaagccaccgcgaaggggccgcatcccccagagaacgaccctgggcgttcgcgaaggcctcgcagagagggggagcccgcctgcgcgtccgcgccctcacaggtgtccgggtggcggcgcccggccccgcctgcggacccgcgagaggcgggcgcgggcgcgcctgtgcgccggggccgggggccggcgggggaggttcccgcgaggtggttctcgggctcctcctcggcgcctcaggtttcctctccccgccagcaggctgctggctgcggcgccgcctctctctactccctcctcccaccgccccccttccccgcggttgggcccactctgcggcctctgcccgcctcgccctcgcccgggcctcctcccgctttctctctccgcttcccctggagcctccgaggagtccgcagccgctgggcgcccgggaagatggcggcggcggcgggagacggcggcggcgaggggggcgcgggcctgggcagcgcggcggggctggggccggggccggggctgcgcgggcagggcccctcagccgaagcgcacgagggcgc

SEQ ID NO: 1697 - DNA, 2300 bp, Homo sapien
gcctggtgcagtggctcaggcctataatcccagcactttgggaggttgaggttggtggatcacttgaggtcaggagttcgagaccagcttgaccaacatggcgcaaccccatctctactaaaaatacaaaaattagccaggcgtggtggcaggccctgtagtcccagctacttgagaggctgaagcaagagaattgcttgaacctgggaggcagaggttgtgatgagctgagatcggcaccactgcactccagcctgggcaacagagtcagactcttgtctcaaaaaaaaaaaaaaaaaaggaaagaaagttaagaaagggaatgattaacaggttcaaatgccctgagaattcaagttaaatatgacctgagattttatgggctgatacgagaatataaccagtatttacaaactgttgttggctcgtttgttttagggaaacagaattaaattgtattttatgtcagcataaggaaaaaagacatagaatcaaaatcaagccttttaaaaaagattgttagaaactaagagatagccttttaataagggcagtaaagccattttttctcattttttggaagagatgttggaacagttagctgttcctttggcaatagttttcttgcgtgtgggacatgtgttaaatgaaaaatgtgtttctttaaatgttagcatcacacttagtgtggtgagatgctcttactctgagagccgcatggcactaagaccaattgagggcagagaagtttagtgaaatgacaggcagaattgcccatgctacttaaattacttctctgtctcttgctatatccatatttgctgtatacaacatattgtcatgcagttctaattgaatttgggtaaattaaatgttcatatggagtaacttcactatatatttcagagggagagggagaggaacttgtagagagcaatttatttgtaatttgtggattgctatgtattttttaatgggggctttaaacttttcctataaaattgctcaaaaccttttatattcttttattgcaaaaggtaaacaaattgatatggttaaaatgtaattttaccagatatgaatgtacataatatttcattgatttagaatgttatatttgtattatgtttccagttatataagccgtcatatgcatttgttgcttgatgctggaacaacttcattagctagacagggcagactatttttattgttttatgaatattcaagatcttgtcttaagatcagaatcctgtaaccttttcatttgatattattcatcaaaagtgtaccaaattaaaagtgtctgtgtgttatgtcaatctaatctgatattaaggaaatatatacatgaattggagaaagaaatggcctcctttatgcattttgatgtttttgctgtaccttcattttttcaggtccttgctgtcaaataggctcttttagaactctttctaggaagaaagaaagattttgtaacttcatttttatttcagttaagttttatataaagtcttcataaaattttatatcacaggtttttgggtgggaggaaatcaaatatgtgtgtgattggaaaagactaccaaaaaccccccagaatatcataggattttacagtgaaactcctaatataatccctgtactttctattttgggttactgttgatgaaattagtttaatggaggtgtcagcattaaaaaacgcactgaaatagaataaaaaatgtcacaatgcattgcatatagtaggggtattaacttataattttgtttcagaaaaaaggtgtatgtttatgtgtaccaagtcacagaagtaagatatatttcttactgtgttttcaaacaatttgaaaactctttaattcatttcgttatcttccagcttttgttaccttattgaatggggaacaagcccagaacgcaattcagatgtttcatcaatattcttttagaggaaaagacttaatagtccagcttcagccaacagatgctttgttgtgtattaccaacgtgcccatttcttttacatcagaagagtttgaagaacttgttcgtgcttatggaaatattgagagatgttttctggtctatagtgaagttactggccattccaaaggctatggatttgtggaatacatgaaaaaggactttgctgcaaaggctagactggagctattgggtagacagttgggagcatcagcactctttgcacaatggatggatgttaatctattggcttcagagctcattcattctaagtgcctttgtattgataaactccccagtgactacaggga

SEQ ID NO: 1698 - DNA, 2300 bp, Homo sapien
ttcaccatgttggtcaggctggtctcaatctcgtgacctcgtgatccgcccgccttggcctcccaaagtgctgggattacaggcatgagccaccacacccagccgattttttcatatttcaaacaatgtgacatcctgtaaatatataattacatgcatttgcctgtttatttccttagagttagagggtgcaacactgtctttggattcttcccctgtcacgtctataaagactctcaaggacaaaggtttatcttacattatgaagcaggcttttagctactctgttttccatcacagtttttcaatgtgggatggggttaggggttcagtgctgggttttcaagtggtcttgcttgttgatctgaatttcaaggttaattatgaactaactgtttcaggctggtttccagaagattctggtcttcagatttatttggaaattaaacagttaaaattgaatacctctcagtttgtagcattgaggcatatctggttaatgtccctcttttcagaatctctcctcaccaggggagctaatagaccaagcaaatgaatttggtgaagagaactgtgactgctgtctgccctgtatgacttttcttgtttgggggagcctccttgggtcattctgcaagcacccattatgtgtaagcctctgtgcttcttacggatatagagaaaaatgactcagttcttatctcaaggaactcacagcatgtgcataagatgcttaaatttcctgtggctagtgcagtgggataagtttaggagcaagaagcgagggccttagggaatgggatggaggttcagagatggcttcctgcaggaggcgatatctgagctgaattctaaagaaagttgaagtttgccatgcaagggataaggtagaaagatattcctatagaggaatcagtgtgagtgaaggcaggagggtgagaagtagcattgggtaggggaggatacagtaacactgacagccttgtgggtttcaagcatgaagcaagaagctcagagtgatagaagataaggtgaggaaggctggccggccagatgatggagcagggctctgtttcagagtctcagaattgctctgtagattaatgggaagcccttggaggatctggtatgtgttatggagaaattactttaggggtttaagtgaaggttggcttggcagacaggaagaaagtagtaggagtgtggggtcagcgaattagtttgtagcccattggtattgggcaagaagaagaaagaatgtgtagggctttccctcatttctttcctcctttctggccttgcccaaggctaagttgctgaggttggttctttggccctaggtgctctccctttggagggtgcttatgtgaattacttacttacgcacttttcaccagggttttctaactgttccaaagtaaggcctcctcctgccctcctggtgctgcgtcaaagtcctgccgctcctcctggggtggtaggaaccaggctccattcattaattgttatggcccttccatgtgacttatgaacatgaattggtcatcattttgtgtgcagtgtctcaggtggggatgtgaagagagataagatacggttcatgccctcaccatgcttgctttttagtgggagatggacatgaaattaaaatgctgattcttgccataagtctgttcaaagcttatgtgattccagtagaaacagcagcagaatttgtaactaataatcagtcctttaacattgttggttccagaatgggctacatttttcaattacaacttgggtgcaaatggagaaaataaattcaggccatgtctaaaattattctgatttttgaaaatatggtctgaccatattttcaaaaatacataattaataaattacaattcattaattagtatgcataattattttccatggtttcatctcttatgagatctgacatgtttggtttccaggaagggaaggggcaggggagaggtacgtatccaataccaacaccaaatgtttctgcttttttaccttcagaacactcccttttgccataagaacttttagcacatagagtgaccacatagtcttgttttccttccacaacagtatctaaatataaaagaggactgcaatgccatggctttctgtgctaaaatgaggagctccaagaagactgaggtgaacctggaggcccctgagccaggggtggaagtgatcttctatctgtcggacagggagcccctccggctgggcagtggagagtacacagcagaggaactgtgcatcagggctgcacaggcatgccg

SEQ ID NO: 1699 - DNA, 2300 bp, Homo sapien
tcgagaccatcctggccaacatggtgaaaccctgtctctactaaaaatacaaaaaatagctggacgtagtggcgcatgcctgtagtcccagctactcgggaggctgaggcatgagaatcacttgaatctgggaggcagaggttgcagtgagctgagatcatgccactgcactccagcctggcgacagagtgagacttaggctcaaacaaaacaaaacaaaacaacaacagaaaaacacctttgtaagttctaaaaaggtttatatggtagcccttctgaatggagcctgggcctggtggaacttacagttctcttcctgtcctaaaaggctgagttgtgaccctttccgggtttgaggcatgcttttcagtactcccctctggtcagttttcactgatccttggcagctggtaacggtatgctgtgaggaaacctggggtagacaggctccagacatgcagttagcaagcactgcctatggactggctagtgctgttgggtgcccaagtgtaaaaaggagtattgtgaggttttcctgttcaagcaacgggagagacaagcctagctcctttctgctataggacctttttccccacacatgctgatccttttgctgagactgctatctccgttttggcttcatgccccacctccatggacatccattgcatcttaactcaatgtcccttccctcctgagccccagaccagatcacattccctctattttatgttctctacttttccttcatagcattttagctctttgtaatgacctctttctgtacatcttagtttgattccattcttcccattgactgtaagctccacgtaggcagggaccgtattgcccttgtcctttgaattagcttagtttctgcagagctgtttgaaaatacttgttgaaagagtgaatctcttcaacaagtatagcatctgaagtcctgcttatgagcagaagcaaggcattagcatgtagctagtttctaagtgctgttctgaggcagggcagggtgtttattcacataattaaaacaattgattatattaatttttaaaaaacttttgtgcagtgattttaatcttgttaaaattggccataccaaaatagccaaatcaaagtcatcacaatcaaattcatacttgtctcccctgccgggctttccatcattacttttacttaagtcttacccactgcagaaagccttcccaagccagcccttgccagtgtcagtcaccagagctaacaacatcctgacgcactcacactattgattttaggttgcttttgtgtttccatttgtgctgtctccaaccttctattgtaaggccctgtggggatgctggcctcgtggcctcagaggtaacccatctccctctcccccttcgctgctgccctgtaatgcctgggactatgctcttcctaaaactggattctgataaaatgtgttgagtggccagacagaaaactgaggtgataatcactgttaatttgagaaccaattttgaatcaccaaggttggtagcttattatttgcaaaaataattggattctactgttaaagaatttgtgagaagcaacaaggaaagctgttaaaataatacaaagctctgtgtgtgtgtgtgtgtgtgtgtgtgtgtgtgtgtgtgtgtagacaaggttggggcggggtaattctagaaggaatgagaaattaaagtgcgcgtttttgggtgtcttaaactattgttcacacaatcaggagaggggctgttgatggaaaaagcacacaatcttcatttacattggacaggacactccatatcgggaagcaaaaatccctggcttcctttcttgatgcggtgaagttagtatcctctttgatgtttgcaccctaagatgtctctctgtcctctcgatgtcctaggccatttttttgttttgttttgtttttttccttcttcctctcaaatgctttttcttgcctgcttatggtttgggctgcttccttaatgaaaatgccctcttattttcagatgcaattacctctgccactgatttatttatttatttttgtctttagcgcttctctgaagtagctttggaaagtagagaagaaaatccagtttgcttcttggagaacactggacagctgaataaatgcaggtatgtagatttgcatatttttaaaaaaggaaaatatctggctttaaaaaaattgatgaaaccgtgttcttgaggctgtagggctattggtgctattgcctttaattttttgaaattgatgtatttattcattcccaatgttgagtatgctggtt

SEQ ID NO: 1700 - DNA, 2300 bp, Homo sapien
gttgcccaagttggtgtcaaactcctggcctcaagcagtcctcctgcctcagcctcccaaagtgctgagattacaggcatgagccgccacacccagccagcatatactattactgcctgaatatgccgctacctcctgactcctgcctcctgtcggctacttgaagcttattctgacttcctcagactcggctgggtgactgtcttctgtgatcaccattacaggaccgggaatcactgaattgttacttgcctgtctctctgactgcattgagcattcagaggtcaggaacctagtctattttttttttctctgaatcttcatcacctagcacaatgtctgttatagacgaacagatctaaactgaatccaggccctctccccctgattccaccctgtgaacagccagattcgttcgtgggcacaatgggttcactgctgccttcctgactttcctttttctttacatcctcacctgaaatgctgttctttcacgtctctgtctcccttcatgtcagtctcacctgttctttatggtccagctcaataaaaacccctaccacttcctgagcccatgccatgtgggctatattatcatagttcaccttcagcaaaacccctttaaggaaggcattatccctatttaacaggtgaagaaaatgatgcaaacagccctgaggtgttgttcagagtgtggcagatgagacaagacttgcacacaaacacccacaatgcaggcaacccgggttgcctccctgtctgctctgatctccggtcttctttggtcctcttttctgtacttctggaaggcactttggagatccttttgtctgctgctccactgagaattgagtcaactaagaattgtttagggcaacacaggtggttactggtggaggccaaacctcaaattcagtagtctaattcggatgcttgactttattccacacccagaatatcttgctcagtttcagttgcagtaactcaagtgatcaggaactgtccagcagggttagtgaagtcagcacaggtggggcagcctctgtccacagccctgaagctgcagaattctgaccgtgcacggcctcggaggattttcatccagggattgtcagggggaagtcgctggagtgttttaagcatgggagtgtgtggaacagatttgaatttttaaaagttcattgtagagaattaattgggggctggagtgaatggagtgacgatttaagagatgttcgtggtcccttcaggtgagagatggtggcagctcggaccgtgttgccggaacatagacaagtgaactgattggagagatacctaaggaaataaaattgttaggatttgtccgtggactgcctacgaagtatgaatcttggctacagtgtgaccttgattaagacactaaagacttaatttgttcctcatggataagatgatgctactactttgagaggttattagtaaaaaatgaaaagcgctgtacatgcattaggtatcagtgaatgtagttctaattcctattatgcatatgcttttttttttttcgtaaagagcttttaaaatacggaatgggttggatctgcagtagcttgtccaagctgggggctgtattgttaaattctttttagtctagtgctccactagctcctctcctactgagctggggtaagaagcggagcgtatacggaggaggcgggatgcatttctgcatcgagcgcacaaaggtgtggcggagggggctccagagctgggaggggtcaatctacgggcgaatcctggcaattttactccccgcgatagatgacctcgcgtcctagatgagtttctagattctagaatctagaggacgcggtgaacagagacgagtgggggcagcttcgcgagcgaagccggatgggggcggggcgggtaggccggaggcgcagagtctccgccgggaccgcgaccccgccccgctttccggggctgccgctggtgacgtcgcgagggggtgggcccggcggccacgggggtggggccggccgcggggcggggcggggcgggacgggaggcggtgcgtcgctgagcgcaggccgcggcggccgcggagtatcctggagctgcagacagtgcgggcctgcgcccagtcccggctgtcctcgccgcgacccctcctcagccctgggcgcgcgcacgctggggccccgcggggctggccgcctagcgagcctgccggtcgaccccagccagcgcagcgacggggcgctgcctggcccaggcgcacacggaagtggtgagtgtcaccgggggaggtggaggag

SEQ ID NO: 1701 - DNA, 2300 bp, Homo sapien
ttcctttattctgcctttttatagcaccagaattatggaacatttatcaacagcctaaaataaagacaacacgaggagaatttggttgcttatatagattcaaggtacaatcctgctggattctgggtaggttttttttttttttttttgcagtttaggaattaccaaatactttcacatgtatggtgtcacgtcttactgtaattcttcctgaaagtgggtagggcagccctattatcctaatttagagactgattatgagagttgccttgaagtttcttgtccagtgtcacaaagcccacccatatgagaaccaaggctagaacttcaatcttttaatgacaaatccagtgctttatcctgggctccaaatcacttctcggccattcaattaaaatgtgttctgttgcggtttgaatgtgtgccccaaaaaagcatgtgttgaaaatgtaatcctgaatgcggcagtgttgggaaatggagcctaatcagaggtgtttgggtcaagagagctccgccctcaagaatagattaatactgactgtaaaagggctgagactgtgcttttcatctcttatgcatgctgtcttgcccttccactttctgtcatggtaagatgcagcagaagagccctcgacactgacatcccagcctccagaactgtatgaaataaatctctgttctttgtaaattatccagtctcaggtattttgtttacagccacataaaactaagatatgttccttccgggctcattacatgtgtggctgcatcaggcgctgggggctgcaacagtgcacaacattgccactactctcaaatgacttaatgtttatttgatgaaagtttgtgtacaatatgaaatggctacagatcaggtgcagtggcttatgactgcaatcccagcactttggaaggccaaggaaggcggattacttgagcccaagagtttgagaccagcctgggcaacatggccaaaacctgtctctacaaaaaatacaaaaattagctgggcatggtggtgtgtgtctctagtctcagctactcagaaggctgaggtgggaggatcacctgagcctaggaggttgaggctgtagtaaactgtgattacaccactgcactccagtctgggcaccagagagagaccttgtctcaaaaaaataaggtgccaggtgcggtggcacatgcctgtaatcccagcactttgggaggccgaagtgggtggatcacctgaggccaggagttcaagaccagcctggccaacatggcgaaaccccatctctactgaaaaatacaaaaattagccgggcgtgatggtgggcgcctgtaatcccagctacttgggaggctgagggaggagaatcgcttgaacctgggaggcagagattgcagtgaaccaagatcacaccactgtactttagcctgggcgacagagccagacttctctcaaaataaataaatacataaataaataaaaataaaaataaaaataaaataaaatggctaaagcataagttgtattttcatcaaggattacaggactgtagacaaaagagaaatcatcatggactgttcactggacaaaatttcatggagaggagaagacctttggcggttcatggatgttctataataagttaggtaactaacaggctaactttcttgagcacctacactgtgtagggcactgtactggtacttctcataccttctctcattcatataatcctctgaggtaggtgttatcctctctacagcagggaaaatcaatacccagagaaggggagagacgtccatggcacacaggagaggacagagccaagaatgaatataggacaccagtgccccaactcttaaccactaccatacacggttttataaagtaaattttaaaagtcgactttaaaacatgtatgcaacattgtgtccagtctcccaaaacaaaagaacaatgagcgttcccttttcccttgatgtgtgggcaggtctgtagagtagtacaagaagagattatgttctgcattctcacttcaacaagaaagtcctggtccaccaataatacctttaagcttcaggataattgtgaaaaggccaactagttaatcaaacattttcccaaacttaagaaaaacaccaagaaggaatataagtacaggggacattagaggataagctcataagggctggactaaatctttttttttttttttttttttgagacagaatctcggaatctcgctctgtcgcccaggctggagtgcagtggtgcaatcttggctcactgcaagctccacctcctg

SEQ ID NO: 1702 - DNA, 2300 bp, Homo sapien
cgtcaaagacaaaagctgtctagctatttgcaagattgtcattgaagtcccttgtgtttgcacagattgcatctgtctattctgaaagatgagcaacaaatccagtcaaagcctgagtgaaataactgacaatcttagatcaaccctgatggtcactcacgagtccagcagtttctatgcagagcaccaaacaccttacttacaaaagtaaggttagtgggagcttggtattttccatatcatcttggagaagcactgttttgcttattctgtttttcctcctcctcctcttcctccttttcttcacatattttgtgtgaataagaaagtactattggctaggcaggttggcttattcctgtaatcccagcactttgggaggctgaggcgggtggatcacctgaggtcaggaatttgaaaccagcctggccaacatggtgaaaccccgtctctactaaaatacaaaaattagccaggcatggtggtgcacacttgtaatcccagctactcgggaggctgaggcaggagagtcagttgatcccaggaggcagaggttgccatgagctgagatcgcgccgctgcactccagcctgggcgacagagcgagaatacgtctcaaaaaacaaaacaaaacaaaaaagtgttatttataggaataagaactaaaatgccttgttaatatattgttttggcattgccaaatttagcctatttgagtgcatggattgcatttggggattgctgttttcttttttgttttgtatgtttgctttagatgcgtagacagagggagtggagtaaggctttacagagattactacagaaggcatttttttttttcataaagaggggaaaacgcacccatctcataacaagaatttggagtcaaaacgagacagattccattcctgccttccacattaattagctaggtgactttgggcaaatcacttaacctctaggttttctcatcagcagaatgaaagcgttggcctatagacacccatttaaatccctcctccaaatactcattcgttcgatattttctcagtgtctactaagcacaatcattgttaataaacactatgattcttggagagctccaaatcgtgtctctgcttttaagcatcattccccttcctcctttaaaaccagcgcctgacttctcccccaaacaaatcgaaacacttttaccgtctgaaaatgtacatgggaaaagaaacgcgtttcattgcagtcacccggcgccaacctagacctggcgggccagcgagctcgtgagattttctttctttctaaaggacaatctccacattttaaagggcaacccagttacccgaagaaatacaacttaaagggcgcctggagccaggccgggacacccacccacgcttttctaggctgaggaaacctgggaaacttttgggctcccgccgagtcacgcggctgttccacggtaagaattgtgcaatggggcgagtcaggcgggcgtcctagtagggaagaagcgggggaggctgctgcggtgccaatgcttttcttaaaaaaaaaaaaaaaaaaaaagctaggttgtctcacgccgtgcgaggcgcgacggcgcggccggacagcccggttcccgctggccccaagcccgggccaagaaagcatcgcttccccgccgggacctggaaggagcagcgcgtgcgtgcgtcccctcccgggggcagagactgcccgcccgccacagcgctttcctgggactctgcgaggggccggggtgcgagcgggaactgcggcaggcgcagactggccacatcgatcgtggcggggaagtccgggctcgcgctttcggtaagagcgcccgggcttccaactgcgcggtgcccccgcctccgccgccgccggccaggctcgcactttcggatggtgacgcatccagctggctccgcggaagcctgcgctgaaacctggagccctccggggtggcctactcctcagcgctgcgttactgagcgctccctgggtgcaggcttggtgatccaagtttggtcacagtcatcacttatgtcactatccttgtgatgtacatactataattagcgtcacttagaagtgaggaaacaggctccaaaagcttgttacttgcttgtagtcaaacagaaggcagagctgcgaatcaaatccaggtttgtctcgacatgccactagctcatacttcccttggatcagccactaaatggctttcactccagtgagcagcgaccaggtaacacataggacgggtgcgtggcggtaccgagcccactgcccaggggcag

SEQ ID NO: 1703 - DNA, 2300 bp, Homo sapien
ctagcccaagctaagccatcatatcccctgtgacctgcacgtatacatccagatggcctgaagcaactgaagatccacaaaagtgaaaatagccttaactgatgacattccaccactgtgatttgtttctgccccaccctaactgatcaatgtactttgtaattctccttacccttgagaatgtactttgtgagatccacccgctgcccgcaaaacactgctcctaactccaccgcctatccgaaaatctataagaactaatgataatcccaccaccctttcctgactctcttttcggactcagcccgccggcacccaggtaaaataaacagccttattgctcacacaaagcctgtttggtggtctcttcacatggacgtgcgtggcactatgcagggggagctcagcaacacgtttcaacatgccttccaggtgattctgatgcatgctcacttctgagagccactccaaagaagtatctgctacatattatacacatatacccccacccccagacccgcaagttcttcctctttgttcccagaaaaggtttgaaggggctcagtatcaggtctacagcacactgagatttatttatttatttatttatttatcatttatttgagacagagtctcgccctgtttccgaggctggagtgcagtggcgtgatctcagctcactgcaacctccacctcccaggttcaagtgattctcttgcctcagcctctggagtagttgggattacaggcgtgcaccaccacacctggctaatcattctatttttagtagagacggagtttcaccatgttagacaggctggtctcatactcctggcctcaagtgatccgtctgccttggcctcccaaagtgctgggattacgggtgtgagccacagcgcccggccacactgagacattttagagggagatcagtctatggaacaaatgctggcctggggctggtggcctgggtgtgctgtctggccaattttgtgcgtggagtaagcagtggggagaggcgctgggtgtcaggaaactatgccaggccctgccctccaccaaccccaatcaaagagctgagagggggttcttctccacaccatcccactacttgtgtccctcaccttctctgagtcctgggtattggtgctgggaactctgcaacagatttcctgaaggcaggtggcctgtggaaggaaggcagaggagggggcctgcagaatgcaaaggtgtacggaaggcatctctgcgcccctgctgaagatttttcactttatcctgaagggaagacaatatctgaggccgggaaataataaatattgattttcactttatcagtattcctggcagctgcacggaaaatggaatggcacagaaactggagtcttatgggcacttatcccactagttggggtgggaaattaaaggctgtgtgtaaggtgggcacagatctaacagaatgtggattgggatatgcaggggagggtggagtgggggaagacagactccatttggacttggtgagttataggtgcagcaccagcataatgcgcatggaagtcctggaatcatttaccaagaaggtcctgaacacaggtgagggacatccccttcttccctgttccctaaggcgcctagactttggagtcagtcagtcttgggttccagcctcccgctaggacgcaatttcttgagagcaggattcgatctgttgttcacggctagatcctaagcgcctagaatagtttctggcacacagtaggcactcaataaacatttgcagaatgaatcaatgaatgaatggtcacgctccattcctcggctgtaaacacaatgaaatcacctagccgcaaacttggcgcacagtaggcgctcaacaagttgtatttttcccttcccttgcagtagaccgcggtccccaggcgaccgcgaaagaaaaaaaggggtttctctacctcgcgtggtctgcacctcgcttcgcccccgcagccctcgctgggtcgcagggagcacgtgggccaggcaggctgggtgggagtggagtggagtggaggggagggggcggcggccagcggctcgcgcggagccggtctcccgggcttacgtaaggcgcgagtcccgcgcggccggccggggctccgcgactgggcgggcggaggcggcgccgccctgcaggatccgggctggaagcctctcggagtgctgcctccagccaaggtgtgtgtttatttgattgcttttggtggcgaggcgcggggctcgggctcgtcgcgcgccccatggccggggagcgcatccgc

SEQ ID NO: 1704 - DNA, 2300 bp, Homo sapien
cctgactctcttttcggactcagcccgccggcacccaggtaaaataaacagccttattgctcacacaaagcctgtttggtggtctcttcacatggacgtgcgtggcactatgcagggggagctcagcaacacgtttcaacatgccttccaggtgattctgatgcatgctcacttctgagagccactccaaagaagtatctgctacatattatacacatatacccccacccccagacccgcaagttcttcctctttgttcccagaaaaggtttgaaggggctcagtatcaggtctacagcacactgagatttatttatttatttatttatttatcatttatttgagacagagtctcgccctgtttccgaggctggagtgcagtggcgtgatctcagctcactgcaacctccacctcccaggttcaagtgattctcttgcctcagcctctggagtagttgggattacaggcgtgcaccaccacacctggctaatcattctatttttagtagagacggagtttcaccatgttagacaggctggtctcatactcctggcctcaagtgatccgtctgccttggcctcccaaagtgctgggattacgggtgtgagccacagcgcccggccacactgagacattttagagggagatcagtctatggaacaaatgctggcctggggctggtggcctgggtgtgctgtctggccaattttgtgcgtggagtaagcagtggggagaggcgctgggtgtcaggaaactatgccaggccctgccctccaccaaccccaatcaaagagctgagagggggttcttctccacaccatcccactacttgtgtccctcaccttctctgagtcctgggtattggtgctgggaactctgcaacagatttcctgaaggcaggtggcctgtggaaggaaggcagaggagggggcctgcagaatgcaaaggtgtacggaaggcatctctgcgcccctgctgaagatttttcactttatcctgaagggaagacaatatctgaggccgggaaataataaatattgattttcactttatcagtattcctggcagctgcacggaaaatggaatggcacagaaactggagtcttatgggcacttatcccactagttggggtgggaaattaaaggctgtgtgtaaggtgggcacagatctaacagaatgtggattgggatatgcaggggagggtggagtgggggaagacagactccatttggacttggtgagttataggtgcagcaccagcataatgcgcatggaagtcctggaatcatttaccaagaaggtcctgaacacaggtgagggacatccccttcttccctgttccctaaggcgcctagactttggagtcagtcagtcttgggttccagcctcccgctaggacgcaatttcttgagagcaggattcgatctgttgttcacggctagatcctaagcgcctagaatagtttctggcacacagtaggcactcaataaacatttgcagaatgaatcaatgaatgaatggtcacgctccattcctcggctgtaaacacaatgaaatcacctagccgcaaacttggcgcacagtaggcgctcaacaagttgtatttttcccttcccttgcagtagaccgcggtccccaggcgaccgcgaaagaaaaaaaggggtttctctacctcgcgtggtctgcacctcgcttcgcccccgcagccctcgctgggtcgcagggagcacgtgggccaggcaggctgggtgggagtggagtggagtggaggggagggggcggcggccagcggctcgcgcggagccggtctcccgggcttacgtaaggcgcgagtcccgcgcggccggccggggctccgcgactgggcgggcggaggcggcgccgccctgcaggatccgggctggaagcctctcggagtgctgcctccagccaaggtgtgtgtttatttgattgcttttggtggcgaggcgcggggctcgggctcgtcgcgcgccccatggccggggagcgcatccgccaaccccgggcggaggtgggcccctccgagcgcgcgcgggcggcgggcagcggcggcagctgagactccgggggatgtgacagccgccggggaggggacgagacgcagaccacacgttgcccacgtgcgaggaccgggcaggggctcagcccctaggccgcccggtgcgtggggcggcgggggctggctttgagtcacccccgcttgtgccagcttccccggctcggcggagactggcttggggatgcctggccgcccggcccccttctcggacgcggcgt

SEQ ID NO: 1705 - DNA, 2300 bp, Homo sapien
cctcccaaagtgctgggattacgggtgtgagccacagcgcccggccacactgagacattttagagggagatcagtctatggaacaaatgctggcctggggctggtggcctgggtgtgctgtctggccaattttgtgcgtggagtaagcagtggggagaggcgctgggtgtcaggaaactatgccaggccctgccctccaccaaccccaatcaaagagctgagagggggttcttctccacaccatcccactacttgtgtccctcaccttctctgagtcctgggtattggtgctgggaactctgcaacagatttcctgaaggcaggtggcctgtggaaggaaggcagaggagggggcctgcagaatgcaaaggtgtacggaaggcatctctgcgcccctgctgaagatttttcactttatcctgaagggaagacaatatctgaggccgggaaataataaatattgattttcactttatcagtattcctggcagctgcacggaaaatggaatggcacagaaactggagtcttatgggcacttatcccactagttggggtgggaaattaaaggctgtgtgtaaggtgggcacagatctaacagaatgtggattgggatatgcaggggagggtggagtgggggaagacagactccatttggacttggtgagttataggtgcagcaccagcataatgcgcatggaagtcctggaatcatttaccaagaaggtcctgaacacaggtgagggacatccccttcttccctgttccctaaggcgcctagactttggagtcagtcagtcttgggttccagcctcccgctaggacgcaatttcttgagagcaggattcgatctgttgttcacggctagatcctaagcgcctagaatagtttctggcacacagtaggcactcaataaacatttgcagaatgaatcaatgaatgaatggtcacgctccattcctcggctgtaaacacaatgaaatcacctagccgcaaacttggcgcacagtaggcgctcaacaagttgtatttttcccttcccttgcagtagaccgcggtccccaggcgaccgcgaaagaaaaaaaggggtttctctacctcgcgtggtctgcacctcgcttcgcccccgcagccctcgctgggtcgcagggagcacgtgggccaggcaggctgggtgggagtggagtggagtggaggggagggggcggcggccagcggctcgcgcggagccggtctcccgggcttacgtaaggcgcgagtcccgcgcggccggccggggctccgcgactgggcgggcggaggcggcgccgccctgcaggatccgggctggaagcctctcggagtgctgcctccagccaaggtgtgtgtttatttgattgcttttggtggcgaggcgcggggctcgggctcgtcgcgcgccccatggccggggagcgcatccgccaaccccgggcggaggtgggcccctccgagcgcgcgcgggcggcgggcagcggcggcagctgagactccgggggatgtgacagccgccggggaggggacgagacgcagaccacacgttgcccacgtgcgaggaccgggcaggggctcagcccctaggccgcccggtgcgtggggcggcgggggctggctttgagtcacccccgcttgtgccagcttccccggctcggcggagactggcttggggatgcctggccgcccggcccccttctcggacgcggcgtggggagcgagctggagttaaggatgaaggtgggactggccgggccgacctctgacccctggaggccgagtcggcagggcggggcacggcgcgcttcagcagctttgcgtgggggcgaggaggtggaggagggcgaggaggtggagaagggcggggaggtgtagcgtggcgctcagtccgcctgctactcggtcccggcgctgggctgaggggaggggttgtcttaaaagtctctccttccccctgtaggggcggccggcgagtcccagtgagagcggagggtgccagaggtagggggccgagaaacaaagttcccggggcttcctccggggccgcggtcggggctgcgcgtttgaccgcccccctcctcgcgaaggcaatggcttccaaactcctgcgcgcggtcatcctcgggccgcccggctcgggcaagggcaccgtgtgccagaggatcgcccagaactttggtctccagcatctctccagcggccacttcttgcgggagaacatcaaggccagcaccggtgaggggctgcggggacgagggccgggggcgagccgcgttgggctggggtgagg

SEQ ID NO: 1706 - DNA, 2300 bp, Homo sapien
caccgtgtggggcttcagtgtgtgttttcttaaaatagggatattttcttacataatcgcagtgtagttattaatgtcagcaagttttttattgataaacatttttctctaatctgctacatatatatatatatatatacacatttttgtaaaattaactcagtaatgtgctttagagccttaaaaaacaaaaacaaaaaactacaaaacagtgtccagtctagagtcaggtggtattgtatttagctgcaatgtctcttctgtcacctttttttttttttttttttgagatggagtcttggtctgtctcccaggctggagtgcaatggcgcaatcttggctcactgtaacctccgcctcccaggtccaagtgattctcctgcctcagcctcccgagtagctgggattacaggtgcacgccaccatgcccagctaatttttgtatttttagtagagacggggtttcgccatgttgggtctggaactcctgacctcaggtgattcatctgcctcggccttccaaagtgctgggattacaggtgtgagccactgcatccagcccagtcaccttgaatctagaatatctccatagcttttcttcttattttatgacattgatacttttgaagaatacagcacttccctgctccttttaatagtggattcctcattttgggtttatctgatgtttccccatgattagcttcatgctgtgcatgtttggccagaatactccatagatgatgtgtctttctcagcatatcacatctgcaggcattcgattttcacctgtctccactggtgatttttttttttttttttttttttttttttttagataacgtgactctgtcagccaggctggagtgcagtggcaccttctcggctcactgcggcctctaactcgctgggcacaggtgattctcccacctcagcctcctgagtagctgggactgaaggtgtgtgccaccatgcctggctaatttgtgtctgtgtgtgtgtgtgtgtgtgtgtgtgtgtgtgtatgcatttttggtagagacgggtttttgctttgttgtgcaggctgctcttgaactcctgggctcaagtgatccgactgcctcagccgcctgaagtgctgggactacaggcgtgagacaccgtgtccgatctccactggtgattttaattttggtcaccgatagaagctcttgtctgatattatttgggcctacaaaaatggcaatttcataatttgacctaacataaaacctttttactgaggttttagatatctaacctgtactctctgacgctcggtttccctatctgttgagtttggagattgtttctgccccacgagtattactggaggggttaaataagatgatgtatgtaaaatctgccacataaaaagcattctataaatattagctattattattgcagccaggtcgtgttcaagggcattggttttgatcttcctctcagtctctcccaattccaagcaaaatctcaacagagaccagtgatggcatggggatggggtgagggagcctcacttctgccatctcagtttcctcatctggaaaatgggaaacgcctcccacaccacggggttgcaatgaggtttcatgaaatgtgtgtaaaagtaactggacatagaacaagttcttaaaaaatcatgtgggtgactagtaatctcttgtattaggaaaacaggaatatctgtcagaactaaaaccacgttctaacgtgatgtttcattttgaggcggtagcacggtgtgagtaaacatcgtcagagtctagggctctggaatttctttagcgctgtgtgattgtgggcagatgccttaccctctcggagtgtggagtgtatggtttgtaacagggagataaaacgggtgagagccccctaggactcctgtgttaataaagggtgctaacggtgccccccgagtgagcggcgcgggcccgcgcgcacccgcacgcctcgggcgccaggcgccgccgtgtgggcggagccgggcagcctcccctgtcggcgccagccacggctcccggccccaagctccgcccccggcgcgcatctcccagcagcggcccggcacctggcagacgcgcggcggcggcggcgagcggtggcgctcggctcgggcgaccgcggcgggggagggcgcggcgcaccgatgggcgccactgagaagggaggccagaagagccggaagctgttttccttgcggcggccgtggaaggcgacccggcggctgtggaggccacgctcagctcgccaggcggcgcagggtgagtgtgggc

SEQ ID NO: 1707 - DNA, 2300 bp, Homo sapien
tcactatgttgaccaggctggttttgaactcctggcctcaagcgatcctaccaccttggcctcctaaagtgctgggattacaggcgtcagccacctctcccagtcctcttctgctttagagctcttgccctactattcaaatccacgctttggcatttctttgcctactttggtaaattggcatatctagtggaagcctcttgacctgaggccacaggctcctgaggacagagaatgttttgttcagcaccgtgtcattcctagtgttcatagcagtgcctggcaccatgaatattattgaataaaagagtgcatgaatgatggcttctcaccacctactccctcaccttctcagccccccaaagtgctcctcttgggcacattttggctatcctggacttggtccttggagataaagatgccggtttctctgatgtggtttagccaatgtcgcatttggtggccagtaaggagttgtaatgaaggcagattttccttattggtcttaagctgtcaaagacagcagaaagatattatccactgccaaggaaagatgggaaccaaaaacaaatacttaaagtttcccaaaactttcaaggaatcttccagctgtggcaacaagaagtccttagtagccatgaaagctctcacattatagctatgtttgactcttgggttgaagtaatgaacaggtgaacactgacaattagtcctcttaaatgtgcccaagcagttggtaattataccctgcatttatttagtgttttgtttacaaaattctgttctcccttttgatgatatgaacagcccagtacatatataggacagctatgattattcccactttacagatgagaaaactgatgccagagaggttctgtcatttgccctacactacgcagctaataaaaggtagagacagtagagacaggtcttcaacccttttaatgcctagtccaggaaatttttaatatcaatattgcatttaactcagtaatttctgaggatgagtaacaggaagatgtattcctttctgttgctcttcttccaatttagttaggttatgtatttgagtcagttagtctttctggataccagtttgctaatctgtatcatggggaataaacaccatccatcagtgagtatgcatgaagcagaggagactgggagggttcagaacttaaaaaacaatttctgagtgaagctgtttggaagagactgtgatgactcttacctattatccataaaacaaattaaatggcacctcccttggcaaccctacctaaaatggcacccctgttacctcattaccatgtttcatttttcttcacagcatttattgccatttattatatgtctatattacctgtctgaatcctcccaccagagtgcaataaccaagaaggcagggacctgaaaccctaagaggtggaatagtgcctggcacaaataaccacgtgttgaataaatgattgaattaatgaatgaatctgagctgtggaatgattcaaagtaagtttgaattgaatgactgaaagatttacttgaatcctccttgctccccaacagaggggtgttatggtttggcatcctcatacatattcctagtctgccactcaatggcttacaaccagtcactaaagcctccttgagtatcaacttaggcctgggtgaaatgggttcaataacctgtgtccatgcagcagacacagcccattatattgccctgtatgcctctgtactgtaacagcctgtgagcagcgtgaggaccgagggctggtcctgtgcactgttgtatccccagtacttagcatacagcctggtccacagagaggtaaaataaatgttgaatgaatgaatgaaagtacagggctctgaatcctcctccaaagctgacttaccatctgaaaataaacctggtgcatggcacagacattcccctttcaattcagagatgaggaggcgctaaacagttggttccctatcctgagggaaggaaaggcaagcctcggctccagatccggttccatgccatgttttggaatttgtgtttacgtctgccttcatccccatcctttccgctccagcataagcaaaattataaccccgcacaccgacttgcatgcaattatcatagcccgagtgctcctccgttgagagacttcgcccccgagaccgctgactgtgaatgacaaatcaaaagtcagggttgcagaatcagccggactttcctgctcatttgcagcagagggaggaagcagagaatgaaagattctgaaaataaaggtaaggggcggact

SEQ ID NO: 1708 - DNA, 2300 bp, Homo sapien
atatgtctgcaagttgagcaaaaataactgaaagtgctctttttgaaaataataattttcacttttcaaaaatgatcctgtatttatttatttattttttgagacagggtctcagtctgtcactgaggctggttctaaattctattaatccaatgattatagtccagcatttgtcagggcacatgatgaacactaggtatttactgtccctgtgtgtctgtaatgaattaaaagaaaaagtacagagaaagattatttaagatgttatgggaaaagatttactagacttcacagaattattactttagtcaagtaactaaaataattcaatctgacagatttggaaaattgaaagtataaaaatttgttttaaaatttttattgcagtttttcctgccaccattcagattgtttgatcttgttataaatgagcattaactctgatttgcaattcaggtcacaccatacctcatcaaagaatgcagttgggaaagcaactggccaggaagtttaggtttccccagaaggactggaaggatttagaaaacatttctttggacttcttctggttgatgctcttcctacaagaatctgtgtttgggtgatccttgtacaggaaaatgtctcttagtccaatttattttatgtagaactgtgtagagctagagcttcccggaaactttctgagacccaaatcatctggactgaagtctcttagatgctattgtttgattttgtgtccttaggtgattgatataaggacagcaagagaaaaccatgtaagatgagaagaaagcaaagctggctttgtgtatgggctcaagtacattttacatgcacgtacttttttcctgttttggtgaggaaactctgtcaaatgactcttgacgggcgcctcacttagtccctccaagttttagtagagaaaatgataatttttaaccaagacttacttgatcttgacctaagatgatgagaatgagcaatccttctgaaatcttattattttaggtgaaaataaacattcgataattacattttaagacttaccagagtttatccaggttttgttcagatccagaacttatacaatgtcggagtcttcttttaagaatacacgatgacagatacaaaattaggtacacagcttaattaacttcatgataaattctcttctgattatgagttactgctttctttggccagaattgtgaaagaaaaataaggcgtgaggctagaggatggggaaaaaaaatccttgtctatcttgcttcccaagcaggccttcaagctagctaactgaaacagtcttttctccaggtcctaaggtaaatggtggcggatctgaaaatgcgtcggacttaaccttgcccttctccccagtttattcgctcaacaaagagttctaaacagtcacatctgctctctaggcagaacggacgctgcctcctagtattagaatacccaactctttgatatctcccttagggatcatccctattctggagaatgtgcaaaatattgctcttcctttatatcctagcatagatatattctggcacttaacatgcattctttttctgttgaattgagttacaagtcagttctctaggacggttaccgtcctggtggctttggcggaatcttccggtgaaaataggctaagttgcatgaaatgggtgtgtctggattttaccacaagacccctggtcctcaaagcttcgcaggccgagatacctcgcccctttcttctctgtcacacgcgtgcgaacacaccctcccaacccacgtcgtagtagtcccctcccccgaccaccccgccccgtttcccttcaacccccctcctcacgaacctcccctcccttcctacctccctttccttccctccccgcgggccagcggctttggcgctgccctgctgcgcggcggggcgacgcggcgacacctataggattgcttccgggcactcctcagccaggaggtgctggcctggggcccggagctcggcagggccgggcggctccgcggcgttggcccagaggacgcgcgcccccgcccggccgcgtctccttccctccctccctcctcccggcgccccgagccgagctcagcccagggcggcggcttcgcctcgcccggcgaagcttctctccggtggccgctccttcttttccctcctctttgcgtcatgtcgggcacttaatttttttttttttttaattccttcttcagccctttccaccttccatctcccttttcgcttcccaggttgattattttctcttttctccgggcttgcc

SEQ ID NO: 1709 - DNA, 2300 bp, Homo sapien
gccaaggaacaataaatttttaaagaaatgacaagataaaggatcttgagtctctaggggcagcaaattgtcggaaaacaaatatatgggagactagttgcagatgaaggccaaatactaaggtttatcatgtagatttttcttgtgttgtctccaggctgacaggggtctaaaattgtctctggtgattaatctttgtctttcctggtagagcaggaaggaggtacaccttcgtaaacttatatcctgctttttggcaaatagagggagggcagagtgcttttctagtaccgtgtacctatttgcttcttcctaattgccttcagctcaaaataatccttaaaccaaagtggcatacactgccaatgctcttgagtagattgaaggctccaaagtaaaaagtgctgtactgtagtattggatctccaagcatcagcagtgagtcaggtattacaatgctgttttcagtgagtgtgccatccgtctatgaggagaaatgagaggagctagaaaaataaactgacagctagaaaaatactccactgaatcaacaaatagacatttcttgaaacagtaacatgctcaatgtgcaattttgaaaaagtaaactgagcaaggatcatgaaacatgatggtggtgagaatttatacttctcaggtagccaggggaagctaggtttccacagattcctttgtctttcagtccttttgaaaacggagaaaaagcaagagaagagggacggcaccatcaggtagagtggatctcagctagaatgaggggaagtggcccagaatccaacctcctccaaagagctgtgtgacaggcaagtcctatcctttctgcacctctttccttaaatgtaagttgaagcatttggaccagactgtttcaatgatcttctagattgcttttgccaaaacagaactctccattcctgtaagataagtacacaatggctctcagagatctaaaaactggccttggttacctgcaaactttgaggccccaaggcacaaaaataatagctttttttttttatttttttttttaaggttcatgaaagcttcggacacaaaagcttatatggtcttcgtctctataaataaaccagggagtaaagaaaaaccccgctagtttcagtaaagcgttgctattaagcaaagcaaacctatgcaaatatcaagttcttaatgaggagtgtttcctaaggggcctgtcctctggtaccccgcctctcctctgccacagtcatgtgaaggcagacaggcacacactcgcacactagcacgcacttgggagctcagggaacataacactggttagtgagtcggtgtccctctcccatcgattgcaacttttcccctccttccctctcctgcctctccccactttctacatctccgttctcaggaaggctcagggaggatcccccgctgcgtgcactgcgttctgagaggccggggagagactctgggcccgcggtcggggcggagccaaggtcccaacccacattgaacgggcttgaggattacttggagggctcaggatctaggaggagggcccagggcactgggttggggttactctgggaaagctctgtgggaccaggtgggaccttagggctggagatggactctgcgagctgggggcggagttctagactggcaggagcggagttctgggtggcgggggcggggtcgggaccagcagggacggcctctgagagttgggggcggaattctgggccggtgagggctggggcgggaccagcaggggaggcctccgcgagctaggggaggagctctgcattgtctggggcggggcttcgagtagcggtagcgaggtctggagccgcaggcgctgcctccgcgaggtaggggaggagctctgtactgtcaggggcggggctctgagtagcgaggccgggtctgaactatcaggcgcggcctctgcgagctgggggcggggttctgcaccggcgggggcggggttgtgagtggtgggggcggggtctggagcagcaggcgccgcgtttgcgagctaaggtcggagttctgcaccggcgggggcggggctctgcgtggccggggcgggctcgggatccgcggggcgactcccggtctggcttgggcaggctgcccgggccgtggcaggaagccggaagcagccgcggccccagttcgggagacatggcgggcgttaaaggtacatcgcggtccccggctcgcttgtcgtgtggtggggttgccacctccgttccggtcaagcctggggctgcgccttccgcgcgccgttgggg

SEQ ID NO: 1710 - DNA, 2300 bp, Homo sapien
gacctactctgggctggagcatcagttgcggccgggcccttgtggtagtaggagctttgggttgaacataagttttcagcaggagtgcgtggagtgaaaagagagatggggttggatttttggtcaactccaactttaagagattcagaggatgtgattcctgaaaaaagaggaaaaaaaagaccaaaaagaatcaaacagaaagatggttgtgaacgttgagaaactggtatcagaacagaaggaagaggtctgcagtacctagctttgacaggcctcatggaggagggggtactgccgatggtcaggcacagaggagaggagcaaagcctgctgggaaaagatcatctgaatgaaatagtatgtggtatttgctttccatccacacatgggcattttccattaaagagtggaaatgtaaaaagatatgttaaaattgacagtgtttctttgtcccttaacatgtgtatactttcagatgttttttaaaaagcactttggcaccttcctattaaagagtctctctaaatcttctctcaagtaaaaggaagcaatcaaaaatgttcattggcttaattaattagtttaatactaattatgagtattatggacttttttcagaagaaaatttggataagatagtctcctatgcttttgatttctacctttatcaaagaacattgctaaaatgagtagatacctgagtcagtcagcatttatttggctacctccttttgccaagcactttacatagattatctcatttaattcccataagctcaataaggtggcaccattatttccattttacaggtgagaaatcaggttcagaggattagcttctacccaaagtcataagaccagatggtggcagagttaagatttgactcatgtttgtgactcagagctcaagattttgtaacaaccttgatactctgtttctcactcagcagcacaacaagggcaaatacgttcctactcccgcagagactagtgtccaatagatacagggaatacatattttattcagtgcacactagttgggaattgtttcctacaaagacatgaaaacaatcttcaaatacttgcagtactgtggtttggggaggcaaaatgatcaaaggtatatattacagggaggcagttctggatataatttaaagaaggagggctttcaacatttagaagctgttggaattaaatgacttgccttgggaggtagtgagttttccttcactggagttatgtggaccaactggctgccctctggtgacaaatacagagggaattcatccattggataggggttaggtactggaattacttgagacctttgtatactttatgatttcaaggtggcagacatgggtcattgtcttaatcagtttgggctactataagaaatatattttagactgggtggcttaaacaacaaacatttagtttccacagttctgaagactgggaagtccaaaattgtggtgcagtcagatctggtgtctggtgagagccagcttcctggtttgcaggcctgctttctgctctcacattggagaacagagggagagaaacacagagagagtgtgtgctctactttctctcttcttataagggcactcatcccatcgtggagaccccaccctcatgacctcatctgaacctaattatctcccaaaggtccacctcctgatagcatctcacggtgagagggatggagccgggaaggtttcaacatgtgaatttgaaagggacacacataatgcagtctgtaacgggtcaaatgtaacctcaataaaatgagtaaattgctacatttgcttgaatttgggacctttttttctttcttttttattttagtaaatgtttttattgataaatgattcacataccataaaattaacattcttaaagtgtaagatttcatggtttttagtatattcagaaggttatgcagccatcactactatctaattccagaaaatttactcatccgccaaagaaactctggacctattagaagtcactccccatttccccaaaccctctagtgcctgacaacctctactgtgggaactttaacttttggctttatttttcacagctctcgtggcattatccttcagtggggctattggactgacttttcttatgctgggatgtgccttagaggattatgggtaagttatcatttcaaaaagaactattcctctttctgtgtctttgtcactattagtatgggtgttagagagttcggtcaatttagcaccaagttctaaccagtgagttagtggagcccagtt

SEQ ID NO: 1711 - DNA, 2300 bp, Homo sapien
ggatttaatccttcttttcttgtctttcagatcaaatggggagcctgcggccttgtgttggcaggcaatgcagtcattttccttacaattcaagggtttttccttatatttggaagaggagatgattttagctgggagcagtggtagcactttattctgattacagtgcattgaatttcttagaactcatactatctgtatacatgtgcacatgcggcattttactatgaaatttaatatgctgggttttttaatacctttatatatcatgttcactttaagaaagacttcataagtaggagatgagttttattctcagcaaatagacctgtcaaatttagattatgttactcaaattatgttacttgtttggctgttcatgtagtcacggtgctctcagaaaatatattaacgcagtcttgtaggcagctgccaccttatgcagtgcatcgaaaccttttgcttggggatgtgcttggagaggcagataacgctgaagcaggcctctcatgacccaggaaggccggggtggatccctctttgtgttgtagtccatgctattaaaagtgtggcccacagaccaagagcctcaacatttcctagagccttattagaaatgcagaatctgaagccccactctggacccaggacattttgatgagatccaaaggagttgtatgcacatgaaagtttgagaagcatcatcatagagaagtaaacatcacacccaacttccttatctttccagtggctaaaccacttaacctctctgggtgttacctgctcatttgtttaaaaaaaaaaaaaaagtctcacctgctttcatgctgaggacaagttcagatgttcaagcctataatatttaggcagttcctcaaatttatgaaaagtgttctcagaattgggagacagtcaaagggtacaaagcctcagttaggaggaataagtgtgatttttttttaaagatcacttgcacagcatgctaaatataggaataattgaatgtatatttcaatattgctaagagagtaaatttctaatgttctcataaaaaagttaaatatttgagatcatatgttaattagtgtaatcattccaccttatattcaaaaatcataaaaccgtattgtaccctataaaaatatacaataatttgtcaatatataatcaaaataaaaaacaaaacatactctctcccccaaaaaaacatctcagtggggaacagatgtatcttttcatctgaaagacaatgctgggggaagagctccactgagatgcgggcagggaggctgggctcgagccagcccctgcgttagcaggagggggagaacagataggtaactcttttacatttcctttatgatctggcacttctccccagctccttccctctgccccccacccctactcctcaacagttctggtttgccctgacttctctacggctctggcttcttcccgaagagatataggagccatgtaagcacgcagtgggtgaactgcttaatttcactacgtgttgatgtacttgtcttccgtcctgtaggtcttttctatataactttatgccacccttaaatgaatcattgggtatacctgtcatgttggatcctgtaatcacagttttccctgctcacctttttgtctaagatctattgagaaagggaaatatgggaaggagaaccatttgatcagaatacaaccaatagtctttaagcattgttaaagtatgaaactgaaatacattcaaaacacttaatccttgaggcttgtgatctgagtaattagcaggtatgatgctgggactggaaaatagaaagtaataactaaagggttaatgtgcaacgttattttttggccttgttcatgattttatgttttcagtgtcctgtgtacatatagaattgttaaagttgtcatttccaatatttatattagaaaaattatttagatactttataattttaaccggcatttttaataatgacacttgcatttattgtattgtaataaatttcacttttaactttaaaagtttaactttaaaatttttttgtgatgttgccttgcctgaaaagataacaaaaatgagagaatttcttgatgttttaaaatgggcagttttgagcaataatctgtcctaacagaacagtagcaataagttttaggataccatcttgaatgtctagttggtgtgcaatagcttttctttctaagatggcaataatgattcatttctactacattttgcaaaagtgtttttgttgcttatacacattttcaataaccaaggtagcctt

SEQ ID NO: 1712 - DNA, 2300 bp, Homo sapien
gcatgagccaccatgcccggcgatacttatttttagtagttcacaatgaaataattaattatatttagtgccaatacaatttcaaataatgatgctggaatgacacccgataccacagtaggcaatgattttgatctctattagtttactagttatagtgggttaaatagtgacttcccaccaaaaatgcccacatcctaattcctgtaacctgtgaatgtgaccttatttggaaaaagggtctttgcagatgtaactacgttaagaatctcgagatgagaccatcctgaattatctggttggtccctaaatccaaagacaaatgtcctttacaacaaaaagaagagaagagggcacagacacagaggagaaggcaagtgaagatgaaggcagagactggagttacgtggccacaagccaaagaattcctgaagccaccagaggcaaggaaggattttctcatagagccttgggagccagtacacacctgctgacaccttgattttggaattttagtctccagagcagtgagagaatacatctctgtttgagcattaagtttgtggtaatttgttacagcagacctaggaaactaatatgttagttcgtactgattatttaattaaaggctctttttgtattgttttgttttctaaatagtctgcagaaacctacctcaatttttgtctccatccaatagagacacctgtctgtctgttgagatttggtggaaatccaagggttagtgtttctgggttatttttcgcctaccacagatagtgctgaaagcccatttagtacacaaatatgacacttctgaataaagtggcttcaacaactggtctggagatccaagtgctattcaaaaaagtgacactcgttctgagaggcgattcctatgaaggagaagctccatttgcgaagttatagcaaggttccttccataatgcacagcagctgggccagggagccgggagtcgtcgcttctggcctacccatctctgggctacttcccgcaactcactttccctgtgtgcctggaatgcttcttcctatgaggccgttagtcaaattaagtagaggcctttaaaaattagccatccatccaatctagagaatgtccactacgcttcattctttctcccttaccctgttgatttcttccatatcacccagcgctgatggtaattgtatgaatacatgcttatctgtctgtcctcccacccctaactctaaattcaaggaactctataactgcacctagcatattgtctgacactcctcaataaagacgcatttaatacatagacaaataatgagtgaacattttgagtggagggccggaaaatgtctatttactttggagttggaatcagactgttcaagagtactttcaaaaaaaattttgctacgtcaaacatcattgaatttcaggattgaaagagtggtggtcatatagctcaatcccctccaaacacccccacccaccagatgcgcgaatgccctcttcagccttcctgataagcatgacgaagatgctggcggaagcatccctggtatcaggaaactcatgacctcactagttttgatcttttccatttagctttcttttcccactcctcccagttattgcaaccttaattgtagcattttacacaactgctgctgcagagttctggaagtctgggggtgggagggacgggggaaccccagtgcctatctcaagcctgcggtcaccgacgcgggtccggggtgggggggtactgccagggaactcgcggcaccgcgtgcttgctgagttcgcctgggctctcggcctccctgcgggcaggggtcctccctccccagcgccgggtctctcctcccgcaggcccgcggccacccgcagcggcattccccgccgccgcccccgccacctgcgcgaccgccctagccgctcgagtccgctcctcccgctcaggggcggctgcggagggcgcggggcgcacgcgggcggccacccgactcttccctcccttctccccaccccagcctgctcctgctcagccccacctccccacgcactcggctgccctcctcctctcctgagagttgccccgcaccttgggcgaggagttcggagcggccccatcgcagagcccacggccagccgagcgcgcgcgacgcaggtgcccgagccccggcgccgccgccatctctgccttcggtcgagttggacccccggatcaaggtgggacctgcttccctctccgacaccccctattgccacctcttcccgctctgggtaactcgagaatggg

SEQ ID NO: 1713 - DNA, 2300 bp, Homo sapien
ttctccttttgtcatctgtatgtatgtatctcttttgccttcttccttctgcttctgctccagtttttgagagacagctttgcattttacgacacacctctcatttcccagaaaacatacttttgctggcactttctgatacttctagtgctggttcccattgcctctccctgggccttttccatatgacttctgcccaaactcagctgcttttggtaacctttagaagcgctttggggtttgtaggtaaaatctatataaatttgttgaaaatggtgtttgacagtttttttccattctctttgttagtttatgtaatttttagaaagagatgagaaagatgcttaaaaagctgacatcattttctactggaatccgtatataattctttttgcagtaagaactctttggacacatttttctgaagatgatgtaataaccttgggaggcttagtaattattaatacctttcaaatttctcatattcaaaaaggggcagcatgatgctcaaattggttctttttttcccctagattgaactacaatttagattccttacactctctttaggcaatggttgccttatatttaatacatctaactaatcctaactgtagttcagaaaaagagattccattatcatcattttacagatgaaaactgtgagaacaatgactacattgcggattttgttggcttcctttcaggtgcttattgcctcactattattaattttggctttgggctcaatttcaaggttatggatgaggtagatggtatagtgtaagcaacaggtccaaaaaggcagaataaccagcgaacacttggtagcatctcagatgtggggaaataggtgttttatactccaaacgctagtgtttgaatatgtttcctccaaaaccatgaaggggaaagttcattaagttcctacactgataagctcttagacatgcctttcaatgtacaggcatgtaaagctattttgggtgaatgggtgaatagtaggttattaggttattgcccttctttgggaggtccctatttgtcctttaatacacagttcagatgggatttaaattccctgacctgttccttctcttacatagaaaaaattgcttccacttatgcaattggcatgtgcttctgttgtgaaatacttgtgttgtttgtctcgggctttcatagttggttctcctattaggcagtgagctccttgggtgcagagactatgtcctaatcgactctgcatccttagcttctgcaaagtgctcagtgcacagtaggtgtgcatgatgtttattggaataaatcgagaaacaggcgaatgttgtctattaaagtcattttggtctctagctactgtagtagttggataggcaaagttacttcatgcctatcttcctcctcttttccttgccagcttccttctttttttctctgactgaaagggctggacaaccggggaaaaggaaacttgtgctttccagcatacctctcccactctacacacacacacacacacactctctctctctctctctctctctctctctcgctctcgctctcgctctctctccatcctgttgcatttttaaagcaggctcagtcaggttactgagtgcctgttgctccatcacacgaattcccaagttgtgggactcaccttcaggggtgtcttggtggagcacctcttgggaggtgatctgacctgttggttcaggagcactgcgcgtattcactctggcgctcctttgtgcaacaggagaccagaggactcccacggtcccactggctccttccacgtaatgtgccccgctggctctctcgcctcccccaacccgggggtctgcgtcccctgcgccccagtccctctttgtgcagccagtagctgcagagctcttcgtcttgtattcatggcagatgcacagcgagtgactgacacgttccagggacggcgaatgggaaagagcgcgggcggccgggggagggtgtgtagtggcagacggccgctgggattatgaatgggggctggggggccggcgagtgtggggttcaaaccaggattttcggtctctggctttggataggcacgcagggctgtgcgtaatccttcagctctggtggtaagggagatgcagtgagctcccggctgggagagagggttattttgcaaaactcccctggtaccgtgcccgcggaatattgcaggaggtctgtgaggtaggtgggggaaaaaataacctgggagggcaatcagggagaggccagacgactggggacggcgtgctttgcaccctaga

SEQ ID NO: 1714 - DNA, 2300 bp, Homo sapien
aatgactacattgcggattttgttggcttcctttcaggtgcttattgcctcactattattaattttggctttgggctcaatttcaaggttatggatgaggtagatggtatagtgtaagcaacaggtccaaaaaggcagaataaccagcgaacacttggtagcatctcagatgtggggaaataggtgttttatactccaaacgctagtgtttgaatatgtttcctccaaaaccatgaaggggaaagttcattaagttcctacactgataagctcttagacatgcctttcaatgtacaggcatgtaaagctattttgggtgaatgggtgaatagtaggttattaggttattgcccttctttgggaggtccctatttgtcctttaatacacagttcagatgggatttaaattccctgacctgttccttctcttacatagaaaaaattgcttccacttatgcaattggcatgtgcttctgttgtgaaatacttgtgttgtttgtctcgggctttcatagttggttctcctattaggcagtgagctccttgggtgcagagactatgtcctaatcgactctgcatccttagcttctgcaaagtgctcagtgcacagtaggtgtgcatgatgtttattggaataaatcgagaaacaggcgaatgttgtctattaaagtcattttggtctctagctactgtagtagttggataggcaaagttacttcatgcctatcttcctcctcttttccttgccagcttccttctttttttctctgactgaaagggctggacaaccggggaaaaggaaacttgtgctttccagcatacctctcccactctacacacacacacacacacactctctctctctctctctctctctctctctcgctctcgctctcgctctctctccatcctgttgcatttttaaagcaggctcagtcaggttactgagtgcctgttgctccatcacacgaattcccaagttgtgggactcaccttcaggggtgtcttggtggagcacctcttgggaggtgatctgacctgttggttcaggagcactgcgcgtattcactctggcgctcctttgtgcaacaggagaccagaggactcccacggtcccactggctccttccacgtaatgtgccccgctggctctctcgcctcccccaacccgggggtctgcgtcccctgcgccccagtccctctttgtgcagccagtagctgcagagctcttcgtcttgtattcatggcagatgcacagcgagtgactgacacgttccagggacggcgaatgggaaagagcgcgggcggccgggggagggtgtgtagtggcagacggccgctgggattatgaatgggggctggggggccggcgagtgtggggttcaaaccaggattttcggtctctggctttggataggcacgcagggctgtgcgtaatccttcagctctggtggtaagggagatgcagtgagctcccggctgggagagagggttattttgcaaaactcccctggtaccgtgcccgcggaatattgcaggaggtctgtgaggtaggtgggggaaaaaataacctgggagggcaatcagggagaggccagacgactggggacggcgtgctttgcaccctagaattgacaggtggtggcctcagcagttacaacctactacacagcatctcgtccgtgcgatacggtcacattgttattccccgcacccggctgaggagcgcagcgcggcagaccaagtggcaccggcgagctgtctctcttccggggggcgggggtggacagtagggagagggggtttaaagggccagaggacgagagaagagctgaggggcgcgtcgccagcgcctgtgtctccctggcgcgggttccccaggctagcccgctggcccgtccgcgcgcgcgcccccggcccgcgcgccccttcccggggctcctggcctcgcctcagcggctgcaggctcttcgtcgcgggccgggctgcacgcgagcgccctccgggcagactttcgtcccccacccccgggagcgcggaaggctcactcgcagcgcatggtctacccgcgccgggcggagccccggcgtccagagcgctgcggccgcggcggtgcagcagaggcgcctcgggcaggaggagggcggcttctgcgagggcagcctgaggtaagggctgcctaggaggctgcgggtttatttttcctcattctcttacttcatcacacactgaagcctcaatggagagtgtagggtgctgtggggctgatgtggggcaaagagggaatggggccgccgggc

SEQ ID NO: 1715 - DNA, 2300 bp, Homo sapien
ggcagttaaaatatctttagatattaaaacatgcattagagcctacttgaacaaaattacaattttgtaattgaattaaagatcattccattgggaatcaaaaaacctgggttttagttttagctctaacatcagcagctaatatgattttaggtaagttgcttaaattctctagctctgttaccttgtctttggaatgagaagctgaacaaggtgattactaggattcagtgcaaatctaaaattctataactgtgcttttgttcataatatattttagttaattattgaaatgttctgctttccagagtagtaccgtaaaccagtaatttaaacccttcctactatgtttcaaccactttcccaagggctggtatgggtcttacttgctcctacatgtaggagttagtctgctcttatttagtcctttagatatttagcacattttagcctgaatatctgacacagatgaatgatttttttttttttttgagacaaaggcacactgtcaccaaggctggagtgcagtggcgtgatcttggctcactgcaacctccacctgcttggttcaagtgattctcgtgcctcatcctcctgagtagctgggattacaggtgtgtgccgtcaagcctgggtaatttttgtatttttttaaggagagacgaggtttccccatgttggccagactggtctcaaactcctggcctcaactgatccgcctgcctcggcctcccaaagtgttgggattacaggcatgagccaccacgctcagcccaaatgattttataagcgtagaagacatctctcacatcttagtgggagaattaaatgtctctctttttcactgaagtcttaccgagaatcatttcttttctgtcactcttgctgatcttgctgatgagccctagttctgctttgtcaaacttatttgagatcaggctggcccttgtgacaatcattgccggtatagacttttcataacatccagaaacttcaagcaccactatattgtttctacttcctcatatgccttttaaagtatagaagctgtattccaatatatatctacatgttaggttacagtgatctgcttttggacttgaggcattttttggactcgcctgtccgtaagtctcacttgcattctttgtgaacaaagaatacacccactctcaaatgtatatgcccacacacaagcatacagtatcttgtacacctatctgcacacacacaaacacatgcatagtgcttgactttggactctgtgctttaactgagagtattcatttttcctggttgttaccttcattccagttttgtgagctttgctgtcaaagtggctgtgcatctagcatagagtggctgctgttggcaacccatgaacaatgagcttaaacagaagaatgagggtaatgtttattgtaataaagattgggcattaaattccttgggggaatgaaccaaatccaatgttttcctgttcgctgacattttttatattgatgctgttttggatcttctggagaagggaggaaaaaaaaacttcagcaaatcagctctttcattcaaaaatggaattcagaaggctattttagctagctttttttgacaatcctggatttaatcagtttttactgtgatgaagacagttagcctcacaaattttgtggaaatctaaagcgatgaagggtgttgttaagggggaaacagagtgcaattgtttaaataatcctgggccaatagcatttggtaggtggagttactgttgtgtgcattacagagcaagataattctgaatgaagactttaaacattacacatgctggacggattctgggtctgctctttgtgcaaacaaaacaagtgactaggttttgcttactatccattagtgaatgcagcttgtttaataagattttttttaaaaaaatgcatgtaaaggatttatcaaaagcctttatgaatatttcatgagttgatatattcagctgaatgaattcagtgagtgtcagtgtgtagcttgcagacaaacctcatccacaaggaggctactgacattggaagcactttggcgcattttcagaggcaaagccagcctgataaagctccttgtgacagcctgacttgctattcttcgagtatgctgctcttgctctaagacgctcatacattggagtcacagcttcgtaaattaaactggaaatagtttgcagacttatcagtcttctgacctgcagcagtgtctctgctatgtttgagatttttgttttggatggtgaaagctagcactccttacaagac

SEQ ID NO: 1716 - DNA, 2300 bp, Homo sapien
gatagttgctgcaagtctaaaaaaacttgaagtgtacccataccaaacctatctgagaggattgctctaacacactgtaaaacttacattgggaggaagaaggcaggcagcctgggtttctccacctttcccttacatcctaacaatggcccccactcctgcacctcagtgcttgcactcacctccagattttacatgatacttttttcttacttacaactccctatattctttagaactaccacttcaagcccattccaattaagttctgaactctgaaatttcacctctgtaaaaaaaaaaaaaaagtctttcctaattaacctcattagattttgatttcctacttagcagcctttcagaaatctccaacatgttacatctttggatgcatcacctggtctttcactaacttgttctctgtgcatttggtacaactcccagttggctgcaaacttctttgatgcatctgccagccctttggtagtaataatactaatactaaaaagctaacatgcaggtcttattatgctccagacaaaatgctaagtaatttactagcagagtatttgaatactgtctggcacatagtaagccattaatacaggtttgttattattaccatttatagctcaattaacttggcattattattctctccatttcaggataagaaaactgtgaggcacagagaattacataaattgctcagagtcacagagctcattatgtggcacaaacaaaacttggtgcccatctatttgacacgaatacccatcaatgttcttaatcattacaaaacatttgctaaacacacacacacatgcacacacacacacacaaatcaatcctttttgcaataatacccctccagttttcagagcagtgtaagttgtactcaaggcaggttttacttaggaattcattccccttttaaaatttaactgtcttagagacataagaaaaaagtcacaagtatttgtatctccctgaagaatttcattttaaaatttagaggccactgaagtatgtgtccttagggagaacaatgggtttttcaaaacttctaaattgctaaggagctgtgttttgcttttcaactattaatatgctacttcagtcagtcaccagtacgtcatatttgctttggtagaaagagctaggccatgtccagggctgagcaatagaaaaagttcatgagtatattgctaatagaaatgattaataatacattacaggctcaaccctgatcataccatgcatcttcttccagttattttgagtacattttcattggatgctcacaattgctctctattgtaacagcttttctcctggtcatactgtgagattatacagggagaaatgcccacttctgatgttgtttttcctgagttctaaagaaggcgttccctttcctcccatctcctttcctttttctctgccttctctctctcataggctgccctgcccttttcttccttcgctgtctgagctttcttgaagggaaccaagggtcgtagatcccccagggctgggcccttctgaaaggctccatggtctctggagagcagtcaggtgacagactgaacccaaccgggcccagtgacacaacttcccacttaggcaactacacagcccccagatcccattcctggcagcttcaaaaccctgggctccgccacaaccaggcacaactgcctccctccaggtttccacttgggtgaatgaataggcttgaaggcgactccagatgcaggaggcgcgtcgcggagaaacgtgtcatttaggagaaagtttgtttcctacagagactgcagttggcagctgcagccccagtcggttgcgagaaaagctccccacctggggaagcgaggccgctcccgtgtgcgctcggcggggaggacgcggtggcggcgggactcgaactcggtcgtcgaagggcgccccgcagggtcccgtctgtagcccggacggcgagcccaggttggagtgggagggagccggcgtgcacagctgtctttggtcgggctcaggcttccgctccctgcctgctcccctttccagcctcccgccccagaaacgatctcgagcgttgccagtttgattccagagccccactcgggtgggttcttttgtttctttgttttaatgacagttcccagcccttcagcatgtcatgcgcaattaattccctggctctcacgaaggcagctggggtgaaatttcttctgcatcatccttttggggatgtttatgatgtgacgtcagtcggattgatttttctctcttgaatgaag

SEQ ID NO: 1717 - DNA, 2300 bp, Homo sapien
ttacttacaactccctatattctttagaactaccacttcaagcccattccaattaagttctgaactctgaaatttcacctctgtaaaaaaaaaaaaaaagtctttcctaattaacctcattagattttgatttcctacttagcagcctttcagaaatctccaacatgttacatctttggatgcatcacctggtctttcactaacttgttctctgtgcatttggtacaactcccagttggctgcaaacttctttgatgcatctgccagccctttggtagtaataatactaatactaaaaagctaacatgcaggtcttattatgctccagacaaaatgctaagtaatttactagcagagtatttgaatactgtctggcacatagtaagccattaatacaggtttgttattattaccatttatagctcaattaacttggcattattattctctccatttcaggataagaaaactgtgaggcacagagaattacataaattgctcagagtcacagagctcattatgtggcacaaacaaaacttggtgcccatctatttgacacgaatacccatcaatgttcttaatcattacaaaacatttgctaaacacacacacacatgcacacacacacacacaaatcaatcctttttgcaataatacccctccagttttcagagcagtgtaagttgtactcaaggcaggttttacttaggaattcattccccttttaaaatttaactgtcttagagacataagaaaaaagtcacaagtatttgtatctccctgaagaatttcattttaaaatttagaggccactgaagtatgtgtccttagggagaacaatgggtttttcaaaacttctaaattgctaaggagctgtgttttgcttttcaactattaatatgctacttcagtcagtcaccagtacgtcatatttgctttggtagaaagagctaggccatgtccagggctgagcaatagaaaaagttcatgagtatattgctaatagaaatgattaataatacattacaggctcaaccctgatcataccatgcatcttcttccagttattttgagtacattttcattggatgctcacaattgctctctattgtaacagcttttctcctggtcatactgtgagattatacagggagaaatgcccacttctgatgttgtttttcctgagttctaaagaaggcgttccctttcctcccatctcctttcctttttctctgccttctctctctcataggctgccctgcccttttcttccttcgctgtctgagctttcttgaagggaaccaagggtcgtagatcccccagggctgggcccttctgaaaggctccatggtctctggagagcagtcaggtgacagactgaacccaaccgggcccagtgacacaacttcccacttaggcaactacacagcccccagatcccattcctggcagcttcaaaaccctgggctccgccacaaccaggcacaactgcctccctccaggtttccacttgggtgaatgaataggcttgaaggcgactccagatgcaggaggcgcgtcgcggagaaacgtgtcatttaggagaaagtttgtttcctacagagactgcagttggcagctgcagccccagtcggttgcgagaaaagctccccacctggggaagcgaggccgctcccgtgtgcgctcggcggggaggacgcggtggcggcgggactcgaactcggtcgtcgaagggcgccccgcagggtcccgtctgtagcccggacggcgagcccaggttggagtgggagggagccggcgtgcacagctgtctttggtcgggctcaggcttccgctccctgcctgctcccctttccagcctcccgccccagaaacgatctcgagcgttgccagtttgattccagagccccactcgggtgggttcttttgtttctttgttttaatgacagttcccagcccttcagcatgtcatgcgcaattaattccctggctctcacgaaggcagctggggtgaaatttcttctgcatcatccttttggggatgtttatgatgtgacgtcagtcggattgatttttctctcttgaatgaaggatgggaggggagaaagagagacggagagagagagagacgcacagatgtgcacggaggccacagacactgacatttggaattccttcagggtaaaaggacaccggaatgggagcttagaagtgtgttgctaagatttccggctgcacggaattattaagtttttcttaaaaaaacaaaaaaagaaagaaagaaagaaaaagaaaagaac

SEQ ID NO: 1718 - DNA, 2300 bp, Homo sapien
caaggcaggttttacttaggaattcattccccttttaaaatttaactgtcttagagacataagaaaaaagtcacaagtatttgtatctccctgaagaatttcattttaaaatttagaggccactgaagtatgtgtccttagggagaacaatgggtttttcaaaacttctaaattgctaaggagctgtgttttgcttttcaactattaatatgctacttcagtcagtcaccagtacgtcatatttgctttggtagaaagagctaggccatgtccagggctgagcaatagaaaaagttcatgagtatattgctaatagaaatgattaataatacattacaggctcaaccctgatcataccatgcatcttcttccagttattttgagtacattttcattggatgctcacaattgctctctattgtaacagcttttctcctggtcatactgtgagattatacagggagaaatgcccacttctgatgttgtttttcctgagttctaaagaaggcgttccctttcctcccatctcctttcctttttctctgccttctctctctcataggctgccctgcccttttcttccttcgctgtctgagctttcttgaagggaaccaagggtcgtagatcccccagggctgggcccttctgaaaggctccatggtctctggagagcagtcaggtgacagactgaacccaaccgggcccagtgacacaacttcccacttaggcaactacacagcccccagatcccattcctggcagcttcaaaaccctgggctccgccacaaccaggcacaactgcctccctccaggtttccacttgggtgaatgaataggcttgaaggcgactccagatgcaggaggcgcgtcgcggagaaacgtgtcatttaggagaaagtttgtttcctacagagactgcagttggcagctgcagccccagtcggttgcgagaaaagctccccacctggggaagcgaggccgctcccgtgtgcgctcggcggggaggacgcggtggcggcgggactcgaactcggtcgtcgaagggcgccccgcagggtcccgtctgtagcccggacggcgagcccaggttggagtgggagggagccggcgtgcacagctgtctttggtcgggctcaggcttccgctccctgcctgctcccctttccagcctcccgccccagaaacgatctcgagcgttgccagtttgattccagagccccactcgggtgggttcttttgtttctttgttttaatgacagttcccagcccttcagcatgtcatgcgcaattaattccctggctctcacgaaggcagctggggtgaaatttcttctgcatcatccttttggggatgtttatgatgtgacgtcagtcggattgatttttctctcttgaatgaaggatgggaggggagaaagagagacggagagagagagagacgcacagatgtgcacggaggccacagacactgacatttggaattccttcagggtaaaaggacaccggaatgggagcttagaagtgtgttgctaagatttccggctgcacggaattattaagtttttcttaaaaaaacaaaaaaagaaagaaagaaagaaaaagaaaagaaccccctccgcagcgagccacttaggtgctgctttcacgccagagtcccctgttaaggtggcagcccttgataactaatctcgggcacccagccgcttctgtaagcttaaggagacgacgaggaggggcgggggaagtgcgtcaccaggtggggaaggggctgtgtatttggtgacaagcgggaggcgatgggggtggaggggaatggggacgggaaataggttctgtgtgctctccgggggtattgtgtcaggagatgcaggctggctaccatgtgacgcggtccaaagctgaagggattggccgaggcagcgcaggcggtgcagctcggccagcttgccgttcctctccctttctctcagcatcttcttggtagcctgcctgtaggtgaagaagcaccagcagcatccatggcctgtcttttggcttaacacttatctcctttggctttgacagcggacggaatagacctcagcagcggcgtggtgaggacttagctgggacctggaatcgtatcctcctgtgttttttcagactccttggaaattaaggaatgcaattctgccaccatgatggaaggtaggatgctttctgctatggttgactggcttcaggcaaggtttgggcagaacagcattaaagaatatgtgcagccagtgtatgtggcggttctagaacctggttgccaatgt

SEQ ID NO: 1719 - DNA, 2300 bp, Homo sapien
taacctcaacttcaacagggccacctacaaatgcttcatcttcctcccctctaggacatagggtatagtctgaaacacctgggatcaaaacctagatctgacatttgttgggtgtgtttccttgagaaatggcgtctgatttctcttattttcccccttgataaatgggataattcttttcacatatgcttgttatgtggctcagtgaggtaaaatatgggtcacaatgcttaccatataataagaatccaaatatgatcattctaatcccaacaatgcaaactgcctttttatgttttcagcttctttccaaaaaatgttagttgtctgctgttagaattagttcaactgggagtaccagcactctcccacaatttgagggtagaaatcttggattcctctttaaccttccctctgctttttctcctatggctgactgatctgttaccaagaaccagcaatccatcctttcaaacatccttgattcatcccatcccaccaataactctatccatatccttagcacatcttgcctgaatcgatgcacatgttttaaattagtttttctttctccagttcttctgccccaaggctatcctggaacatacttccagaactccttaagattctgctttcagtatgcaccaccctagctgagaagctgcagtagctacctcaagtccaaactcttcccctggcctgttggcctccgtagtctcatctccccatctcccgctgtgcagcttcttctccagccatgtcatccttgctgttgcccctctgtttccccatctgagtcacccagtgtccactcccatcttggtgtctctgaacaggctcttccttaccacctagaaggagctcctactctgccctctcctgtctgtcctgaaagacccataaagacctccctgattcttttaaacctcactaatttccttttcttggaaccctgtctaacacaggtgttttgtgttttgtattttctttttaatttttacctaccgaaacacacttcaatttccctgaggacaaataatctacatttcttatcacccatgttgcttagcacagtccttggcttacaggaaatgcatgttaaattctgcttgaatgctttctttcattgacagttgattcctcctcgtttattttcccagtaggaggactctccaagtatccttgagtaaatatctaaacatattgctcagaattcacttccaaaagtaaaaacttcatctcctaaaagaaaagacttttctatatccttaaatagaagactctagaaaaaaaataatttcttgatcactgttaggataataattacttcatgtgcacttgtgttttatagaactcacctgagctggatgaagaaggctacagcatcagacccgaggaacccggctatatcctttctttatttttttattttaattttcattcactctcagaaaacagtaggataaattcagattttacaaaagtaataaaataaccgaatcttcacaagtcctgttatccctaatattagagatgaataaacagcactgagaacaccctgagctctagcaagcaggcattttgccttaatctattcatagaaaagagagaggagaaagagaaaaacgtgctaaaaaaacgctaatccctgatatgactgtcatttacagtgactagaaaatagctcttactgtcctctccctacaattcaactctgggcaaagcatgtcacactgatgcatttaaaactcatcgaggatcattcataaagcagccttcctctctctgtagatgagtaagctcacatgtgcttgtctgtgtgtgctgagtatgacacaacaaatggtcaactgcagcaaaaatgtaggatattagaaccattgcttcttgaaattcaccatccttgatcatgttctgaggaaaggtgaataaattctaaccccttcctcctttacttttgtatgttttgctttgattttctgccatctaaggatacttttgctgtctctatatgcaattgctcttgtcttggagtcgttgcctcccagtagaagaaagagttatgtatctttaactgtgttctacctaccaaaggaaagcacttttattcttcaagtgaatcggaagaagaagaagaatcacataagaaatttaatatcaagattaaaccattgcaatctaaagacattcttaagaatgctgcaactgtagatgaattgaaggcatcaataggcaacatcgcactttccccatcaccagtggtgagtgttgtgtgtgtgtgtgttaagctttagtgagat

SEQ ID NO: 1720 - DNA, 2300 bp, Homo sapien
aactgacttggaatgtcaacttaatgtagtcaaatggtgtgagggaggtagagaatttcagcagcaaattctctgaggttggtagctcaacatttccctcccactgcaatacttctttttgacatttcctatggtacttgaaccaaaattggggcaaatctaaagtaattcaagaactaaagttttaagagcaagtctaaaccttctacacagcaattcatataagaagatgcccctaaatgactttggatatgaaatctctcatgacagctgtgattacacaatagcaaatctgatgccacaggtgaaaacaggactttttgtgtattgtcacactcgaatgaagaagagctcctatacaactgccttttattgaattgaagacaccctcgattgaaaaatgtaccattattttttatacgactaagaaaggggagaaaaactactggttgagctaagataaaatgtttttttattacattaattatttcagacaggttataatatgaaaaagtgcacagtttagaatcaatgagccaggtatggtggtgtgcggtggtaatctggtggtaatgccagctgagatgggaggattacatgaccccaggaattcaggacaagcctgggcaacatagcaagattctcatctcagtttttaaaaataataaataaataaataaataaataaataaaaaacagtaatttcttttgcactagtaaaagctcacaggacctctactatatgatttgggggaaaatcctatcaatattatgaggatagagaaattgcttaaagttattctaagaaacaagcaccttgacatttcaagatacagagataacaatagagataatgaggaatattatcattaaattgtaaatatggagtcaagctaatagaatattttctgaggaacattattatttgtggaatattttttctaccctcatccatttccttctctgcatttttctttcttactggtctttgtacagattttattcaattttctgttaaagttgtaatagtatgcataagacctgtggcattgagtacttttttaaaatcccacatagagtcaaaaatcccaattacttgcatttgttagttgctgagaagacagaccttataaagagctgaattggttaaagtccagagcaccaattcatgatgttgtgaccaatttacaaagacattcagacacagctggataccatagacaaagatgaaattatgataatgctgttcaaaattaacggtccataactatcaaaggcaggtgcaaggcaaattgaatttggatattgatgaggctgaaatgggatagttcatacagggaccttggatttatactgttgcttttttatggccatgttaaaagcatctactttccccatgggaggaaggtgcatgctgagtgatcctgttgagctgtcactgctctgtcaggagattcttgttgatggacatatgtctgaccacttgagaattgtgttggagtgaaatacacttgcataagtcaattattaatgacagttcctttagcaactcccagagaaggtggggcatgacttcttccctggagctgacttcagacaaattcacagatgctaaaccctggcttttttttttttttaacattttaatttcctctcatagaatcatcacaaaataagaaaacacttctttatatcgtaatcataattccagtgttttcagttttgtttcctttttccactaaaatcattcctgtgtttcaatcagtaaagtgggcttcttgatttcatttgggatttgtatttgtgtttttgttttccattcgtttatgtttctttggttcgtagtgtcagaagacgatgttttttatgacaaactgccctcgtttgaaaggcgctgtgaaacgcctgcaggtatggtgctagccaagtgatctctagagacctagattccaaaaatccaagccattatccatctgaatgctataaacttcatggacatgccctcacctcatgagtgtccagtgcctctcagatgcaccctgtatatttactgttcatcatggaactcgtgccactgaaaatttttaagtgactatattcaaaaacagcaggttgcatgacagtttctcagtgaagaggttcaaaaaaggtgagatgctattgctttgtgaatttacaaaggaaagaataatttaactgctcagaattacatgtccggtcactgctttttaatttaaaaaataatagagcatcattagtaatcttgttttctctttgatacataggtaaagggtgttttg

SEQ ID NO: 1721 - DNA, 2300 bp, Homo sapien
taaacttgaacaatgcaagaatctaggaatctcagaaagattttgctgtgtttctataggtaatgaaatcctgtcaattaaggaaaatgctgtgtgtaatttgatttggtggtagcctttatttagagctctctttgatctatgtagcaaaaatacactaaatttctttttaatcttgtactaagtacataatttcacaaaaataccttgggcataaaatacttacaaaactgtgaattaaaatactcaagatactttcaaaatttagtcaaaatgttgattcccagcctttttcctacacgtctatttcaaaagagtatacttttttctgacagccattactgcttagtctgtaatgaaagctttactgcttctatgctgtgctcaagagaaaaccaacaacggaagcgaagacttacttgctccttcacagaattgcagcaaagctctctgctgggcaatggtgacaggaaagtgtgtaattgacttgttgaagataatcatgagaccatcttaacattacttgccttataagttagaaatagtatggatatcactctttgtaaataataatttttgtaaatgttttttgttcataattttcccaatcacctatttcacaaaatcctgaatatgcaattatttattatgacacgttactgcaactagggctcccattccagaacaaagtttaattctatatgtaagttgttactgaaatgtgatttctttttctggaaaataaatgaaaaatatgaaaataaattgaattgtgaatatcttttgctgtcagcctcttaaaattttacccgcatttctggaaaacttcattccatgtttagggtagggatggtgggccaaaggtctgtcaaaggtcaagggttaagagttagacaaatttcagctctgtgatttaaatatcgacttgagcatgttactcaacgattctacatttccttatcttaaaaaaaaatagagtaatgtcccctatgtcatagtcactgaacaaattcaatgagataatgtttattcatcacctagcagttcctatctagtccatagtagatattcaatcaacaatcctttcctgttcttatctttctgtgagtagagattgggatgggcaaaaatatctatttctcttcttccaacactatcctaacactgtgctccaccggaatcccaatgtattactgtcagctaatgctaattccagcaggacactcatcaagagccatgcccttggctagatgcttggaggcatcttgtttctgcttccaatgattgcccactacaggagggtccctatagtgtttattttgtttgcttttggtttggggaggcccaaaccaggcttaggctggggatagtcgctgaagaagaggaaaagcccattcataccagcaggtaggtcctcaaccccaaacagcctcatttcaaagcttcttagacattaacaggctcagaagagtcttgttaaggaaagcgaaggaacccagcccggtttgtaacacattggagttaagaccatgagtttcaggggccttgggcatattatttaacattttagaatctcaattttccaaatcctttaaagggaaaacattcctttcttgacagagttattgggacgactaaatcccaatgtttgtcggtatctggggtatctggccaatgtaagtgctcatttacctccacattccaccgcctgtgccttggagggggaacgtgcgaagcagcgttaggagccgggaaaagggcagggctactttactttgtctttgcgcttcggatttcctgtgctaggaaaccgcagcacttcccactcctgcccctgatgtctgcgggaaaaggaacttgatgaggggccctaggggtgcaaatgtctttagtcccaaatgtcttcctcgctacacaatgaaccagttcccctccagctcgccgccaacccaggacgcagcccggctcagagtgacccccagtgggcagtgaagatgagatcctctacatccttagggcagctcagagggccactcagcggccaagtccggccggggagggccgagggctctgtttgaggtcaccctggagaccggcctcagagtccagggagagtgcgcgggcggccgccggctgaatgaagcctgggacgcgggagccgcgccgcgcgcagtgtctgcagtgccggaggtctgggaggctccgggcgaagcctccctgctgcaggtagggtcgcctctctctgcagcgcgtctggaccccaaaggaaggatagggggcaagggatcggccctttgttg

SEQ ID NO: 1722 - DNA, 2300 bp, Homo sapien
atgctgattttgacccatccaaagatggagtagctttctctgatgacagaaccatttctgcttctttggtccctttcttagcaaatgaccgccctacctcccagttgaacaagccagaaatcgaggtatcatatttgacatctttctctccattgcccctgatacccagtcagtaccaagcccttctatattttgaatacacatgtgtcctatctctcttccatggccttagtttaggccaccatcatatctaaattattgaaacagcctttttctgtttttcctttctcaagtcttgcctttcttaatccattcttcacactacagccaaagaaatggagaaagcaagactcttagaaataatttttattttttacagcaaagaatgctttcaattagataacagattattttgttgtattttccagcttccctacagaagaacagtgatttcacaagaagtacaaatgatatgatcatggccacagacttagcaatttttttccaaccaggaatcacagacaaggatttcacagaatcaactgaaccattatttgttcaacttgctaaaacctgagtcaacagttctttaagatcccaaactctgggattctcagtttaggtaagacctttgcaagagctagtgctttcagaggttttaccaaaagagaaatttcattatttagctatttgggatatggacttagctttctattatcataaatacgtgtgttgagaaaagtgtacctaggtcataggtgaaggataacaagatcctagtcagataaaatcttctgaattctgaagttatcttttctagtcttctattctgatggtgagaggagaagcagctaataattagtagctgtttttttttgtttttgtttgtttgtttgtttgtttgtttttgttttgagacagagtctcgctctgtcgcccaggttggagggcagtggcgtgatctcagctcactgcaagctccacctcccgggttcatgccattctcctgcctcagcctcctgagtgtctgggactacgggtgcccaccaccacgcctggctaatgttttgtatttttagtagagacagggtttcaccgtgttagccaggatgatctcgatctcctgacctcgtgatccacctgcctcggcctcccaaagtgctgggattacaggcgtgagccactgcgcctggcctattagctgtttattgtaccaagtgggacgcatgttatcacattagacctatgaggtagttacaatcatcaacactattttacaaagaaggatgccttaaaaacttgcttaagagtctagatctggtaagtaacagccaggcaacagcaacggccaggattcaaactcaggacataagaaattgcctacttaagtgtgatatcccattgttctgacattcatattgctttcaatattcaaaaaaacccctgtgagatgggtcttcccattccagagatatggttattgaggttcaaaaggtttttttgtttacttgtttgtttgtttgttttttagagacacggtttcactgtcacccaggctggagtacagtggcactgtcatggctcattgtaaccttgaactcctgggctcaagtatgccattgtgcctgagtaatttttaaattttttgtagagatggaggtctcactatgttgcccaggctggtcttgaactccttgcctcaagtgatccatctgtgttggcctcccaaagtgctggggttacaggtgttagccaccaggctttgcctcaactcaaaaagtttaaaacttgccttatgtcactcagtaagtagcaaggctgagagtgaaactcattcttggcaactttcaaagtccgtgagttttccataatgccttccaagagggcatctgtttttatcatctcacagatgcgttgatggtattaaggagagactgaatagctggcaatactcataaaaccgcattttcaaaactttactgtgtaaccctatgtgcttagcaaatattgtaaaaatgaggttctgaccaatgaaatgtcaggaaagttagtataaattggtcaagagagtgacagtcactccagaatttgatttgactatatttaccatatcagattcacattcagtcctcagcaaaatgaagggctccattttcactctgtttttattctctgtcctatttgccatctcagaagtgcggagcaaggagtctgtgagactctgtgggctagaatacatacggacagtcatctatatctgtgctagctccaggtggagaaggcatcaggaggggatccct

SEQ ID NO: 1723 - DNA, 2300 bp, Homo sapien
tttgacagacttacccacccattcacgaaaggttctagaccacttcaggactctcctaaccctctcaaggggattcatgagtaaaggtgtggagaggagccatgattgtcatactaggctggagctccctcctctgggaagaacctttaggagtgtagatgttccctccatcattggcagtcaagaggagcaggcaaaacagattgatagaattgtgattcttttctaggtggagagagaggtgtactcaaaatctgtggtacagccagtctaaagttaggggatctgacccatgaaataggcagattctataggtaaagagtgtggtttgggggtagtttctgaacatatagtaaattcaagcaacatttaggaaatgggtgatacagaactccaggcaaaaatcctatttgccatcctagggctttgtctatgaatggtaagtcctctgccatcaagaaggttgactagactattacttttcccaaccgtaataactgagatgttaccatattaggttctatatatgtaatttatctaatataagatcatttatttttataattagcatgtctgtgccacaatgttactttgaagtttatataactaaattgcaaaggaagatctggtggtctaacagtaagaaacctcagagaatcaagagcctaaatcgctagccttaaaattgttagtattcctgtgtggacttttcacttaacctctgttttttattttcttcattgacaaaaagtttggactacatgtacctcaaattttgttcttgtggataactcatttacttctttactcattttgtctgtcttagtcaaatttacttatataaataaaatcttttacttatttttaaaatttattacacaaatagaaaaaaattaaagaatatttttaaaaaagaagaatcacccaaaactaaagaagatttgcaacttaaaattttctgtttcctgaccttgtttatctgcataatattttacattcttattaccatagtacagatcatgttctgggctgctctgtcatttaacattttagaacatattttcaaaaatttgtattattacattacttactatttattagtcatagatggtatatcataatttatttagtcattaaaaatgttgatgattggtttttggaattaataacttgtttttttttagattataaggaaggtgtttttctcagctctgaacctttttaagaggagactgagacgtttttaagttttcctaaagctgtccaagctttacctatcccaaaggctcatgaatgtctgctgtataccctgttgttgatagaaaacattgaactctcacttatatactttctcatggctgttacccacataaccaattccaaactctcccagctgtgaaactcaattctcaatggaattttccaaggaccttggatcaagttctgactgtcctaaaggtttatggccaattattttcactctattatttgcatagacattggttccaattttatttctatagtcaaccaggactaatatagtagagtctttacccctggtgaagatgattagaggtggaatgacatctaaattaaaagacagctaataaggagggcaaatgaaggataaaagtttgctaaagcaacgaattagaagttaacttcacggctcaaagaagtgttgcttattatgccccctaaatatacttgcctccatattcttgagtagtaccaacagttgctaaccccagttcccaattaatattgtgggatagttataatggaatacccttagagttatgactattggtattagactggggtaggcttgttatgtcagcaagaaggctgtttatggcctacaagatccaatttggcttcagaaaggttgaatatactacatctcacaacctggcctgttccttgactatataaaccacctgcaatatattacccattatggtatattggtgactagaaggaaaaatgcaaattaaaaatagcaattagtaaatgattttaattaagtcatgtattttagatttgcaagttataagggcagcacctgaaaaaattgtaacaaaagaagacctggagaagaatatagagataatactcacagagacagaaacactgagattttttgacttgcccacagtcatggtctctgtagaatctgaagaagctgagaaagtaacgtatgtatggttcagttgtctacattgtttctgtaattcaaatgctaagccaagggttcttatccttgtttctgtgaagggtccttgggggttctggggtat

SEQ ID NO: 1724 - DNA, 2300 bp, Homo sapien
taatggcaaaagagtgactcaattgataaattgtggattaaagattaatagagaaaagagaaatctaaaatgttctgattatttggtagaaatggaaaggtcaggtgattagaggtctcaaggaggttgaagaatagtctgtggtatgacagaaacgaatctgagaagtcaattttaagaaggaatggtcagctgaagaagaaagagtaaagctacattgtagttacagagcaaaaagagaagtcatgtagtaggcagtattactgactaacattttaagaagttggactgaaaggaaggagagatatagtaataggtagaggaagacatagttaaaggaaggattttcaagttgaggagatgattggggcataattttatgctcacagggaaaagagaaaaaaataagataggagacctggaattatggatggagaagagtccctgagacaccagtgacaagtttcagagttcacataaaaggttagtcttagataagaatggcaactcttttactgagaaaggaaaaaagagataagtgagtttgtaggaggtgggagaagaatttaaaggaggtggtgaaataatttgaaggaatttttacatgaatgatagtttatttttttttagagatgttgggggttaagtccttagagatagaaggagaatagggtaggatacttaaatgtaaatttgaaatagtgcacaaatggaattcatttactcatatattttaaaaatatttattaagtgtccatggtatactaggcactgtgctgggtgctagggatacagcagtgaacaagacaaagttcctgccctaaacatgcttacattctgcagaggggtggacaacaacaaaatgtcaagtaacgataaatgctatgaagaaaaataaaatatgaaaactggattgatcgttatttaaaaatattttattcttgtcagattttttatgatttaaaaagtaaatgtattatttaaaatgttttctttggaagcatatttttataatctcagggaggctcatccccattttatagaaatccatattacagagtactagaaggaataaaatgataaggtaagtccttgtcttaaggaatttacagggtaaatccaaaagtgaaaaaatattttttcatggatataaatattttgattgtaacttctcttcttattaaaaagggcacagtggctcatgcctgtaatgctagcactttgggaggctgaggtgagacgatcacgaggccaggagtttgagactagcctggccaacatggtgaaacccctctctactaaaaatgcaaaaattagccaggcatggtggtgcacacctgtagtcccagctacttgggaggctgaggcagaagaatcgcttgaacccaggaggcggaggttgcggtgagccgagatcacgccactgcactccagccagggtgacagagcgagactccgtctcaaaaaaaaaaaaaaaaaaaaaaagtagtatataattcaggaaggaacacgctattctttctcaggctttattaatcatgtttaaatctgcctatgtaactgcactacacactcatgtgtgcttactatgtgccagggacttactaaccataatacaaaaattaatttatttaatcctcataataaccgatgagttaagtactgttattatcctcattttgcagacaaagaaactaagacccagagaagtcagcatggacttaggatctgactgcctgggttcaaatctcaaccattgtaggaatgtttccccttaaagcctctgtggctttatataaaataatattaatagcaacctcttggaattatgaggagaaagtgatgtaatatatgccaactctttagaactatgtttatacataataagatttcaaatagttatcattatttcttgttatatgtttagattgttcacatgtttttacaggaaatctacttttttattgttggttgatttttcttttcaatcttgaatcctttgcattatattttatttttcttatataggaacaatgccacacaaccaaagaagtctattagcttttttgctacaatgaaagcaacttcagtgaaaggatatactggtgcaaatcaaagcagaatggctgtgtccaaaaccgtgcttattccacctgaactgaaaactgtagaaaaaccaaatcccaatataaagacaacacaggtaatattcttagaattctgagtttatttgaaaatggcactgtgaaaaactcaattgaaatgttaaagatagaaaatatgctgctttcagataatca

SEQ ID NO: 1725 - DNA, 2300 bp, Homo sapien
tttttcttaaaatctgttttcttgggagaggtcttagccagagattaacatttgtgaatcatcattataggtgatattaaagacatcagagtgaagaggtttatggactaacccagcaataccaatacagtcctggatcatcaacaatgaatcacatatacaatggtgatctggtagcagagctgaaaaattcctattgtctaacaacgttgtagttgtcacaacattcaagcacaagacattaccttttctatgtttacatacacaaatacttagcattgtgttacaattgcctacagtattcagtacagtaacatgctatgcaggttggtagcctagaagcaacaaatgcattttcatcattatgcaaacaccatttagtgtacttacacaaacctagatgtatagcctactatagcttaggtgtacagtctactatacaattgtagcctaggtgtatagtagcccatacatctacgtttgtgtaagtacactagaagatatttgcaaaatgctgaaattggctaacaaggtatttctcagaaggtatcaccatcgatgcatgactgtatttagttatggtagtgaggaacagataccagcaaaggatctgggaaaggtgaaaccatgaaccaagacaagaactaggaagagtggtttctcagaacccaaataaagcttttcaaagatcgagaagcgataaacccgaccgacactgcttcattcaaaaagaatgaaactgtggatcagccattgtatttggttgcatggctattgctggctttcatagaagctgttttgatggagtggtaggatggacaaaagcgtgagtaccatattcaagagagaatgcaaggttctctcccaagaactctcaacaagttccgctgaagaaagattagctgaggtggaggagattggagaggggaagagaaaacaaattacttagggaattttgggggaacttagtgggcagcattacgggcagcgctaaggaaccatttaaagtaagacaagtccacacagctgtgtgcttttctacagtcttgttcaactgctgcataacaacagaatgttggaagcaggaattagttttaaagtaagatggtattgacgagacgacaataaaatacctctactacagagcacagcaatgttcggcctggtggctcacagaagctgaggctcttgaacgtctgggcacagcatgaaagcatcaagcttgagagactgcaggccttaacaaactagaagtgctagaacgatggttctaaaccaggtcttttctcacacagcaagcacagcaatagagatttattttatcttattttttagacagagtctcgctctgttgctcaggctcgagtgcaacggcacgatctcggcttactgcaacctccgccttccgggttcaagggattctcctgcctcagcctcccaagtagctgggattacaggcatgtgccaccacgtccggctaactttttgtatttttagtacagacggggtttcaccatgttggccagcctggacgctaacttctgacctcaggtgatccaccccactcggcctcccaaagtgccgggattacaggtgtgagccaccgcgcccagcccagtagagattcttttaaagactgcggtaggtcgataaaggagacattgtggcctaggagcttcaaggtctacagactgaacccagttagggtagggcccctttccaaatccagaaatggtatctattaatagaagggctccctccgggtcccagggggatggactacggtttttagcgccggaacttacaacccgaagttctgctgcttgtgactgcctgccggagagactggcatggtggcgaccagctggggagtggtgcaccacccctttttttggccgcctctgaagtccctgtacccccaagctcctccgttagcggctcgggccgaggctccggaatgtttgccgggcgtcatggcgacggtggagccctggctcaacaagcggccgcgcggttggctggcggcacgaggccgaggaggagggcggaggcggaggggagggcagagggttggtggagctggaggaagctccggacgacgactggaagaaggaggcgggcggcccgggcctcaggcccctcccaggctctgagtctcccggctgcaggcggatggatggggcttcttcaggcggtggcggcagcagcgaaggtggcggcggcagcagcggcagcggctgtaagtgcagcctccacaagccatctctccccttctattccagtttgggatgaggggctcc

SEQ ID NO: 1726 - DNA, 2300 bp, Homo sapien
taagaaatataaccttttattcagtaccaacacctgattcaaatacaagtaacatatatatatatactatataaacctatctgttatgcaatccaaaaaggtacctctcaaaatgcaccaagaaaatactgtacttataacaatttagactctggggttagctgactgaaatagattaatacaacacatccaaaactaaaaaattctatatctaacaattttcagcgtccatgagtctcttttgagattagtttataaactatttcctgaaatttttatttaaaagcaacagcctacaccatgtctttatgatgtggtggtaaaattttatggataattactaatttggttgaaaatacctacatctaaaaaacttagcctattacatttggaagccccacatctatagtgacaatcagcatcatctttcgttagtttcattttttgttattaatgccactctaaaacacttatataggcttttggttcttcaaataacagttttggattttcttttcataatttttacagttttatccagtggccccattttatcagaatattacaaactatgattatggtttttacattgatgacatgttatttttatctcacccaaattctggaaatttttggcccatcagttctcaaacactggaacatataagaagagtaatataatcttatattacttgagggagtttggattttccctcccttaatctccaagtgtacccctgcctaccagcatcacatccgtcttgtctgcattgaacctcaaccagttggttcttaaccacgtccgaaactcagccaggcactgggagaatcgagcgaccacaccatctggatcaaaggaaagagagcctcagtagcaaggagacagaaacgatgatacaagctcaccatccaccctgtttcgcatttttaaaaagatggtcgggaatcaggacaaggatcccatgacaattttagaaaaacatttaatgagccttaagtcatgcaatttgtaactaatgataaaggaataaaagcgacccaataaataggtcgcctcattccacccataagtgaagaaggttcagtcaactccgggtcatcttggtgaagcggcctcaatagccaagtcaatcttgtaattacataagttcttctgcagaaatgcagaattctagcgttggaggaagctttaaatagggaaaactgaagcccagagagggatagtgactcgctcaaggttacacagcatgcagggaccacagataggctccaggccagggacctagccactacaagctgaaagaacaagagtaaagagcggcgggcatctgtcccaagggatcctcccacgcgctaggaggacctcgtttccttacagtaataccctattcgagtctctcctccctccctgactccatccgaaaagggcaagttggcccagggcgctgctcaccataaaggctgcagtgcaagcgagagcctcccggggatgggacacaagtgagggaaatacaggagaaagaggcggagccacagcagggtggtcagcttagccccaccccgactgggatcagggaccgaagcgaacggggcgaggcgaactcactccgcagcggattcccagcgcggcgccaccaccgcgaaggcaaaaaggcggcgctgggaggcagtcgatggccagagggaggaagctgcgcatgcgcctttggcagccggcggagagcaagccaggcgcgttctgcggcagcccctccccggaagttaagggtcttccgggcggtacactgccgtgggggaggggaaggagagaaaggggactgaggacacctcaggagcccctcatcccaaactggaatagaaggggagagatggcttgtggaggctgcacttacagccgctgccgctgctgccgccgccaccttcgctgctgccgccaccgcctgaagaagccccatccatccgcctgcagccgggagactcagagcctgggaggggcctgaggcccgggccgcccgcctccttcttccagtcgtcgtccggagcttcctccagctccaccaaccctctgccctcccctccgcctccgccctcctcctcggcctcgtgccgccagccaaccgcgcggccgcttgttgagccagggctccaccgtcgccatgacgcccggcaaacattccggagcctcggcccgagccgctaacggaggagcttgggggtacagggacttcagaggcggccaaaaaaaggggtggtgcaccactccccagctggtcgccaccatgccagtctctccggcaggc

SEQ ID NO: 1727 - DNA, 2300 bp, Homo sapien
atgtagagagtttttttccctcaataataataataccatttaaaactagtaatattgatacacaatattaataaacttaaagagttatttaacagtaagatagatacccattcagaaatgtttcagacttccattttcctgacaagtttaggattcattcagtaggttaatagactatgatcccctgctctttatcatagttgggatttctgttggtagtttaactgaagaatcaaagattcagtgtacttaagcaagttatttctgtaccttgtattgtaacacttttaattttcctttggtagccaaatttcataaattagctttcatatgttaatggaaaaccctccttcatctccatggtataaagcctgagtttgtacctctaggcccctaattgtgtctgtacccacctcaggtccatgtatatccattgttctttgccttcagctcttttcattaagtgtattgattgaaaactatttggatatgaactgacacttttaaaaagtcatttttatttcaagtccagaggattgacataattcaacagggtaactattagaaactatatacctctgctaaaatatttattcccccaaggaatcctgaaaaacacttttatataagttttctaaaaaataaaatgaaaatactgtacagtacagttaatggtaaaaattgtttgtagatttgggaaccttaaagttttcctttctcttctttcccttgcttttctttcagtagaaaatgtgcatcagatgtttatgtttaattggtttacagactgtctgtggactcttttcctgtcaaattaccaggtaatgtcctttcacttagcagctacttcatatatctgtaaatgcagtttattcatgcacagattattattggacataacagtttcaaattaacattgaatctttggaaataggaaaatgcttgatagagtctagaattttaagggaatataaataatttaatagcctcccctatattgcattataagttaagtattaactttaagaaaaattgtatatgtacacatttatgcaatgtagtattggttcacattatttggaaggaatgaataattctcgtatttaaatggttgattttggtagccacttttgaaactgcattaagaggaacccttgaagattaggaaaaaaatcccagtcttttgaaataaagactttcaaactggtttagtaaaatatgttagtgactgttttaatgtcacctttgtgttattcagtatgtgccttagtataatggaagtgaaacatgttagttactttgaaatcattggttctggccatcatcagcattggcatcacggccaattggcagctgtaggccaatacattaaaataaactttcaagttacaggcatttcaggcattgcaaataagtaggttctccctccatgctactaaatagatgatatccataaaacagtcaattttcagtattttaaattttgtctagttgtgcaaaattcagtacataactgtgttgctaccggcatgacagaagtgtgtgagaaaacgcaaatgacatgaggatggcggactgcctatcataaccccttccattaatttttgctctgacctctctagagatttggggatatagaattttacatttcctgtcgggaatctactgatggagaaatatttgtcaaggcataaccgctttcaaagcacagttcttgccgccgttgcatcacagcaacatccgtttttcagcaaatgcatttcaaaaacgacctacatgtaaaatattacgtatttttcctctgctgtgtcaatgctggatgtgactcctttggcactgttccttgacctctctgatccgtagacaaccccctccgcctggagtggcggatcagctggagccagcgaagcgccccgcgcggttgcccacctcctcccacacccaccttgactccgccccctccgctcttcccggggagggctggccgcggggccgcgcgcgcgcccctgctccggcgcgtgctcgctggtcttttccctccagtccagcccagccggggcgccgcgagggggcggagtggggtgtggtgggcgcgctcgggcggctcctgcgcgttcccgccgaggcagtggcggcgggagcggcagagacggcagcggccggagtcccgttgctgagtctcacatccgggttctggccgtgacccagctgcggccgccgcggagatgtgacccggcagtacggcaaatatggcggaggtaagggagcgagctccccctccctgtcccggagccgggcgc

SEQ ID NO: 1728 - DNA, 2300 bp, Homo sapien
gaaggctgcccagagaagaggtaatgttctgccaaaatacggaaggaaatgtaagagtttttcaggagctgggtgagaggaggaagagaaaaagcagcccagatggagggaataatgggagtaaagacacagaagccggaacccacattgttgatttatctgcaccttaggggagggaaacgtgaatagtgcctctggagatgtgggtaggaaccacattatctaggaccttgtaggctatgttaagaacctcatcctgtgtaccagttttttaagaaacacttgaagaacataggtgttctcaaagtaactcaaaagatataaaccaattatacacatataatttaatattattcagccttaaaaagggaggacattctaacatatgctacaacgtggctgaaccttgaagacattacgttaatgaagtaagttcatcacgaaaggacaaatactacatgattccacttatatgaggtacctagagtagtcaaattcacagagacagaaagtagaacactggttaacagcagagagggaaggaagtagggaaacagggagtgattgtttaaaggggaaagagtttcactttgggatggtgaaaaagttctaaagatggattagtgatgatggctgcaaaacgatgtgaatgcagttaatgccatgcaattgcatactcaaaaagggttaaaatgataaattttatactttgtatattttgccacaatttatttctttctttaagatggtcttgtgctgttgcccaggctggagtgcagtagtatgatcatagctcattgcagccttgacctcctgggctcaagccatcctcccacctcagcctcctgagtagctgggaccacaggcgtgcgccaccacatctggctaatttttttattttcttgtagagagagggtctcactttgttgcccagcatggtctcaaactcccgggctcaggcattccacctgctcccaaagtgctggtattacaggtgtgaaccactatacctggtttaccaaaatataaaaataagaaaaaaaaaaaaaagaaatttaaaaagatacagaccaagcacttagaaaaataattcaaagttcttctttcctaatctattaaagttcaatacgtaatttctttgcttaaaccgatcataatgatttgcttctgttatacaataatgactaccatttaccgaaaactagctctttgctagctacacatccacagagatcaggttcagggaggtcatctaattggtccaagacacacaataaggagtgagtgtgttggtggggggggggggggtcgtcatttctaggaatcctacaattggaaatcaagtcttttaggctccaaacaccttgtgctttccccaatccccaagctgcttatcttgctactttttgggatatgtcaacatttttcttaaaacaaacaaacgaaacttctcaatctgaaaagtattgtttggtgttttctgggttcagaaaatgtaagaagcctgaggcattgcggaatgaaattttcgttgagtgtttactgttgatccacatctgatacttttgaagggtttttaccccctgcaagagagactaaaagagcattcagaattagtctagacgcagtgtactgtaactacttggccggccacctgtaacagaggggaggagggtctgcacttagttgcggcagttatccggagaatacggccttccagcccctctgccaccagactccccacgccccaggtacgcgccccgcggagagacccagcgcgtgctcgtgcgcaggcgcagggcgactgtcacccggagtctgtggtttgtcgcccggcgctctggtgtctcgatgtagttcccctggcttctccttatccgcctcgggcaggggggtcgccactgccccttctccaggctctctccaacccctgcccaggctaagcccggcgcggccctactctctgaccccgcgttgcacaatgcccgagcaaagtctccaggggtgtgaaccccggcgtccctgcccctgggcggggacaggcggcggccaagcggggagtcgaggcggcgagcgcgcagctggcctagtctgcggtccccaactcctggagtcccctgggagctgccgctgcaggcccccgagccgctaggccccgccgccaggccaccgctgctgcggcagccatggcggaagttcatagacgtcagcatgctcgggttaaaggagaagcccccgcgaaatcctccacactccgagatgaggaggagctggggatggcgtcggccgaaacgctgacc

SEQ ID NO: 1729 - DNA, 2300 bp, Homo sapien
tagcaaactatttttaaagcaaaaacataaaaattatttcatgctatggttaactgtatatagaaaaatacagctgtgtgtgcatgtgcgtgcatgtgcgtatgtgtgtgtgtataatgggatgacattttgcctcttaaaatgtcctatgtggtgttgaagatggggtgactaaaagtgagaggtgtaggacaccttactgtaaaaagatctgctttctgttctttctcacaaatgagcagcattgtttcagctggccctcatgtagtttatacgttccccaaactgggaaactcattcacttcaatacattgattcttccagttatttacctgtgtcttgctgaaaaatagaaatctttgtctccagtaaaataaacttaggtggggaatatgaaagccttctccccctcttgaactcatattatgtttaagggaaacacaaaagctaaaactcctcggagagttttagtttagtttagttttacaagagggatgtttcttgggtctgaaaagaaaatatgtccacataatcataatgtatgttctctttcaaaatctgtcccctattgtcctgtaagaaatccagaaagtcatcagcattcacattatgctaatgcctttaccctgtcaatgtcaaataaaatatagagactaatctctaaaatcaaaatatttatttgggaggaaataattgcaattagggcatacacacagagcagtagtcttcagtatattctgaagaacaaagaataggttagaggttttataaaaccaggaaatgttacaaattggcactagtgaggttttgaggcactgacaagattggtaagtgaaggctgtgggcaaaattggtttagagttgccacaggtcttttcagtagctattagatacaactggtttaggtcacagcagtcaatttcagctgccagacttgcagagggactgcatttttggagcgatgttctgtgccctgagtgttttctcttaccctggcttctcactgtgttttagttaggtaccacaagagtgacccatttcatatgatcagctttcacaatcctggatctccccttcccagtgtgcaacctgaggttgtgtggttcgtcacaaggcaggctatctgcttgcacccccatggcccagaatttcctctgtgtaattttttttaaagaaatggggtcttgctctgtcacccaagccggggtgcagaagcatgatcatagctcactgcagcctcaaactcctggactcaaatgatccttttgattctcccacctcagcctccccagcagctgggactatagatgcatgctactgtgcctggctactttttttttttcttcatgagatgaggtcttgctatgttgcccagagtggtctcaaactcctagggtcaagcaatcctcctgcatcagcctcccaggtagctgggattataggcacacaccaccacacccagcatgtctgtatactttatttatcacactggactacatcgtgtgatggagggaaaatctggatgtagtgacgtgatagagggcatgctgggatgggatgtcattcagtacatgaagaaatcatactcagggcaatgtatggtgaaggaaaaaagagtaaaaaaaaagctgaaggaaaccaattacaaaataatgtaaacttttggcatcggatcctgaatctttctcctttcatgaactgttgtctccatgtggcattgctggaataatatacaatataggagaaatatcagagatttttctgagctggaaagaaccttagtattaacattaatattcattgaaaacattgatgattctgtactttctgtgaacgatatcacttttacacttaaatgccactggagcccatttaattcagtgagcaaaagtatactgaatgcatggtcatctacacaattttttttttctttttgagacagagtcttactctgtcacccaggctggagcacagtggcgtgccatcttggctcactgcaacctctgcctcctgggttcaagcgatccctcctcagcctcccaaatcgctgggattacaagcatgtggcaccacgcacagctaatttttgtatttttagtagagacagggtttcagtatgttggccaggctggtcttgaactcctgacctcaagtgatctgcccgcctcggcctcccaaagtgctgggattacaggcataagccactgtgcctgacccatctactcaatttttaaaataaataaataaataaataaataaataaataaataaataaataaataaagggagctttgggttga

SEQ ID NO: 1730 - DNA, 2300 bp, Homo sapien
ctgcagattttattttctttgttttcttatagtatacagtttatattttaagaaatctgtatacttttaaaataaaacattcattaggctcctttacccagtatttatctataataggttcatgaactcattcagtaaatactgaatttaactgagagcaattaaagtagttaggaaaaaatccacttgaattcttttttgtgtacatttaccaaacatttgttattaaagagaaaatactttgtactttgtgttatattaataattgtattactaattataagatgctgggcaaatcacatagtttctttgaatttcagtcaggtcttttctaaaatcaaagataataccctttccatagatacgaattaaggtttaagaatgaaaagtaaaggatgaaattagaactattttaaagttgtagcctagtacctgacatgcagaacgtgttccataaatattaactgagataatgataatattctaagaatttcataagattcatgctttacaaattttattgactgaagattaatgagtagctaacgtttctgaactgaattcttaagaagctaattttcacctctgtacaaatttttgagctgaaggtattacaacaatcttagacaaatcaccactatcaactagattccagttatcaattccatacaaaccattgttcctgaatgtatatggcttaaaaaatataatagaatcaagctaccttggccagtcgcagtggctactcacatctgtaatcccagcactttgggagaacaaggcaagaggatcacttgagaccagaagttcaagactagcctgggcaacatagtgagacccctgtccttacaaaaaaataaaaataaaaaaattagcctggcatagtggcatgcacctgtagtcctagctactagggaggctgaggtgggagaaccacttgagcacaggcgattgaggctgcagtgggctatgatcacaccactgtgctccagtctgggcaacagaaaagaatcaaactaccttctacttttaatgattgtatttttgttttttaaatatttgaaataaattgattccagtgttttcatgcattgactattaatatcaatttctagccaaatttggattgctacataactatactttttttttttttttttttttgcagttttgccattgccactagcacagacttgtgatgattaattctggtgctttttttccttttcttctcacagatgttgaagtgctgttttttaaagcttttccccctattttgatgcatcagataaggtacattcttggaatgatgaacaacccctgacttaaaatgtaaccaatattgtgaaattccccatcattttaaattaaatacaagctgttttcaagtcagtcatttttagattatggctctaaaaataaatgattcccatggccttagtgcattttctgctcacacaagtgagcaataaggacaaatggttccttaggatacagtaaatacagcagaatgtatgtcagtgtatctccattatgtctcataaaaatgctaagtggtatgtgtgtgtgcagccaagtctgctacacaacttgcgtaatacagtggtgattttactaaccacacgggaggtttcttggccttggaaataagaatggttttttgttgttgctgtttttaatatcataagccatgaaagcaatcttccatcaaatattcaaatataaactgttgacttccattcagacctgcaagctgtatggtggactttgtaagcttctttttgaaattcgatgtttccaggaaagcacaaaaggagaaaggaggtacaataaggggaaacaaagtcactgttccccagttctttttacttgatcttcttcttttacttgactctccttccactccttcagcataatcggttttaatatccgtaagcatctggggagtcacctgggcttttagtgacaaaagtctgtgggcgaagcccctctgagaagagaactctgctctctaggcctttcagaggtaggcagagctcggcaaccggtttctacggaccgaggacgcgttgctaagggactgaagggtgggggcggggcgagtaacccgcggagccagaagagggaggaaaggagatgaggtttgtttcagggtgcggaagggttggaagagttgaaaatcaaaatttgcatgagggtgggaggcgaaataggaaaaacgtcgttttacataaacggcctttctgtccccggagtcggtgggacgttctccagcggggcctggaccgggagagtgtggt

SEQ ID NO: 1731 - DNA, 2300 bp, Homo sapien
actttgggaggccaaggcaggaggatcacctgaggtcaggagttcaagactagcctgaccaacatggtgaaaccccgtctctactaaatacaaaaaaaattaccggggcatggtggcacatgtgtaatcccagctacttgggaggctgaggcaggagaatcacttgaacccaggaggcagaggttgcagtgagccgagattgtgccattgcactccagcctgggcaacagagcaaaactctgtcacaaaataaaataaaataaaataaaataaaataaaataaaataaaataaaacaaaaatcagctcttgattttccatagcctcctaactgggctcttcatcttcaatcaattctccacacagtgttggagtcatatgttgcttaatgactgggataccttctaagaaatgtgtcatcaggcgattctggacctgaatagatttttttttcaaggaagacggataaatggccaataagtatatgaagaggtactcaacattactgattatcacataaatacaaatcaaaactacaatgagctgggcgtggtggctcactcctgtaatcccaggactttgggatgccaagactggcagattgcttgagttcaggagttcaagactagcttgggcaacatggtgagaacccatctctaccaaaactacaaaaaattagctgagtgtgatggcatgtgcctgtggtgctagctactcaggaagctgaaatgggaggatcacctgagcccaggaggcagaggttgcagtgagccgtaatcacgccgctgcactccagcctgtgtgacagagcaagactctgtctcaaaacaaaaacaaaaacaacaaccaaaaccaaaaaacaaaactacaattagatatcacttcccaccttttggggtgcctatgataaaaagacaagatataagtattgctgagggtacagagaaagggcagccttgtacactgctgttaggaatgtaaattggtacagttatcatggaaaacagtgtgaaataaaaacaattttatttaaaaaattaaaatagacctaccttaggatccagcaatccctcttctggatctatagtccccccacagaatgaaatcagcaccatgagagatatctgccttcccatgttcatgaagcgttagtcaaaatagcccaaacatggaaataacattttaagtgcctatcagtggaataattggtaaagaatctgtaggctatacaggaatattatgcagccataaaaaggaaggaaattctgccattgcggtaacatagatgcaacttgagggcattatgctaactgaaataagccagacagagaaagacaaatactgcgtgatctcacttatatgcagaatctgaaatagttgaacccataaaaacagatgatagaatggtggttaccaaggttagagggtggtggagggaaaggaagctattggtcgaagggcataaacttgcagttataagatgagtaagttcaggagatctgatatacagtatggtgaccatagttaacaatactgaattatacagcatacttgaaatttgcttgaatgttctctctgcaaaataaagagtaactaaataagatgagagatgtattaactaacttgattgtataataacttcacaaaatatgtatgtatcaaatcatcatgttgtatatcatcaaattgtagaattttattcatcaattatatttcaacaaagctggaaaactaaaaaaagaaacaagtgtataattaataacaatgctggttgtaaattaaaactaagcgtcatatttttggtgtcaaaatgtttgacatttttaagaaaacatgtataagtgttctgcctcttggatgagaccattttaaattaagctgtaaaaaaaaagtaccgacaaaacagttcactttcagtaatctggatttccccaaatagtgacacgagagccagtcatttcgaattggacagtttgagttcctcttcaagagtctgcaatgtaggtcagggctctgctgacatttccattgacctcagaagtgaaaatctaaagtgagtgctgacaggcaggcagtgaggaaagaagacatgacacagccaacaagggtggcagcctggctctgaagtggaattatgtgcttcaaacaggttgaaaggtaaataggcagcgatcatccaaatacttaaagacagctatatttccttttggaaatacatgggccaagttgttttctcttgcaagttctcatgatattccatgcagtggttactgatgaaaagggaatctataatattatatg

SEQ ID NO: 1732 - DNA, 2300 bp, Homo sapien
atggaaagtgttaatgattctattctgttcagacaaaacaaacttacaagtatttacacagtttagaaacatagcgattccaactatatacctcctactataacaaaacaactaataaaataaccaatcagaatttcagttccttctgtgaaggttattattatagaacatgccaacaatttacaaagccttagagtcttatgagatctgctttcttcaaataaaatttcaaggaaggacagatttattttaaaggagaacaaaacaagttagcaatagatataaatattcatatgtttccctaatacacaagagaaggagaagattattgtgataaaagatctgaattgaacatccatctttctttctttctttctttctttctttctttctttctttctttctttctttttctttctttctttctctttttttttctttctttctttcttgctctttctgtctcttcctttctttctcttttccttcctcctttcccttcctttctttcttttttgacagagtctcgctccgccacccaggctggagtgcagtggcatgatctcagctcactgtaacctctgcctcccgggttcaagcgatcctcctgcctcagcctcctgagtagctgggattggcacgcaccaccaccacgccgggctaattttttctgtttttagtagagacagggttttgccacgacgaccaggctggtctcaaactcctgaccttaagtgatctgcccacctcggcctcccaaatgctgggaatacagacatgagccaccatgcccagcctttctttcttttttttgagacaagctctcattctgtcgtccagggtggagtacagttgcaccatcatggctcactgcaaccttgaactcctgggctcaagtgaccctcccatctcagcctcctgagtagttggaatttcaggcacacatcaccacacctggctcaatttaacatcttttcaaatctgatcatctgaactaaatttgggtgcatatcatctctcctcgaacagatggagggaagaggggatagctcctttatctcatttttatactcttttgttaacaaggctaggctctggaattttattagttaggattgtaagggagtgaaaggtgggggaaagacaggactattagagttcagtttttttttttttaatggggaatgggctgaatagaattttccttaacagcagttttcttctatgtaacaaattagcaaataagaaaatgtccataattgttcattagaccatgaattttatttttttttactttgagctttctcatatctagatattgacgaaaagatgccagtttctccctaggcaagttttaaacagccaggtctttttttttttttttttttttctagtgataccttctgcagccgtcatttccagggctgagactataaatgctacagtgcccaagaccataatttattgggatagtcaaacaacaattgaaaaggtttcctgtgaaatgagatacaaggctacaacaaaccaaacttggaatgtaagctcaactttcattatgctttagcatgtgaatgaatgatttaaaagccaaccatcagtggctacagtggacttattatgtctattttacatgtttttaatctgattgtttgcatgatattcaagccactttagtttttgttttataatttcaacttttattttagattcgggggcacatgtgcaggtttgttacctggatatattgcatggtattgaggtttggggtatgattgatcctgtcacccaggtgctaagcatagttaccaataatttgcttttcaacccttgccttcctaccttcctccacactctagtgtggtccccagtgtctattattgccatctttatgtccatgagtacctgatatgatttggctgcatccccaccaaatcgcaacttgaattgtgtctcccagaattcccaggtgttgtgggagggacccagggggaggtaattgaatcatggaggccagtctttcccacactagtctcgtgatagtgaataagtctcacgagatctgatgcgtttatcagaggtttccgcttttgcttcttcctcattttctcttgccaccactaagtaagaagagccttttgcctcccaccatgattctgaggccttaccagccatgtggaactgtaagtccaattaaacctctttttcttcctagtcttgggtatgtctttatcattagcatgaaaatggattaatacagtaaattggtaccagtagagtggggcattgcttaaaagata

SEQ ID NO: 1733 - DNA, 2300 bp, Homo sapien
ttctgcaattttgtaagatgctgccattagaagttaatagagcagtggtctttcaacattttagatggtatactccttcagaaaaaaaaaaaaagcatttttgagaaacatccccaacatatgtttggttgtttttttatttccttgaaaaacatatgtatgccgggcgcggtggctcacgcctgtaatcccagcactttgggaggctgaggtgggcagatcacgaggtcaggagtttgagaccagcctggccaatatggtgaaaccccatctctactataaatacaaaaattagccgggcatggtggcgcgtgcctgtagtcccagctactcaggaggctgaggcaggagaatcacttgaacccgggaggtggaggttgcagtgagctgaaattgtgccactgtactctagccggggcaacagagtgagacgctgtttcaaaaaaaaaaaaacagaaaaacatatgtatatttatatgtgtgtatatacacacacacacatatgcacacacaaatatataaattaaatttttaaatgagatagagtaaaatgcatttttgaaattattgatttattaacaaaactaaaagccttccttctcactaaaaagtgttgaaaaatccatgaattatgcaagattgttataacatttggctatcataatcttattcttgatatcaatcagtttttaaagtaatgagaagctgctgcatttttatattttttaacaaatggatttaaaatccactgaactgctcaattaaaagattgaaacaaaatagcaaattgtttccgagtttttaaaagcattttctgtgatgacaatcataaaatcttcagtaagaaaaacacacaataatgggaacacttcgaaatatttgttttcaaatcgtctcttcataacaacgtatcacttggtgtgaaaattaccttgaagaaacaacaaataaacctctggggttttttgttcttcaaaaagatctattagataacatgtactgagagccatatatcaatacagaaaagatcagcaaatttaggatatttggggtttttttgtaaaaataaagaaaataactcactttaagacaacttttaaaatctttgttacaaatgatttctacaattatgtatcatctcattacaaagtaatattaagattctagattctacgatttaaaagattttagtaaaattattcatgtagataaattactaaagcatgtaaactacagtatgtcacaatcccataaagacaatctactgtacattgttgattccaagatgtacatttttcatatttaacatctcaaacattgagagcggttttaaggtaatgcccagaagcgtggtatgcagttgtccacttctgcgggctcagcaaacctgtactgggctcagtggactagaagaaaactccagagacaacggggtgggggagggggggggacttaaaaaaaaattcgatagataatatacatatgtttaaaatctaaattttatttagagatatctaaataaaatctctaaactaaataaaattttagtttaaaagattctaaatgttgagaaagcattgttattgtttacctggcagttctttttatttcttactagcgcataaataatggtatatcttataattaaggaagtcttagatttaaagaaatctaagctgacgggtgcagaggctcaggcctgtattccctgcactttgggaagccaaggcgggaggattgcttgaggccagaagtttgagaccagcctgggtaacagagtgagagtctgtctttacaggtttaaatacagtttttttctaagtaatattgtcataaatattatgtcatgaatattatgcagagctgccgacccctctgtactctgggcagttttccctcttgcctgagaacaccacttataacacgggacctatacgggagtggtgacacgccatctgttcaagtttaacttttttctcattttttagacagcaaatacaaatggaagttccagtatgttctgcccgcactccagtgggcggtcttgtgcacagcccacttgggaggcctcggcgctcaggtgtggtaagagctgggcggtgcagagcacagagaaaggacatctgcgaggaaagttccctgatggctgtcaacaaagtgccacgtctctatggctgtgaacgctgagcacacgattttatcgcgcctatcatatcttggtgcataaacgcacctcacctcggtcaacccttgctccgtcttatgagacaggctttattatccgcattttatatgagggg

SEQ ID NO: 1734 - DNA, 2300 bp, Homo sapien
gctgactctctggaagaactggagcctcagcacatctccctttctgttttcccctcaagttctcttcacccactcaccttctcctgtggtgataagctgactctggatcagttaaagatgaggtgtgactccctcatgctctgagtggtgaggcttcaagccttaaagtcagtgtgccctcaaccagcacagcctgccccaattcccccagcccctgctccagcagctgtcatctctgggtgccaccatcggtctggctgcagctagaggacaggcaagccagctctgggggagtcttaggaactgggagttggtcttcactcagatgcctcatcttgcctttcccagggccttaaaattacatccttcactgtgtggacctagagactccaacttgaattcctagtaactttcttggtatgctggccagaaagggaaatgaggaggagagtagaaaccacagctcttagtagtaatggcatacagtctagaggaccattcatgcaatgactatttctaaagcacctgctacacagcaggctgtacacagcagatcagtactgttcaacagaacttcctgagatgatggaaatgttctacctctgcactcactgtccagtacattagacactaggcacattggctgttaatcacttggaatgtgtttagcttgactgaggaattaaattttgattgtaaatttaaatcgccacacatggctagtggctactgtattggagtgcacagctctagatggctcctagattattgagagccttcaaaacaaatcaacctagttctatagatgaagacataaaagacactggtaaacaccaaggtaaaagggcccccaaggtggtcatgactggtctcatttgcagaagtctaagaatgtacctttttctggccgggcgtggtagctcatgcctgtaatcccagcactttgggaggctgaggcaggcggatcatgaggtcaggagatcgagaccattctggctaacatggtgaaaccccatctctactaaaaatatttttaaaaaaaattaactgggcgtgatggcgggcgcctgtagtcccagctactcgggaggctgagggaggagaatgacatgaacctgggaggtggggcttgcagtgagccactgcactccagcctgggcaacagagcaagactctgtctcaaaaaagaaaaaaaaaaaaaagaatgtacctttttcctagatttgctggtttattgttttattttggcttcatcctctttcagcaaatcaagggcagctggatggtgaagacctatattgtaaactcaccatagtaccatagtaccttgggcaacccagcctcccactctgaatctcgggtgtcttgtaaagggctggaccaaaggctccctgaccccttgtttcctctcctttttgctgcagcaggccctgccttcaggaccagggctgtctcagggtctaagaccccaacctctgaggttgtcctcagaagtggtctgtcccctgttcccaaaggcacagctttcattcccggagaagatattgagctggtcctctgccagctcaagttgagcctggaagataactctcttttccacaacatggacttggaacatgatccatgttttgctctttaaagctgtggcccctggcttgccaccctccctagcccattgctgcctctgtctcttcaccataggcacttctgccaaactagtggagaagtcttggtctaaactgctaataatgctcttccctaaagaacaggataaaagatccaaaatactttttcttaaattcctgtcaagcctggggtccaccccgtaccccttcccacatgaacgctggaactgagatggcttccccatcatcgtctggattttcatttaacaaagtacttgttgtaaatgtgtacttcttgcctaacgtgaggaactaaaaacttgtccatgcataccccagtcctgtagaaataactgttctcgggctttaggttttccagatttccctcagagctctagaaactgagcgatggacagttgctctgcttcttcaggttggaactcttgatacatccttgtttcctgaaattccaaacttaacacctatagttctctcaggctttttttgaaaagttccttcgtttctatttctattccactctatttagctattattgtgcggcacccccaatggttcctttcctctcagcatcgctgtagcttgcctgtacccaggacatgcccttgactggcacaaaccgtgacagacatgcccttgactggcacaaaccatgac

SEQ ID NO: 1735 - DNA, 2300 bp, Homo sapien
tcctctatgtgtagcttattttcaaatattcttattgtaataatgcttggtggttacgaagctctgtttgagcaaaccagaaatctgtaatggaggagaaaaatgaataacaacaggcctgccccaccccccagattgtggcaggagtagttaacttacttaagctctttgttttcattttcctaatcttaaaacaggagcaataactttttttttgcgggggggaggtatggagtaataactttcttatagagttgatgtaaggtttaaaggagatcacgtatgtaaagtgcaccaagcacacactaaaacatcacgttttagtatgaatattgttactgtggccgtggccagaaagagttaagaagaggagctttcacagatgtctcaaagatgcaggcagtctcagagacgcaacagcccgtgaagagagaaaatctgtcaaaatgtggagatcttctacattgcacttgagctatttcaaaaaggtgggaagagtatggtcaaaagctccttgtcttggtaggtgccacagaaccagagcctgtggaaggggggatgagatagggggtgtgtttgaggttgggcgttgtgggcagggtgcaggactgaggcagcagggaaataagtgaggaataggggaggattgagaaacaagaaaaccaggaggcttgctgccccatgtatgtaatatgactcgtgtcttctattttccctgctaaggaattgatttaaaatctgctcggaaattgatgattacattccgccatgttacatatcctgacacgcaacaatgtttaaattatatcggaaatttaaaaattggactgctttctatcagggcagtctgaattaaagagctgatgtccagtctcctagtggagatagaatactgggctaatgcctgtcactagcacttacagaggtgtgaatttggtaaatcatttcatctctgaagtggtttcaacatttgtgaaaagaggcaaactatttgcctaacaaaatgttgagttcaaggttattcatagctcctaccaaataagcgatgcatttgctactttgtgttaatggaaaaggacttaaaaattatgatatacttaaacccggtgctaccaaatgtgcttaaatacgcattcaaattgtattcttttaatgaattttaatattctcaactagtatcaatgctttgtcattattaagtgttgacttcaatatttccctcccctcaccgcaactcctagcacacatgcactcgaaatgttctcaaatgatatgtattgagcgcatgtgactaacaacacagccacctaagccctgacttgccggacacgaacggacgattaattggaataattgtaacagggtttctataaacagtgcttcctggaggcttgccccgcgtctagcgctgcaccgtcaggagttaaccactcctacgacacccgccgccacacggtgagaagcccgggaaagacgcgccacgctcccatgtgatagtttcacttgtctttttggttagttctgctaccctagttcatgtccccgcgagaggaaacgtattccccctcacattagacagaagagcctcgattcaccgtggaggctgacggagggccactccagcaactgagcagctcggacttggcacaggcagggtccagcctacccgcggccggcgcggcgcctcagcaacaccccctcccccggaagtttgtgcgtctcagatgtaaggtctgggagtcaccttgacccccctggagcggtggggaaagttagccctgagcccgagggggcgtgagtgaaaccaaagagcactttcgcgagtcagttacgccgtcacggttttttggtttcaaggtagctgaagacctagagagtttaagggtggccagagcaggtggcaggactccgcccaccaccacgcttcccttccttcagcccgcacgcttcactcccctcatggggtctcgcctctcaggcgcgcgcgaagagttgtcgcgcggtgcgtcctgggaattgtagtcccgacgcggagagtcgcctcaggagaaatgactctggcctacataccccacagtgccttgcggcgcaggccgctcccggatgtgtgcctggcgccggaagagaagacggcccccctctctcggcccggccatcttgtgggaagagctgaagcaggcgctcttggctcggcgcggcccgctgcaatccgtggaggaacgcgccgccgagccaccatcatgcctgggcacttacaggaaggcttcggctgcgtggtcaccaaccgattcgaccagtta

SEQ ID NO: 1736 - DNA, 2300 bp, Homo sapien
actttaggactgtggttcatttgaattggtgtaaacaatacaccggttctactgtcctacagcctccattcagatgactgaagtcatgggactttcagcatagctagctgatgacagtgcatactattttgtcccaaaatccagttcaagcatggacataccaataagagcctaagctctttaaaggcaaaggaccaggaattgtacagttcttggtatagaagaagacaggcaaaagtgtttttgaactaacgttaaatgtgcaatatgttagaattcatgcaatgcacaggactgcaggattctgatatcttatttaactctcaaattctattcaactcaataaaccttgactgtgcttctactaaatgcaggtattgtactaggagctgaggacaccaaactgatgaagtccttgctgtcaagaaactcacatgattccctaattctttgtcagcttgctgtgatcacattttcttcccaagaacctctaagaaatgcctagtggatagaaccttggagttccacggaacatattaacaatcgccaaatgatgactcaggctagattgtgtaattcaggttttgtctgcaaaactgaaaatgcttcggtaacctacctaaatttcaatgttgaggaattctttaagaaagacatcaaatgttaagatttaaggcatagatatgagatacatagtcatgcttaggtgaattatgcactgaccatgaccatttctttactcaaatgttgtccatggctgacaacacagtgaaaaaatgagtgcaaaatgacaactcaaataaatgaaccagaaaacctatcacttttcttttccaccaaattaagatcaagagagctggagaatattttgtctagagtgataaaaacataagggtgcaaaacttccaggtacctttgcagaaattacttctgtgacctttggctgtacagcaaccttaataatgcaagcactgttttgaatgcaagcatgtgggagccattttcaccacttttgatgacttcagtaggtttaagaaatgtttttgcttttattgcataaaccataaaacaaaggaagggacttttgaactactcagtgagagtctatatattaaagtttgtttttcaaaaatgtgtaactaccatttgcagttttaaaggtctgctttccacctacaagttgccattatctcaaaggtgaaattttagcatatgactaaaaacttcctatagttacagcttcatgattcagcatctaacatcaataattcacagtgagatcataggaggctctctgtggaaggtaacgacatacatacgttaggaaaggaagcttagggcatatcgagagcattttgaatttagacttgtgggctgtgtgggtgtcagatggttgtctctcagctggtgggcgtccagaaggatccttgtttgggcaaggctctttgagaaaggagaatctgggttgccagggattcccacatgtggtcaccagctccccacgcagaccagctcacgatttcccagttacaccgggcaggtgggaaaccgttctgctttctgtggaaaagattctaacttggttccctgccatccctgaatacaaacgggttggtttttcttttttcagcttccaacccttgcagctttccaaaaataaatcaaaccagccatcagggcaccgaaataatactactgctaataagcagcttcgcctagacttagataaacaacacttctgaggtaaactttgccccggaggtctggagacacttttttaatgtaacctgcttactaataattactagacttcagtgcattaaccctggaaatagattttaatagccaccccttaaaacaaaagacatgaaaagataataagaaaaaagtgccgcaactattatagaaaaacacttggcagcctgcttcagcccaagctgaggccacctctagcctctgctaaagccccccactcccaatggtccccgccaaccggataagagtgcgcgcgggacccgccttcccctctcggcaccgcccccgcccccgccccctcggctcgcctcccgcgtggctcctcccttttccgctcctctcaacctgactccaggagctggggtcaaattgctggagcaggctgatttgcatagcccaatggccaagctgcatgcaaatgaggcggaaggtggttggctgagggttggcaggataaccccggagagcggggccctttgtcctccagtggctggtaggcagtggctgggaggcagcggcccaattagtgtcgtgcggcccgtggc

SEQ ID NO: 1737 - DNA, 2300 bp, Homo sapien
ccatgtgggtcaggctggtcttgaactcccgacctcaggtgatccgcccaccttggcctcccaaagtgctgggattataggtgtgagccacagcgcctggcaagatgaaggcatttaaaaaattttttagattttaggaaatgagtcaacaatgtgatgagtagatttcctgaattaactgaacacccaatctcatgaaagtttacaaataaaacaacgactcacaatcagcctaacacttcttatggcttatctgttggccttggacatcagcacatgcaaaagtaaataaccggatacccttgggtcacatgttttcatactttgattaagaattacacttggttaaagatgaatacttctgttcctggcttaatttcttacctagggctaataaacacaactatttgaaatataaattctctttaaatgtaaaggataatgcaatgtttctgactgtcaaaattactatgcaactgtaactttagcactaaaagcatattaaaactattaatcctttaatcataattattcatattgctgtggtagaaacatcacacatacacacacacaaacacacacacaccagttactttctgtagaatttgaaattgctctatctagcatttccggaaggttcaagctgccaccctgcaatttatccagtagcctgctgcttgaacaagctagataaatatctaataattttgaccatgtactgcgtgttaagtccagtttaagtgttttccaaagacaaagttttcatatactttctgtaaagccctacagatagagaccattattatccccatcttataaatcagactgaaaaaggttaaatagctaatattttcatctaagtctgtctgactccaaagccaacaccccaaatcactgttaaacaagcttctcttccaagttagggctcagaaaaatttacttgctttcacaacttgccttcctaggttaagcttaagctgacataaaactccaaaacaaagcaaaacacaataaatcacataattctaattttaaaaaaaactaatttgatattggctaaccacttcctcaagttttctgaccatgaagccctttgctctcacactttaataaaccaccgatattctctaacaagtgacaacacaaatccacaaatctaattgttagagagctttcaagtaagactggagctttctggacaggaaatttttataattctatttttttcaggctcttgtgaaacacagattcacattttcatatatttctacacaaatctaagtgctgtgtgccctgttgggggttcgatatctagtaaattacatgagttaaatacagcaaaaataggactgcattatttataaggtctaacgacgcagtagacttttcagcattttttggacttaaaccagggctttacggcgctggttaactattagagaaggcaaagggactgaacattttatctgaaagtccttttatcacttaagactctgtaaaatttttgattactttaaaaattgtgtgtgtgaataacgttagtttactagaaaaggggcttgctagtatatataatttggttaaaaaaacaaaaacaaaacaaaacagctccttacttgaatgtgattgttttggcaatagtaaaattcaatcccgtcgttctagcgctgcctgccttcctggttctcctaggtgagggccgccatcctgcgataatttacttcgagagctgcgaagcgctggcaagggtgcagtctggtgactagcacttttaaaaacaaagccaaactccgcttttaaaatagagaaggcacagacgcagaccctgcctctgacgacatccaaaagattcattatacacagcctattcaggcgaagctacaaccgccccaggaaatataaactgtgtcggcaaagacagcaggggggagaggaagtaactgatgggaaggaagctaatcatgtgaagtttgtccaactccacacggtctaataaattcccgtttgtttccgctgggagcagccattaaacgcgccctgacacgtgggcgcaggaacctcccttctacctctggtgttcagagatttccttctcgacccacttgtttgtatacaaccacgcccggcaggatgaccaccagatgaccggccgcagcaatgcctccactcagtcccagttgggcaaagtttcactccactgcggcgacgtgaacaagaatcacggcttccttatcgtgagttatgaatgatttaagccaagtttacaggacacacaaagcgagggacgagtgagtgacggg

SEQ ID NO: 1738 - DNA, 2300 bp, Homo sapien
taaaagcacaaagtattgggtcagccagccaaggtttgaatcctggctctgccagttttgctctgtaagacctaaccttcctgtgactacgtccttaggttgttaggaggattaaaaggtttaatatatgtaaagcacttaaagcaacatctgctacgcagaaagtgctggttaagtattagctcttatcattcctgccttgctattaggttgatgcaaaagtaattgcggtaataacttctgtactaacctaatactatctcgatcagtgcttctcaaactatctgtgatattttattttcaatctgttgcaggctgatgcctttccacataaaagaaaaatgaaatagacataaaatacaaagctgcattttaaacgatttaacagacataaaattactctgtcaaattgctgtaagtttctacatgctcatcttcaatttctatgctcatccctttgtagatgggtaacggtttgcagactgtcactattccatgaaccacactttgaacagcactcaactagaaaaaccttcgacaagccgcttaagttactggtggcaatatgtggtgttccagcttccaggttttttcaagagactaatgagagaaaagtaagagtaagtacatgaaagcacttattaaactataaagtgtcccaggaaggaaaattagtagcatagcttagaggagtctattctgtggtctgtggccaaaaaatacaaactccagtatgccaccctctcagtccctgtggtgtcaagctgttctgtttcaggtgtatcatttgaactgttagtacttgtgaatcagtcaagcatttcctaatgctgaacagaacaggaaataaagacccctctggcagtctgtggcttgcatcccacaaaccaccgccatccgcagcttgctaagaccacactcctggggcaaggcatgcattcatacacctactctacctgtgacacctcttctacatgtgcaaatgatttcactaaacctgaaacttgcttaggggtcagaaggaaagcaagagggaatataatgccctgactgcagtccctagttcccagattccccagggcccacttgtcctcagttggtgaaactcaatacacagacatccctcaccaatgctttcagactccatttcaagtgtggactctgcccacactggttctaagtgacctactttggcctcacctcttttctctccaccctgtcaaacaagaaagcggctacctaggaatactctagaagtccgctgagtggttttctgaacatccagcttctttactctttctggactccaagaaggcaagccccttgtctgattcatctttgtacctctcccatcacctttagcatcgcagttggtacacagcgggtgcttggtaatgtctgtcgaatggccaaaggaatagtacaaaatctgtggaagcggaaatggctcctccatttacccgaccttgaacccttccagaaaagaccaaccaaatcccattaattcattaggcagaactctgccaggtactggacattcggaaacaaatttcagggggtcggggcagatggacgggaagctcatggtgggtggatgtactacaaattctataatccgcagttatacctccactttctgggaaacttctctccgtggccccagggccctttaaatgttactatgcgtgttttcctccatagtttctggaacagaaccaaactttcgtgtaggggtttggcagcgctcatcctcacagccctggggaccgctggcacaggggcaagcgaggcgttcgcacgcgaaggaaacttgcgaggagtcagggcggccccgcgcgggggcgggtcgtagagtgggggccctcaagtcctagaacttcaggtcctccatgagaattagaggaagggggatggccaaagacgaccagacgtccaccgagcttccacaggccaggcctcgcccctcctcctgcggggccacaacgcgggctccccggcccgggacagcacagccagggcgtccgggcgggaggcagggcccggcgcggaggaaggagcccggggccgccgccgccccgcccaccccagcgaggcggagccggcgcccggaggagcaagaggaggaggaggaggagaggtcggagccgtctccaggagcccttagagaccgagtcccggcggcgacggcggggcagcgcaccggcaggcgggtgagtaccaagcggcgggcgcgggtggtgagtcgggtccccgcggggtcggggcgcggcgcggggcgtcggccagcgagttcgggggcc

SEQ ID NO: 1739 - DNA, 2300 bp, Homo sapien
tatgagctaatgccaataaaatgagtggggaaacccagtgaaaaaagccaaactctgtaaaatatttagaggtttattctgagccaaatatgagtgaccacggcctgtgacacagcatcaggaggtcctgagaacatgtgtccaaggtgtttggactatagttttcttttatacattttaggaagacagaagatacaggcaaaaacatcagtcaatatatgtaaggtatacattggtttgacctggaaagccggtacattttggaggaggaggggtttggccagtggtggcaggagggaggttgtggaagccagggttcttgttacatatgtgaagcctgtaatatgcttcagaaagaatagatggcatatgtacctcaaaaggtaaatgaccttaaacggtgtcagactcttagttaaatctctcccggatcagagaaagacctggaaagggaaggagattgtccacagaacacaaatttccctcgcaaaagatagctttgcacaggaccattccaaaatatgtcagaaatatattttggggtaaaatactttgatcgcccttagggctgctacctgtcatgtgatgctataccagaatcaggttggaatttgttttgagacaggttctcactttgttgctcagattggagtacagtggctgtgatcacggctcactgcagcctcgatctccttgatgtgggaggctcaagtgatcctcccacatcagcctcccaaatagctgggactacaggcggccaccaccacactgggctaaatttttttaaagtagagacaagttctccccatgttgcccaggctggtctctaactcctggcctcaacctccttattctctaggattacaggcgccaggctagacctcacaggtctttagacttctacgcaccaggtacctggtagggggagggattatagtggcagaagagcagtaccagtggcccacaccacacaccctggcctcagctggctggggcacacaaaaccaggtgctaccgtcaacgactaggcccatagggtactgctgtcaaaacctgctgccaacaacttccacacactccccaaaacgctcggtaggcggtggtgcgcagctttcaatgcatccgccgccaggcgctcacaggcaagggagaaagaagccagacggagctcggagatgtggagggcagacgcaggcgcatttggaaaagggactggcggtgggaggcgcagagggaaaaaggaacgacacaatcgggcttcctagccgctggcggacccgatggggcgtcctgcgagggttcggcgagggttctgccaggatagtagcattgcgcccaaggagtgagaggcacccggggctactggagccagaccctcaacccgccctagtgggaggcgaagaacaacgaaagcctcgtattcccatttctctaatggctaatgacattaaaggttttcatatggttatttgccatctgcatatcttcagtgaagtgtctgtttatgtcttctgactattttctaattggatttttaaaaataattgatttttgagttatttacatattctagatactggttgtatgccagatatatggcttgtaaatattttctcctaggtaaaccttttcagtatcgttacagggtctttcacaaagcaaaagttttaaatttatggagtctaattcatcaacatttctttttaccggtcttgccactaatgtcaatttaagaaccttttgcctagccttagacaatagtttgttgttttttaaaaccgttttgtaattttactcgtcacagttatatctagccacttaatttttatgtaagggttatttttggcgggggggaatctatagatgtcctgtcttttcagtatcatttgtggaaaagattatctgtcctgcattaaactgcttttggactttcgtctaaaatcagttggaccggtttttgttggcaaagttttgcctgaagcttattccaacaggtgagaaaaagtccacagtttaacagttcctccccaacctgtaaccccgccttgaacttctggactagcccctcgattgttgtagatgccaagcggacctcgcgccgctctgcgttgggccagcccctcacagctggtttcttaccacgtattgcgcaagcggaatctatgcctgttacccacactccctgcgcccccgcaccccgctcctgtgcgcaagtcggaatataaaaccgcggaggagtgagctcttggggtgtccagttggttgccgcggcagtctctccgagcagcgcatttgtcttc

SEQ ID NO: 1740 - DNA, 2300 bp, Homo sapien
cccccattctttctgtaatttcaagactagtgtataaacttctataactcattgagaagttgggtctttattctgaaagctcctgtgtatacacattaaatacatttgtatgtcttttctcttactaatcaatgtggcccatgtcagtgattttccagcaaatctttggggggctgagagccatagcccccacaccagtaaacacaggcaaaaatatatattgacaattagaaagacgtttttaattttattttatcaacaattttaaaaccaattacttttttaaagattaagttacatgaactaaaaaaattaggttaattactatgtttttgtgtgagtgcccatctatttaaaccaatcagattaacatttcttaagggatttttggcctaccacactgaattttattatgtagacataacatacaacataatacatgtacatatgtgtaaatatatttaaacaaatatacacataaaggtcttctagcttttattttagaattttagttgtgagatagtaaaacatataaacttgctggtttatagagaacagttggatccaaattatttttctggtaaaatgagataaaggctatgaatcaaattttggtaaaacagtttgagttaattaccagtgcagggaccaaagggaaacttcagtgaaggctcactgaaaaatcaacctgcaaaaggcagattaattggagaaaaagcatacaaatgtatttaatatgtatacatgggagcctgcagaatgatgacccaagcatatagaggaaattgtctatttttaacttaggattaataaaatatagacagcaatgtagaaatatgattggacagaaagagtatgagctaatgccaataaaatgagtggggaaacccagtgaaaaaagccaaactctgtaaaatatttagaggtttattctgagccaaatatgagtgaccacggcctgtgacacagcatcaggaggtcctgagaacatgtgtccaaggtgtttggactatagttttcttttatacattttaggaagacagaagatacaggcaaaaacatcagtcaatatatgtaaggtatacattggtttgacctggaaagccggtacattttggaggaggaggggtttggccagtggtggcaggagggaggttgtggaagccagggttcttgttacatatgtgaagcctgtaatatgcttcagaaagaatagatggcatatgtacctcaaaaggtaaatgaccttaaacggtgtcagactcttagttaaatctctcccggatcagagaaagacctggaaagggaaggagattgtccacagaacacaaatttccctcgcaaaagatagctttgcacaggaccattccaaaatatgtcagaaatatattttggggtaaaatactttgatcgcccttagggctgctacctgtcatgtgatgctataccagaatcaggttggaatttgttttgagacaggttctcactttgttgctcagattggagtacagtggctgtgatcacggctcactgcagcctcgatctccttgatgtgggaggctcaagtgatcctcccacatcagcctcccaaatagctgggactacaggcggccaccaccacactgggctaaatttttttaaagtagagacaagttctccccatgttgcccaggctggtctctaactcctggcctcaacctccttattctctaggattacaggcgccaggctagacctcacaggtctttagacttctacgcaccaggtacctggtagggggagggattatagtggcagaagagcagtaccagtggcccacaccacacaccctggcctcagctggctggggcacacaaaaccaggtgctaccgtcaacgactaggcccatagggtactgctgtcaaaacctgctgccaacaacttccacacactccccaaaacgctcggtaggcggtggtgcgcagctttcaatgcatccgccgccaggcgctcacaggcaagggagaaagaagccagacggagctcggagatgtggagggcagacgcaggcgcatttggaaaagggactggcggtgggaggcgcagagggaaaaaggaacgacacaatcgggcttcctagccgctggcggacccgatggggcgtcctgcgagggttcggcgagggttctgccaggatagtagcattgcgcccaaggagtgagaggcacccggggctactggagccagaccctcaacccgccctagtgggaggcgaagaacaacgaaagcctcgtattcccatttctctaatggctaatgac

SEQ ID NO: 1741 - DNA, 2300 bp, Homo sapien
ggagatcatcttacttaactttctcacttaggaggaaactgaggccaaatgaggcagggtgacccaaggtacccagcaaggaacatggtcaggactagaatcagcctcctggcctggagttcaggagtctttatcacagcacaatgcctgcctttgggcagggcccatgtccttctcccaattctgctactacttttgggaccctgggcgagacacacaccagatggaattagactaagtaggttttgttcccttccgccctcaagttctcaatttccatcaataaaataaggccctaactggaaacaaatcagaaaataccctcttgctgttaccacagaggataatcagcctcctcactgcagcttaatctgagggagaattagagcctgcagtgaacttttagtagtacctgcagagcccccatcctccctgatttgaaagtataagagagaaaggagtggaggggagagaaagatgatctatataggaagaatcatctgacctgcagctgaggtttgaaaaagcagcattctttctacagaagaatttttaaaaatctcacatgccaactctaatcaactggtgtgtctgacaagagctgctcacaccttagggataaaaactgttgacgactgattggttatgtgtgccgtggtgggcaagaggaggtagaagcacctccccacctctaccttgccgtgtgtgtctctgtctctgtacaaaggtctgtttactgcattctaagctctgactgttcagtaaggaaccctccccaccagccaagatctcagaaggggcagagccccttcctagccccttcctacatactcttagactatggactctttgttatcttctttcttctcacttcttcagtggatctttgctctgaagatttatgacaaattatggaggtcttgcaaattcaggcttaggaacgacaaattagatctcccctatcacttgatcaggaggtgccaaggaaacattgaagctgacatagaaacccaacattgatggtagactctcatcttctatatcagggaaaagtcccggcctgctgaagctcatgcctctttatgctcatctttacccctggcccccacccctcagcaggtacacagccgggagtcctggtgaggtggagcagaatttagttttcaaaaaaaaggtgtctccctactgtccaatttcccaccaccgtgctctgggcagtatctcttaaattgtttggcacgaagtccaagaggctttcctagacactgggctaaattcttatttcattaaaacttctattcccttctgccatcttggactgttaggaagcaccggaggcagaaaattcttagtgggtatctctggccactaatcttattatctttctttcttctgtttcgaccttccctaaataccaacggctccttgtgtctttttttttcctggcaagtgaataaaaagaagatattttcagcttcttctagcttctccctcaggccaaaatcaggagaataattagccgtcattaaagagtgtaatgattcagcaagagcttccacctgaacgtttaagaagctgactgttccacagagccttagaggaccctgacaacacactgcagataaaaactcttgtagccctggcagacaagattcgtaagatgcgaggttctaatgaagattaaacagcctagaaaggtgttaggagatagaaggaaggtatctctgctttctacctaaaatttctggttctaccttgaatacagctgttttttgttgttgttgttgttgatgtttgttttaggttgggatagctgggtagacgccatgcctccagtatgcattgttactctgtacgtctaaagtgtacctttaagcattagctgcttacaattgatgttatggatccagggtaacagaattcagagccagtctattggaaatagtgaccctgcctcaaaccctctgctctttttccagactccagagcatgagggccgttactatgaatgtgatgtccttcctttcatggaaattgggtctgtggcccataagttttaccttttaaacatccggctgcctgtgaatgagaagaagaaaatcaatgtgggaattggggagataaaggatatccggttggtggtaagtgaatgtaattgatcttgacatgtgtattggaggggaactccatctcactcttggcacctctatgcctcacctgtctcatctgagaaatgggaataataacatactcatgatggctgagatcataaagtgaactaatttgtgtgagagattaca

SEQ ID NO: 1742 - DNA, 2300 bp, Homo sapien
tattttaaaatatactagtaggacccacataaagaaaacaatgaaagttttccaagaaatttaaaaacagattgtagacaatggagaaacaagtactgttcttggatgggaaaactaaacgctggggaaggatgctaattctgtccacattaatttattattatatatttattatttataaatttaatttaatcttcaatatcctagcaaaaagatgtaaatttgaaatggattggggaagagagttactctagcagatattgataaaaataataaatttataaaattcaaagcaatgttgtgctgacccgtgaattgacagtttaatgcatggaaaagaacagatgttcagaaacatgcttacatacataaagattaacagtgatatgataaatcaacaaaagggagggtctgttcaatcaactataatttaaatatttaagaaataaaactagaacctcactgcatctcttatagcaattttcagatggatcaactgtttaaatattagaaaaaatgaaattgcaaaaaataaatagaagtcaatatagatgactattgaattttgagatgaagaaggtcagtttctctaaacacaaaagcatggggggaaaaacataaaagagggattccatataagatctggaacttctctatttaaatgtgcataaacaaatttagatagcagatggaaagtttaggagaaatttccaacaaaacatattaggcaaaggattattcttatagatagcctttacaaactgatgaaggagaagttgattttggtgtattgtgtgattgactattttgcaactactaactgaaagattttaattataaagaaaatatgatataatggctaatattttatactttgtgtgtgcccaagcactactctgagtgctttcatatgttaacttgtttaaaatatgcagtgacttggaaagatcagtactattattattgccatctaagagatgataaaaccgatacagagataggcttagtaatttgcccaaaactttcctagtgtggatttgtggtgacacaactaaaaatgagagagccaggatttgacaccagacaggtcgcctccagagctggtgttatcacacaatactctgcttttctaagtgaataaaaagaaaagactacaaaactatgcatgatataactattttataaatatgtgttaatatttgcgtatattttaaagttacacaatttaattcatgtgtaaactttttatctaattacacagtcatagaaaagacagatggcattttgacattttccaacagtggttacttccctctagtgggattttgggtaaatgttgttttgaacttaaaatttctgtattttccaagttattaatattataatcatataaccattatataatcacaaaatagtgtttttaaagttacacatttcaaagttgctttgctgtcttgaagtgcatcgtttatattttagtacacttttgaagtatcagtcagtgtttgagttcccattctctgctaggtaccaagctaactggtgtcccctagttctttatcttaagcaaaagcaatgttgtacaattttagagccaaaaggaatcttagaaactcttccgtttctcagatgagggtcctgaagctattacagatttaactgacttacccaagattcactgacagtaggtttttaaccaggcttcgaatccaggtttgaagactaaggtcttctgactttagatactgttctctatgaagcaccagagctctccaagacctcaatcaggtgggaactgtagcacagttgattttttgtgacattgttttgaagtggggaagtataactagactggttacaaatgtattctttcacagcaattgaaaacataatgggaaggttctcagagatactgttatgacacctctggaggtcagtgaaagatcctcacccagatttggaagatccctaagtattgctgagccccacttgtagaaggcgatacaaaagctggagggaacacagcagtggaaagaatattaaccagaaacagtagtttcaatagatggcttttctaaaacagacaaactttctcttttcagctccagggcccacaacggcagtgtcctacatgtcggtgaaatgtgtggatgcccgtaagaaccatcacaagacaaaatggttcgtgccttggggacccaatcattgtgacaagatccgagacattgaagaggcaattccaagggaaattgaagccaatgacatcgtgttttctgttcacattcccctcccccacatgg

SEQ ID NO: 1743 - DNA, 2300 bp, Homo sapien
caaggtatctgagtactttgaactgaaggacattggaaggacaacaattctgtctacttcatcctttctgatagtacctggtgtttgccaaagtagaggtaattaattactattcagtgaataacatttggactgggggggggttcctctggggcaggtgcaagtactttgacatcttggtatccttgagtgcttaagaaagaaagcctggaacatgttaaaggctcaataagtgacttggataaagagttgaatgagagaatagataaacagcaaccacagtcatgcattgcttaatgatgggaataccttctgagaatgtgttgttaggtgatttgtcattgtgcaaatgtcatagagggcacttacataaacctaggtagcatagcctactacagacctaggctacaccgtgtagctgattgctcctagactacaaacctgtctggcatgttactgtactgaacactgtagacaactgtaatgcaatagtaagcactctgtgtatctaaacatatctatagaaaaggtgttgtaagaatatggtattataaccttataggactactgtcacacacacggtctgttgttgactgaaacatccttatgtgacacataatgatgtgtatatcctcagaactgttaagaactattagatgttgaagagatggagttttgtatgcataaagtttggtgcttgtccttgacaagtctctgttctatttggagattagaaatgaatgcttctattaagtgtaacctgcatgacatcttttataagggcaatgaaaattcaggaacagagtagaggaggagagaggactgggaaaaatagtctcttggcatgaagagggtgtgtaaggatgggagggacaagaaacaagatgtgtgggtggtggtggtagaaactgcacgtttggggagcagggtggggtatttaccaaaccaagggtctattgagtaaggtgagttgtactggccaagcggccagtttatgaaacatggaaaaaccaggcccagaaatttaggcttgatagagcaggaaatctctatcgggagccccgcccctctttttatggaagttaagtataaatataaatatatgatttctcacaaagagacaacaaacattgtaacttaatataggtaccctctaaaccaactaagatctctttagacctttgaaatacaaactgtgggcttgctttcacattcacttattcattccacaaaagattatggggcacctactagagctagcattttgttaggcaccatggggggtacaaagaacaaaaaaaacttggtccctattccccaggagtttacagctcagtggtggagacaaacgtgtacacaaatccttacaataggaggtaaaaatgtaaatacaggattgtaggggctcagttcccagagatactgcatggaggtggtgtggaaaattagaaagattttttaacactagttggttttggatcaggtttaacattgatggagtagaacatgttctctttaaggcaataaccagggttaaggctgtggaagcacatgtgctggagtaacgaacagtggtctgatttggctggagagcaagtttcctcaaggggcgccgtggggaatttagctgggtatgtgcccaataaccgaggctgggaatctggtagaaagaagtcgagctgagactttattccgcatctctgtgttttgacttaggcatctattgggtccttttaaaaaaaattctcctcctctttcctaaagagagttctagcagttgggggtggggtggggaccatttcctaaagtcaacgcgtaagttaaaggtctgcaaggcggtccaccggtgatttaaatctcgcacttcggaaaccagaaaaggaaacctgtgagaagctgggcagggggaacccgcttaacatcaacagcaacccctaaatggcatcagaccttggagagacaggttgcaggccagactcgggagccaggcgccagcacccgccagagctctgagccccgaactggtgggcaaggggtagaggaagagagggagggagggagggaggaagcgcgagagggagggaggaagaaagggagggaggcggcgtcatgtgatccgcttccctgctcctttaagcgtccacaggcggcggagcggccacaatcacagctccgggcattgggggaacccgagccggctgcgccgggggaatccgtgcgggcgccttccgtcccggtcccatcctcgccgcgctccagcacctctgaagttttgcagcgcccagaaaggaggcgaggaa

SEQ ID NO: 1744 - DNA, 2300 bp, Homo sapien
cccaaagggccgggattacaggcgtgagccactgtgcctggcctagtttatgatgttctacacaatctggcctatgattatctctagtccagtttcatctctagctattttcccaccttatgttagcctctagacttttataaataacacaagctgtgcctgaacactcttctacctgccctttgactggctaacttttatatatttatcccatctcagcttagatacttcctttttctcctggaggttcctaatgccagtatcaatgttcttcctgggtggtaccacagcatcctacggtgacgaggaggaggtggcctagatccttccttttcttggtaaagggtggaagcagtgtggatactttacttggtgtgttctgatatccatgtgtcactaggcacttgttctttgtgtcttcacatctcctcctgttgcattttaaagcactttcatagtatatggttttgcctaataaagcattctcatagcaaaaaaaaaagtatggtattgtgcaaataagtgctcactccaaattagtggtatatttattgaagtttaatattgtgtttgtgatacagaagtatttgctttaattctaaataaaaattttatgcttttattgctggtttaagaagatttggattatccttgtactttgaggagaagtttcttatttgaaatattttggaaacaggtcttttaatgtggaaagatagatattaatctcctcttctattactctccaagatccaacaaaagtgattataccccccaaaatatgatggtagtatcttatactaccatcattttataggcatagggctcttagctgcaaataatggaactaactctaataaagcagaacgcaaatattgtaaatattagagagctaacaatctctgggatggctaaaggatggagcttggaggctacccagccagtaacaatattccgggctccactgttgaatggagacactacaactgccttggatgggcagagatattatggatgctaagccccaggtgctaccattaggacttctaccactgtccctaacgggtggagcccatcacatgcctatgccctcactgtaaggaaatgaagctactgttgtatatcttgggaagcacttggattaattgttatacagttttgttgaagaagacccctagggtaagtagccataactgcacactaaatttaaaattgttaatgagtttctcaaaaaaaatgttaaggttgttagctggtatagtatatatcttgcctgttttccaaggacttctttgggcagtaccttgtctgtgctggcaagcaactgagacttaatgaaagagtattggagatatgaatgaattgatgctgtatactctcagagtgccaaacatataccaatggacaagaaggtgaggcagagagcagacaggcattagtgacaagcaaagatatgcagaatttcattctcagcaaatcaaaagtcctcaacctggttggaagaatattggcactgaatggtatcaataaggttgctagagagggttagaggtgcacaatgtgcttccataacattttatacttctccaatcttagcactaatcaaacatggttgaatactttgtttactataactcttacagagttataagatctgtgaagacagggacagggacaatacccatctctgtctggttcataggtggtatgtaatagatatttttaaaaataagtgagttaatgaatgagggtgagaatgaaggcacagaggtattagggggaggtgggccccagagaatggtgccaaggtccagtggggtgactgggatcagctcaggcctgacgctggccactcccacctagctcctttctttctaatctgttctcattctccttgggaaggattgaggtctctggaaaacagccaaacaactgttatgggaacagcaagcccaaataaagccaagcatcagggggatctgagagctgaaagcaacttctgttccccctccctcagctgaaggggtggggaagggctcccaaagccataactccttttaagggatttagaaggcataaaaaggcccctggctgagaacttccttcttcattctgcagttggtgccagaactctggatcctgaactggaagaaaatgtctatccagtaagtatctctgggagacttttttaaaacaccttcatggattcatgataaatgtgctatttcaagggctcctgaagagaaggcattgattaatgacctgtttaggaaagacccttgaattttggtggggaaatt

SEQ ID NO: 1745 - DNA, 2300 bp, Homo sapien
tttacaaaaagacaatttgaaggaattatttgtgttgtccaaatattctttcctttacaaaatgaattacaataaaatcttattaaactaagcttccctaatgcttttaaaatgatattaaaattttgctttatgtatgatttttcaggtatacaaatgttaaacaaaatactagcaattgactgcttccagtggaaagataatgaggaagaatgaaatacaccctttaaatttttgaactgtggcagaatttgttgttaaacctagctccttcatgaaatacagattttatactttttatgtttaaaaattgtatttaaattaaaatatactttacctttttctcttgccttctacttcttagggccaagaagcaatgatatgaataatccaacttatgttggatttgaacgagatgtattcagaacaatcgcagattattttctagatctccctgaacctctacttacttttgaatattacgaattatttgtaaacattttgggtatgtatagattttactgattttagttcattttgttaaagttttcaactttcttataatttagaagatctaaaaccataggtaaatataaaggtggcagcctacaaattattttaaaattcagtgaaataaggttccgaggttactcatacttccgcccagccaactaccaattcgggacttccctcaaccccctaccagactcaataattcactacaatgattcacagaactcagaaaagcactttaactatgactattagtttattataaaagctagacctcaagaatagccaaatggaagagttacacagagcacggtatgagggtgggggtggcacagagtttctctaccctttctggtcatgccgtgatcccagcacatccatgtgttcactaacctagaaaactccctcagcctgcatgttttagagttttaattgaagtttaattaccaaggcatgactgaccaaatcattggtcactgttgtcaattgaactcaatctctagcccctttctcctcccacaaggttgtagttggtgatgaaaattcaaaccatggccggccctcagttaccttagcatgaactcagatacgctgaaataggcttgttatgagtaactaaagacttctatcattcaggaaatttcaaggattttaggagctccataccaggtaccaaggacaaagatcaaatatatgtattttattataccacaattatcttatatttatgaggtttctagtacttgcagactgagaacagattttttaaatgtattctggctcaatccatttaattaggctgttgaaataattttttaaagttatattacaaatgggaaaaccactcatctgtcttgcacgtttgtaaccgaatgttgcatgtgtcctatttaagtggcttctgaattaagcaactactgtgtatactatactaacaatatatactatagtaatgctttattttttaactttactattgtttttgttttatttttgtccactgtcatacagttgcatcttaatttttgtttcatttcctggtagttgtttgtggctacatcacagtttcagatagatccagtgggatacataaaattcaagatgatccacagtcttcaaaattccttcacttaaacaatttgaattccttcaaatcaactgagtgccttcttctcagtctgcttcatagagaaaaaaacaaagaagaatcagattctactgagagactacagataagcaatccaggatttcaagaaagatgtgctaagaaaatgcagctagttaatttaagaaacagaagagtgagtgctaatgacataatgggaggaagttgtcataatttaatagggttaagtaatatgcatgatctatcctctaacagcaaaccaaggtgctgttctttggaaggaattgtagatgtgccagggaattcaagtaaagaggcatccagtgtctttcatcaatcttttccgaacatagaaggacaaaataataaactgtttttagagtctaagcccaaacaggaattcctgttgaatcttcattcagaggaaaatattcaaaagccattcagtgctggttttaagagaacctctactttgactgttcaagaccaagaggagttgtgtaatgggaaatgcaagtcaaaacagctttgtaggtctcagagtttgcttttaagaagtagtacaagaaggaatagttatatcaatacaccagtggctgaaattatcatgaaaccaaatgttggacaaggcagcacaagtgtgcaaacagctatggaaagt

SEQ ID NO: 1746 - DNA, 2300 bp, Homo sapien
taggtcataaagccaatccactgcttctcctgctgtgaaacaattgccatattttttaaagtgttgtctgtgttttcttagaggcattcctgctcgaaaagatgtggtaacttcattccactgtaaaaagaaggaaaatatttttaaaaaattgaagaaaaattaaatctcatattgatttgaagtacattaggtaaagaaaattctttaattcacatctgattatatcataaaaattcttgaagaatcattcatcttatttgtgccatataaaattttatatctggccgggcacggtggctcatgcctgtaatcccagcactttgggaggccgatgcgggtggatcaccggaggtcgggagttcgagaccagcctgaccaatatggagaaactccgtctctactaaaaatacaaaattagctgggcatagtggtgcatgcctataatcccagctactcaggaggctgagtcaggagaatcacttgaacctgggaggcggaggttgcggtgagctgagattgcaccattgcactctagccttggcaacaagagcaaaactcagtctcaaaaaaaaaaaaattatatcttacactgctttctttttattaattctagtgctgtagtaatatttttatgtaatagcttttttattagaagaacttcattggctgatctaagatccttatttaagatcctgagcttatttaagaaatctggaaataaggaagaactacaatcaatagagaaaacattcatccctgttttttacctcaattaatattaatgttggtagcactgtgcttcacattcattatttcactttaattaccccaattctatgaataggtactattaatttctcatttttcacataaggaaaataaagcagagagattaataaaatgaccaaggtcacacagctaagtgatgaacctaggcattcaaacccaggtgtgattgactctagaaactgatattgagctgctcactctgtactggcctgaggacacagtaataaaaatgacagaaagggactctgtactaagggagattacagaacggctttcctgagatgcagtacagggtagtggctttaagaacaggctctggagttagactagtagggctggtttcccagctctagctctgccactattgtttatgactttttgggcctatcttcaatctctatgcctcaatctccttaaccacaaaacagggacaaaaggacctaacgaatgggcttattggaatgataaaatgatgtaatatatgtgaagtactagtaagcattcagtgcatgttttctttttcagcgtgcttatactactttcatctaatgggttttaaataatgtggcaggactactgattgaggttccttcctgtcctaaattctatccttcatattggtaaatatagccaataacttactaagtagcagaatccatgtaagatcgccataccaggaagatctgaattctagctctgccacttgctgttgatgtgactctagagggcatttaacgtctgtgagcctcagtgtgcacctgataaagtagggctaataatacatgctcgtctgaagggcattcctaagaggaaaatgcttgttattctgcagatcacaacacactttaaaaaacagcatcctcctgggaaaccccttaaggcaagcatgtattagtaacctttaccaatgtggaaacaggctcacagaaggtaggggactcacctaacgtcacataaccagcaccacagtatcctatagaaccgaagacccaactgcacaaaacgcgttaggagtgctgtacgtgcaattcagggaccaccagcagtggttactgatgggtactcagaaataccgttttgaaacaggcagctgttatcctagtgctattcggccgatacatcctgcgttaaattctatgggttcaataaacaaaattgccacattcgggcttgccccccacctaaccctacaaagctttggacctcattcccaattgttccctaattctgaggcgggtagaaaatcaggcgaggtgagcggccaaatcggaatattctaagacgcccccacgggacgccggccacaccaggcacaggagtcgctcctcatagcgagtctggtgcggcctacgcgcggcgcttcctttcggacctgaggcccagaccctcaaaatagagggagcggtgagtctggcaagggttgcatacccgctacttctcctcgccagccttttcactgaacctagggatcctgggactcatccctccgaccgaggtaaaactgcgaa

SEQ ID NO: 1747 - DNA, 2300 bp, Homo sapien
cctgcctcccatccaccattatctctccagctacctgaattaagttctgtgtggcttgggacgcctcacgatcatggcagaaggtgaaaggcacatctcacatggtggcagacaaaagaagagagctcattttcttttgtgatactcattgtatcacaatgagtagattaggttaggttcagctagaagagtaaattaacagaggctcatatttctttcatatataagtccacagctaggcagttcatgggcattacagcatctcagctgcacagtcttcagagatacagcctcctccaaccctacacatttaccctgtactctccctcccatgacaaacacacacacacacacatacatacacatatatacatacaccccaatcaggatttggggaatcccaggaatcagcattttaacaggtattgcaggaaattctaaaacatgtagtttttaacccactctgagaaattctaatgtaggagaattaggaaaaggatgataaagtgactctcgcagaattggtaatgagaggaaataaaatgacttccaagatttaaactatgcaatcaatgaataattgttaagagcaaaggtatgtaaagttaccttaaagaaactcagaccactcacatttaacaaaaacctaacttttaaatattttatcatctaaagacactataaatgtgaaagtggatggtgcagagtgaatccacagccacagtggattattaaggtactattaagctgtggctacctatatcaaaggctgtatgtgagatgattttcaacttggggagctgggcaaaaataaattttggcttccacagtctcatctccatttccttctgaaaggaaaaagaaaagaaaaacgaaaatcctgggacaatgtatcataaagccaggtaagaaacagttaacattattttgtaacatcaatcattttacttttccttaacataagtggaaaattgagtagattgttcctgtttaccaagtatgtttttgaaaattcctacccactggtcctggtagaaaatagatgtgcttctgcccaaattaaggaaaactccacagacctacactaccactccctgaacatttttctttatctcttctttttactgcatcctatcctcttaaactgctatttaatttccaagtgaattcttccacagcttcaaatcactcaagcaatctcccactttactaagggattcttagcatcagatagtttcagactggtgacagggtatttattaaaagcatgaagtctgtgctttgccaaggagacctaagactgagtaagtctcttcaactctcggaatgtagtttttgtcatttgaaaattgacttctgttgaagatttattttctaagatcctagtgaaattttaagtgtataatcacgatccaaacataaccaacattcttatacagtggtagagtttaagggaagcaatttgacaagttgtacacaacctttcccaagccccacattgtatgtacttaagaaagactacctataatccattttattacccaactggggggttctgaatgatccattttactgcacaattagggggttctgaacctagattttagcacttcagagaatcatggcacctgctgagagagaggataggcagcagagagagaaactgcgacacatatccatcaggttgctttgccttctaagctaactgctgaagatcctgtagggccaggcagaaaaaccgtattttcttgtcttttcaaatttcaaattcccttaaaccaaaggctggactccaaataatttcgtttggaactaaagagctcatcccctctgagcacgaaaacaggactctgtgactccgcctcgccgtagaccgcaggagggagaaacagcgccagggaaacccgagcctgtcccatcgaggcggtcccaggccagcccagcccaccccagcccgcgccagctactggagccccaggacgcagccgagcggccctcgccgactccttcccgagcctggctgtggcgtcacgtgacccgcggcgcggccaatccgcgcagccctctatgctattcaaatcggcggcggggccaacggttgtgccgagactcgccactgccgcggccgctgggcctgagtgtcgccttcgccgccatggacgccaccgggcgctgacagacctatggagagtcagggtgtgcctcccgggccttatcgggccaccaagctggtaagacagctcggatagacgggaccggtcagcgggctgacggcagtcaccactgttcgcagttttacc

SEQ ID NO: 1748 - DNA, 2300 bp, Homo sapien
tagctcttcttgttgaattgatccctttaccattatgtaatggccttctttgtctcttttggtctttgttggtttaaagtctgttttatcagagactaggattgcaacccctgcctttttttgttttccattggcttggtagatcttcctccatccttttattttgagcctatgtgtgtctctgcacgtgagatgggtttcctgaatacagcacactgatgggtcttgactctttatccaatttgccagtctgtcttttaattggagcatttagtccatttacatttaaagttaatattgttatgtgtgaatttgatcctgtcattatgatgttagctggttattttgctcgttagttgatgcagtttcttcctagtctggatggtctttacattttggcataattttgcagcggctggtaccggttgttcctttccatggttagtgcttccttcaggagctcttgtaaggcaggcctggtggtgacaaaatctcccagcatttgcttgtctgtaaagtattttatttctccttcacttatgaagattagtttggctggatatgaaattctgggttgaaaattcttttctttaagaatgttgaatattggcccccactctcttctggcttgtagggtttctgctgagagatctgctgttagtctgatgggcttccctttgggggtaacccgacctttctctctggctgcccttaacatttttccttcatttcaactttggtgaatctgacaattatgtgtcttggagttgctcttctcgaggagtatctttgtggcgttctctgtatttcctgaatctgaacgttggcctgccttgctagattggggaagttctcctggataatatcctgcagagtgttttccaacttggttccattctccccatcactttcaggtacaccaatcagacgtagatttggtcttttcatatagtcccatatttcttggaggctttgctcatttctttttattcttttttctctaaacttcccttctcgcttcatttcattcatttcatcttccatcgctgataccctttcttccagttgatcgcatcagctcctgaggcttctgcattcttcacgtagttctggagccttggttttcagctccatcagctcctttaagcacttctctgtattggttattctagttatacattcttctaaattttttttcaaagttttcaacttctttgcctttggtttgaatgtcctcctgtagctcagagtaatttgatcgtctgaagccgtcttctttcagctcctcgaagtcattctccatccagctttgttccgttgctggtgaggaactgtgttcctttggaggaggagaggcgctctgctgtttagagtttccagtttttctattctgttttttccccatctttgtggttttatctacttttggtctttgatgatggtgatgtacaggtgggcttttggtgtggatgtcctttctgtttgttagttttccttctaacagacaggaccctcagctgcaggtctgttggaataccctgccttgtgaggtgtcagtgtgcccctgctggggggtgcctcccagttaggctgctcgggggtcaggggtcagggacccacttgaggaggcagtctgcccgttctcagatctccagctgcgtgctgggagaaccactgctctcttcaaagctgtcagacagggacacttaagtctgcagaggttactgctgtctttttgtttgtctgtgccctgcccccagaggtggagcctacagaggcaggcaggcctccttgagctgtggtgggctccacccagttcgagcttccaggctgctttgtttacctaatcaagcctgggcaatggcgggcgcccctcccccagcctcgctgccgccttgcagtttgatctcagactgctgtgctagcaatcagcgagactccctgggcgtaggaccctccaagccagatgccggatataatctcttggtgcgccgttttttaagcccatctgaaaagcgcagtattcgtgtgggagtgacccgattttccaggtgtcgtccctcacccctttctttgactcagaaagggaactccctgaccccttgcgcttcccaagtgaggcaatgcctcgccctgctttggctcgtgcacggtgcgcacacccactgacctgcgctcactgtctggcactccctagtgagatgaacccggtacctcagatggaaatgcagaaatcacccgtcttctgcgtcgctcacgctgggagctgtagactggagctgttcccattcggccatctt

SEQ ID NO: 1749 - DNA, 2300 bp, Homo sapien
atgacagggcagcttgaagtttaaagacagcacctgcatttgcatttcaatagttccataattctatgaaaccactgaaatctcttcaatgtctcattgtttaaatagtaaaggtggccagattttgttcaagattcataatcttacaaaaatatggagccgttgtattcaaagcttattctaaagagaataccttctctttacaccttataatcctgtttgttaaaacccataacaattaggtggacatctgaacatatttaaagtattttatccattggatttttatggtccaaaatcaagattctaggacaagataaatgggaaaggaggacatgtagtttgaaatgtgttatatcagcaccatcaatttttaattcggggttccaaaattatctttttctccattggaaaggaatacgtttgtttccacgtaggaaactacttccacttaacacacagaaggtaacttcattggtaggtatgctgcctgtatgcaaggatctgcagttactcataactggctgtgtttttaaacagaataatttttgtcaaatattttgatacaaaacaatgaagcctgaagttaaaataagaaattctgggctcaagtgcagggcaactggacacccttatgagatgagcctttgtgcccttcctgtaagtgtggattagattatccaccacctagatttaagaaaggattaaatgaaagaatatatgtgaaagtactgtgttgactgtattaaaaagaactggaaacccataaaggaccgctataattgtgtaattgttgcgccaggttattttgtcaatacatttttaatcagcacctaaaatatttcatgtcacttcatccagcagagacattgagatgtggcaaaatgtttaaaaggacaacactataggtgaaaaaaaaacagagcacaacagtagtcaattcaaaaaaaattcttttaacaattttattccatttccttgccattttcagagccctttcttttggtgttttgtaacaatataaaaaacgatctggcttttcaaaatatactccttttcctttctatatgcaaatgatatgaaacactggcaagttgtccttaaaagtcagcccaccttcatggcccagataaagtgggcaataattcctctctaggtcctccgcacattaggtgccagtctctcaagtctcttcctagacaatttctagcagccaggaaacataatttttgaccttgaagactttagcattccaaatctaagaatacaatcaggtgtgttttcttttggcaaactgtgagcttacacacacccccagagtggcatttgaatgctgtgcacagtcttgactgtgttcgaggttagagaactaaagacaagattctttctctcttgtaatgaagaaacaaaaaccacatagcctatattccacaaaagaataccagcataatatatccttttttaaagatgtaattcattagatgtgtgtagagaataaaagtgtaaatataggctgggaacggtggctcacgtctataatcccagcattttgggaggccgagacaggtggatcacctgaggtcaggaattcgagaccagcctgggcaacatggtgaaacccccgtctctactaaaaatacaaaaaaaatcatccgggcgtggtggcacgcgcctgtaatcccagctactcgggaggctgaggcaggaagatcgcttgaaccggggaggaagaggttgcagtgagccgagatcgcgccattgtactccagcctggtcaacaagagcgaaactccgtttcaaaaaaaaaaaaaaaaagtgtaaatatagtactagcttcattgatatgtcttgctgcttctgggactttagagaagcgtataagaagaaagtgtgtgtgcctttacgtaagggagcatatgagagagagagagagagtgtgtgtgtgtgtgtgtgtgtgtgtgtgtgtgtgtgtgtgtgtcagagagaatgttcatggcaggaggaggggcggtgaatatatgaagggaagttgggaaaacccttccctttttgtgcactcccagggcagcagccgcaaccccagaatgaggagaggacttaagagcaggcacaaggttcgctgccatgactgatgtgaagcgacctgacgcacaagcggagacttttctccttggcagccaacaacctgcagcaggcaaggcgggcgggggaggaaaccccgaggaggcgctcccggccgcctctttgctgagatagcaggagcagcagcctgaggagccacgagctcagcgtcactgagc

SEQ ID NO: 1750 - DNA, 2300 bp, Homo sapien
catttactaagtgcctattatatataatatgttagacacttatgagggtgcatttactgggtgcctactatgtgctagatgccaggtaacaacatgaaaggcatcaatcctacaatcaagaatttcaagtaaggttatgtaaaacaatagttacaaaatcttgcgattctggttcccagaaatgaaaagaacaggagttggagagacagaaagtaatggagaagaaaggtcaactttttaaatgtttttattcagccttctacagattaccatgtgcaaacaatcgtctataagtatttattcatgaacctgtccctagaatatccttttattaatttcagaagttgaacaatgaaaaaggatcactttaggctgaacatctagcacctcttaaagcatgttctacttgattgcctccaaatatttttttcttctaacttttacttatgttcatggggcacatgtgcagcattggttacacgggtaaattgtatgttgcagaattttgatatacagattatttcatcacccagataatgaacgtaatacccaacaggtagttttttgaatcctcaccctcattccaccctccaccctcaggtaggccccagtgtctattgttcccttcttagtggccatgtttgcgcagtgtttagctcccacttataaatgagaacatgcagtatttggttttctcctcctgcattaatttgctagataatgattgtctccaaatttgacttaacatgagcaattttaaaaacaaaatgctacattgtttttataaatgttactaatttctgtgtaagcaataaatttgtgttactaagtaaaaatacattagcaagttaaatgcaagtttcaaattcatgtttattaagttttaattctgtagttggcaaactgcactatgtactgtaaatttaaggataagtgaaacaagatctcctcagagaacttgcctgatacatggggaaatagcccacacaattaggaaaacaatatgattagtggtgtgggaactcagagaaagatgctactcatctttcctaggaagacattcacagagatagtgaccttttcgttaaaataagtttttcaagcaattatcagtagctgacggtgattaggaggagagtcctaagtatattcatttattcattcatgctttcatttgtttattctacaattgttgttaaatacatactatatatcaagtaccaagataaatacaagaatgaacaaaataatcactgccctgaaaggccttactgtttaggaggaaaaaatacatgaaaaacagtagattgaataaaatgttgaaggtgccatgataaaagtcttcgcaaaatttcatggcatttggtcagtttaacctagaggaataggagaaagatgtgtcaggagtgtcacaggaatttctaccataattacaagttgttttatcccatattacaaggttcgtaaagatagatccccatttggaagtgaataaccaatccaattataatctgtagtttcaacggaataaaaactccatgaaaacagggtctttgttcaatgcatcactgtctccactagaacagtgcctaaaacagctgttattcagtaaatatctattcaccgatgaaatttgtgggctacaaagagtacatcataaactttgggattgaaacatgaatatttttacagaaatgggagaaatgtttttttccgcaaattctggaagtttctgttctacactgtaatttgtgtaaaaatagaaaacatattatagctccatgtttcaagtgaggaggtaagcatgctagtagcattgaactgagacaggattgtatcctaattcgattctgccattccaaagctgtgtgatgatgggaaatctctcgcactttttgagcccattttcgaatttgctagatgggaataaaacctatttcacgtacttcgcagggctgtttaaggatttaatgatacaatgcgtgtgtgtgtcctactttaaagtattctagactgtataccaaaattaaatttctaagctttaaatattacaagaatgccttccaagggcactggataagctgttttgttttgttttgtttctgcgtttctctagtgcagtgcctggagatgaccaccaaacggaaaatcatcggccgtctggtgccatgccgatgtttccgaggtgaagaagaaatcatctcagttttagattactcccactgcagtcttcagcaggtgccaaaggaggtctttaacttcgaacgaacattagaggagctttatctagatgccaatca

SEQ ID NO: 1751 - DNA, 2300 bp, Homo sapien
acgagcttttgacatttcaagaactcattgagattgtcaaaggcttcagtaatgaactctaacaaatagatccagaagtcataagtgagaaagaaaacaagcatgtctagtgaaatctgtccagtgtacgtaacactgcacaaagagcatattttattcagaccatttggattcagatgtaccctaaagacaactatgctataatggcttgtctcctacttcctggcctctagccctacccattgcccaggtggacgttatgtttttagtttttcctttgtgggtgagggaagaagaggacatcaggtgaagtgtgccattactatttgaaaactagctctgcaggaagggttaaatcaaatcctttacagggtgaccttcctacatctccttagagcaactgcatttcaaaataggccaaagctgaagtcataggaatgagacattaattgtaggttttcaggaaagcttcggagacacggcaggtacagtctccttagagcctttgaaaatacaacatgtaggtccttctcagattatgctgaaactccaaatccttgttaaaggttttcctggactcctacagtctggtttgatcagtttattattaagtactgaatgacagagaagggtacacagggaggacttgtatcacatgaagtaaaataattatttccttaatgagaaacttaattctagggtacttacaatagctgccttattgggggaagggaggcatagatttgcaaatggtgggttttttcgtttttttgtgtgttggagtaattgaaaagatacatcaagcaataataaactagatgtgcaataatcttgtcgagtagtatgtgctggttttggaaaggtgaaaagaaaattgttacatcaggctgcttttatcaagctaagcatgggcatgcctttccaaagggtatatttgatcctacagttaattttaacattgggctgcaagcttaacctcatcaggagtggaattagattttacaaagttccccttatccaaactacagcacgcttactactttctccttccattttccacacctcagccccctaggaccagctactggtaagtcattttgtccattttcattgatctggccacataaggaacatcctgtttctttaaatcctcaatgcttaaattgccatgtagaaatcaactccctatcaattttctacatttaatccttggcttcttgtcatattttcatttttctgcactggttcccatggcaacaagtctgttggcagagaaagtatgactctgcttttagccttctgcacaagacaaaatccttctggtgatcctcaggcaagtataatataaaaagtcaggaattgactacagttcccttggctaatgcctctaatcctttactctcttgcatgcattttccaccttattcccaaaccaggcttgagaaaaaaagcattcaagggccctgcccagtatctctttactgatacaagtattcaaaggccctcctatccaatcacagccacaaagactgaatattttggttcagatggctttcccttctccctaagtgtcagtgacttaactgacataaatgcataattaatgacaaggaccactgggagcagcatcgagaagcaactttcagtcatttttctataaacaactttcctcagttcgcaactgaggtgtagcccagggaataagtatgtcctgaattgagccttaaatcagtgactaataaggcaatggaacactcaagcagattttcctctaatgagtagttaagtggcacaggaggagaggccaaggagtcatcccagagttctaagctcataaagaggaagagataacaaaagatgtagataagaggacattgttaactggtggctgcaaatgagcaagggagcttcattcagttgggacaattcagggttcaggtacgaaaagggtatgaagcctactgaaaaataaggaaatggagcatggagaaagaaagggtttttaagagttaagtcagtagaaagggagcctgcaaatgagacaatagcttcatgcagactttggcccaactctgtctacaaatacttttgcaaataatgtttctcttaataaaatgatatattttgttttgaactttggaattccattgtggcttggcactaaattataggcctagcaatcctaaatctcctatgtcctcaatatctagaaacaagcaggaactgtttgtcagaaattaaacaggacttatttgaatgtgctttaaaaaaaaaatcaatgaattcaggggaatgaaaat

SEQ ID NO: 1752 - DNA, 2300 bp, Homo sapien
ctatttaacttattttttgttttagaaaatgtttttcaatagataaatggaatggctattataaaagcatgtcacttagtatctagttctggttttcatctttttttttttttttttttttcctggtgtggtgctgatggaactagtgccgcagtgtgtctggagaataaatgtggatatccctgaggaagctaatcagaatctttcgtttggtgctactgaaagatggtgggagcagacagatttgaccaaactaataatatcaaacaataaacttcagtcacttacagatgacctgcgactcttgcctgcactgactgttcttgatgtaagttgactgactataaatatggattattaattgaagagactctaaagctaaatttaggctttggtagcagaaaacctttcatgttgagttggtaatgcaaggacagatagtaaattatcattctaggcatagcataatggttaaaagtgcaggatcagaacaccaagtttctaattctgacttctgctattaatggctgtgtgacctggggagagttacctctctgtgccttagtctccacatctgtaaaccaagactgatactactacctatttaaaaattttgtttgtagaattaaataagttaatgaatacagacagaatcaatattcaacaagtggttatttctgctcatcttttttttcttattactattttgcacaggcaaaatagtggcgtgatcatggctcactgcagccttgaacttatggactccagcaattctcctgcctcagtctcccaagtagctgggactataggtgcatgccaccacacccggctatttttttttgtgtgtgtagagatgagggtctcactatgtttcccagactggtcttgaactcctgtcctcaaactctcctcctgcctcagcctcccaagtgctgggattacaggcgtgagctactgcacctggcctattgttacaatttttatcattattattctagatattaaagcaagtctatatgtatatgtattacttgccttcaacctcattgagttaaattattgaacttaatttttttgtgtttttattcagggattctttttagtcctttgttgccatgtcctgtggtaaagtgaagcacaaggagtatatttcataatctgcgggcttcacaatctggtatactttacttatcaacataaaaagtcctccaattcatgtgttgaaaagtagaatctaaatagatcaatttttagggaactttttattttcttcatttgtaaaatgaatggattggcttactctaaggttctttctaccttaaaaactgattctgtgagaacatgagaaaagtccctttctcttttctcatataatttttgtatatattgacataaatcatatcatcagagagctgtttttagtttctaaccccctcatctcttctttgaaattgaaactctactaatgagttgaaatttttcttagtataatatttaaagtggttgacttaacacttcatgacttctcttctcttctcttctcttctcttctcttctcttctcttctcttctcttctcttccattttttgagacagggtctcactctgtagcccaggctggagtgcagtggcacaatgtgggctcactgcagccttgacctcctaggctcaagcaatcttcccacctcagccttctgagtagatggggctacaggtgtgcgccactacgcctgactaataagaattttttttttttttgtagagacaaggtctcactaatttgcctaggctagtctcaaactcctgggtacaagcgatttgccttcttcggcctcccaaagtgctgggattacaggtgtgagccactgcacctggccttacttcatgatttctgaacagccgtttggtcatcttcaaactgttctacatacagaacaagtatgttgaacagtagttcaacttgttgccattgaatttgaggaacaggagattactgactaatagttttgtacactggcaaagcttatatattgttaatgataagactaagaatattgactttgtcttttaaaaacttttagatacatgataatcagttgacatcccttccttctgctataagagagctagaaaatcttcagaaacttaatgtcaggtaaaaattaagcttatttacttatattattgcccttataatggtttaaatctaatattctttaaattttctcaacattaaaaatatctttgaattatctcagaaagtagttaaagcagaataagaattttaagttttttaaagc

SEQ ID NO: 1753 - DNA, 2300 bp, Homo sapien
tgctgccatgataacagcaatggtgaatttttactgtgtactttttatgtaccaggcactttatttcattttatctcatttagaccttaataggtcctgttatgactcctgcataataaatgagaaattagggcacagagtgattaaccatctcaatgttatgtgagcaaagataggaagataagaagcacgaccccgtaacgaactacaaacagttcagaattatagtggtttgcctatcaaagtttcactaacaagtgatgaaactgagggctacatacagccagacagagaaagactttctatattatagtaacagggattccttttttatatataagctacaaataccatgagtttctgccatttatatctttccctcctatgaaatgctgtttattcactcatttaaaatcattttatgtaccaggtaaagtgttaggttctggttatataacaataacctaagcagttctaatccatatcatcacggacctaagagtcagaatccatgtgctctcttaaagtttaacagacgaaaccacctgagtctagtcaataagtacattctagcacaccacttatgatttgagaatactcattcacttacttattgcttccgcaaaatttaataagactctactatgtaccaagcactattttcagtgatagaaatacaacaaagcacaaaacaaagctcactgacttcatgatattaaccttttggttggagggcagagaaaacaaaaaacataaatgatataaattctgatagtgataaatgctgttaaaaaattaaacaggtaagagaacagaatgttagcatgataggtatgcaagtttagagaaaaatgtttcaggttttggggaaaccaagtagatatatatatatgcacaactgtagtttgaaaatgagtatgttcccattgatcaaaaactcttttaggtggagtaaggattctgtgtcttttcattcattcagaagcatttgcttgcctaatctactttatacatgtcacaataagaaagcaatcattagaaggaaaatggaaggttttaatcagtcttaaaacctaaatataaatgaagaaaaacattacaggaaaaatgctctatttctccatctctccattcccctccctctctctcttacacacacacacacacacacacacacacgacaatcagaagagcatctggccattcattcatggtacccagatttgtgcttcttggtctttaacaggtttctcaggatgtccccacattcaaacactctgtgtggcatctatcctgatcttcaacttagaaaatatactcattattccttgtaagtagaactctgcacagctgcatacagaagagcgtctcggcagggaacagtgcaggttcacaaaggggccgataaaacatataattttagctttggtaattgcccttgaagattacaataagaggaggaaaataagggccaaagaaacaaaagatttgcccgtgatttgatagctggtttcgtcacatattatgttgcttatcccacagaatgtgggaatcccagaaagcgccccgtttaaatttagaccgtatttttagcagggtccctttaacagagattgcgggaacctgggaaggaactgaactgggctaaccaaaccggtcgaaatgagcacagggattagattagagcacagaaattctggctagcagtctgagaaagggggccaaagccagcccagagaaaagggaggttgcctgggccaaaggctttctgacaggagacacaatagggtcgtacctctgggtcttaccttcactgaggtttctacccgacaggtttaactggccgctcttcctcgctgccttcaacagcccttggggtaccgaggtaccgcagtctcttccacctgctttgaaaccagcgcggagatcctgccccgctatccgcttcaggcgcgacatgttcaaagtcctaggtccagaagctgcagccccacccgtgacgcttaaaggtggcgccgttgggatgccccgctcctttcgtgagcgcgcgctctgggcgctgggctcgcggcctcgcgctgggccttcactctctgcggcgcagtccagatgtcgtcagcaccagcgcctgggctggaggacagagaagccttttccgttgccggtgccggcctagcgtcctggaattacttcaatcaagtaagtgcgtttaacgggcttaagaggggctttcgggtttattgtttgcactgttactgcgactccaaccttctcctctgtgcttccaccgtggcgagggt

SEQ ID NO: 1754 - DNA, 2300 bp, Homo sapien
gtggttactgtaaaattttgtactcgagcaattcaattctccaaaggtgggttgtttcttccccaaaggtaggttgttactataaagagaaaaaggtggttctttaataaagaaatcttcttaaaaacaactgaagtgtctcttacaatgattacaggattaaaaaaaaaagcaagttgggaattatgaaaagccactagggaagtcatggtgattaaaaagaaaggttttggagacagatctaggttcaaattcctggtcgtgctattcagagaaacttgtgaggttgggtaagtttcttcaccccttttagcctcaatttccttatctgcaaaattagtcactgtgttaaataagaaatagcaaacagaggtattattagcactgagcctggtatgggcccaataaggcagctattaccattactgtgaagacaagctgaccagggacctcattaataacgttgcaaaagctgctacggtcgttttcctttaaaactcaggctgggcacggcgactgacacctgtaatcccagcactttgggaggccgaactgggcggatcgcttgaggctgggagttcgagaccagcctgaccaacatggcgaaactccgtctctactaaaaaatataaaaattagccaggtgtggtggtgcgcggctataatcccagctactggagaggctgaggcaggagaatcacttgaacctgggaggcggaggttgcagtgagccgggatcacgccactgcattccagcctaggcgacagaccagactttgtctcaaaaaaaaaaaaaaaaaaaagacaaaaatccactctttgcttttttagtagggtaacaactattggtaactttctcttgttcgatattagtgtaaaggactccacagaaataagaacaaaaagggtagagttaaaaaccgaattttacaggtagcaataacctggactcaggtaaaagtgcgtgatgaagaattgatcaaagggccttcatcctagctttcaactattctaccaatcctcagtagacttgatgggggttagaatggtattccctggcatatgcttttaaaacaaaatcatttcaggcaaaagaaaagtctagcacccaggatagtacacatactaggcaggattaatcttaataattacttgttgaatcaagaagttgtacatttcagatgaaaattttaatttcctaggaaacaccgacttacattgaacaaaattttcatttgctattattctggactcaccgagagctcaagattctagtttttatcttcacttatttcaaaaaccttatgcggtaggaattatccccaaagtaatgaaaaaaaggaatgagctttaaaagcggttgagtaaactgcctaaagttaacagtttctaaagtaaagaagcagctgagatttgaacttgctttttagggctcaaaaatccaagctgtctgagcttcactaaagcatgtaccactacttgtctccctaaactgtctgatacacagaacatttattaaattttaaggatttttgtttttgtcttctatgttgccagtccttccatttcacattacctcctttgctgggtaagctatataccctcaatacaacgagaatggtgtcagagtacaagccttaagaacagaaaatttcttttactccgtacgccagaggtctggcgccaccaccacaagcgacaaacacaggctggggtccagaaacgctgccgaccgcgcccagatctcaagttttagtcaaggcccacgttcagactaggagaggggagaagagagggttctctttccccacaccctcgccacggtggaagcacagaggagaaggttggagtcgcagtaacagtgcaaacaataaacccgaaagcccctcttaagcccgttaaacgcacttacttgattgaagtaattccaggacgctaggccggcaccggcaacggaaaaggcttctctgtcctccagcccaggcgctggtgctgacgacatctggactgcgccgcagagagtgaaggcccagcgcgaggccgcgagcccagcgcccagagcgcgcgctcacgaaaggagcggggcatcccaacggcgccacctttaagcgtcacgggtggggctgcagcttctggacctaggactttgaacatgtcgcgcctgaagcggatagcggggcaggatctccgcgctggtttcaaagcaggtggaagagactgcggtacctcggtaccccaagggctgttgaaggcagcgaggaagagcggccagttaaacctgtcgggtagaaacctcagtg

SEQ ID NO: 1755 - DNA, 2300 bp, Homo sapien
tgataccaggaccccagaggatatcaaaatacacagatgctcaaattctttatgtaaaataggatagcgtttgtatataatctgtgcacatcctcccaaatattttaaatcatctctatactaataataatacaatgtaaatgctgtgtaaatagttgttagacaagaaataaaaagtctgtacatgtttagaccatcaatttttttccaaatattttcagtcccaggttggttgaatccacatacatggaacccatggatacagatcaaatgctttattacacaacaccattttacataggggatttgagcatcctctggttctggtatttgtgggagggtcctggaaccaatcccccacagatactgagggacagctatatgcttttctttaaaattctgaaaagtcttggctctagctaatgttagttgatttctatgaaggccataatttgtaattttgctgaggctcacattcagtcaacccatccattttctgtataagcactagtgaaagtcacttagccagttggctctacacccaaatctcaataaccttgtgctctaatctctcacatattgcatcttgactgcattgtgccaagaggtattcactaatgtagatactctgtaaggcttcaagtttgtttgtttgtttttacctccaaaacatctaaaacttttacctctaaaaacattcaaggtcaagtgaattatttagtgaactgtcttaaatgccattgtcattaaggtatatttgtgcgtgtgtccagcacattcattgggactgactgtgtgacagacattgtgccaggttctggactgacccaggaagctcacaactttgagtgatacatgtcaataataaatacatgtatcttctgttacttagcagaaaagaggaagccctaacagcttgcagaagtcatagcagtgagggaaggaatgctctacagaagatgacagataagatgagtgatgttattaataacttgtgtatcggcacagagacattatggtttttgtcatgtttggggcactacaagtcactggactacacactggatgcagttgagagaatagttcagatgaggttgaaaacaaaagcaaggatttttttaatagtcaaaagcttcaaaattattttaagcaagaatatgtatgtgaaacaagtttttcttgagaaattgcagtattttctttagaaatatatacttgaatatatttaagtactataaactgtgtttccaaagtcagctattgtggaattggctgggtgcagtggctcacgcgcctgtaatcccagaactttgggaggccaaggcgggtggatcaccagaggtcaggagttggagaccagcctggccaacatggtgaaaccccatgtctactaaaaatacaaaacttagcctggcgtcgtggcaggcgcctgtaatcccagctactcccgaggcctaggtaggagaatggcttgaacaggggaagtggaggttgcagcgagccaagatggtgccactgcactccagcctgggcgacagggcgactctgtctcaaaaaaaaaagtcatccattgtgaatgaatgtacaaaacgcttattaataagtgtaatattaaaatatatcttttctgaaagttttagtgacaaaacaaattagttacagatttaatgttaccaaaattcatgtacattgaaaatttcgggacattttatactggtggtggtggggtggcatcttagcttgggtttaaatatcattagtaatcggatagctctgtagatgattatcagtatataaagacatcgtgagcagtatttaataagaagagttgctgaagtgacttttgcaggaggatgaatgctttttttaaaaaaaaagtttatacgtgcctcttcgctcttccaaaaaaaaaagagagaagaaaaagaagaataaaacgagagacgaaggtggataacacctttctctagaccccggtgcctctcatttctcgggctgcaggcgacggctgctgggcctgcgcggggtggagccgacgctgacgcgccctgcgccgcaaagcattgtgggagctcgggcccgctagtgtcgtggttggaggcgaggtggggcggccgtttgttttctcgtggtctcgagctcgcgcgctctcatcccctcccccgcggcgtgcggcggggcggagaaacggcggcggcggcggcggcatcggcagcagtagcagaggctgtagcatcggacaccctcctctctcccgcaatccggttcctcttccccctccttctcactgtttgttgtgt

SEQ ID NO: 1756 - DNA, 2300 bp, Homo sapien
gtccaaaaaaaaaaaagagagagaaaaagaaatctgcaggctggaaactcaagcagggtttctgtgttgcagttttgaggcagaattgcttttttttttcctggaaacctcagtttttgctcttaaggccttcaaactgattagattaggcccactcacattatgtagggtaattagctctacttaaagtccgttgattgttaatcacatctaaaaaataccttcacagcaacatctagactggcgtttgaccaaacacctggcatcatagcgtagccacgctgacacataaaattatcatttaactttatacataaagctaaaaagccctccttggccactgcccacagtcccacatccccttgcagaatgtcaccagtttttatatcctccagaccttttttatgctctccatatgtaaatatgagctcataataataggtagccttttgttgttgatgcttactttttcataaagtgtcgtgtcatatcgtatctactgttttgcagctggctttttttcctcattctttagtatgtcgtagaaatcttctcttaccagtacatgtagtgctagttcactctttttagcaattgcatagtattctatatgatggatatactgtaacttaacatattcagtcttgtttttggacatttaaatgaatagtcacatttgtgtccagttttctgccattataaatgatgtgtttatcatccttttacatgcctttgcctgttataagtagcaagaaattaagtggctgggtaatggggaatacacacttaacattttgttgatatgataatttacatttactaagtggtttttcattataaggtttcaaaaactgataattaccacctggttatttcccagccacagataaattctgttaggaaatctaagctcactgattttcctctctaagcctaatggcattatagcattctcagttgtgaggtcctacattgcagtccatttgttggctttaaagtcttatttgtttgtactttgttcttctgggcagcattagatggatcacttcaagagaagataaaaattgaaactgctaatcatctagtactactgctaagcagctcaaagctcttgaagcatctaggtgatcttcttaaatctttgacaggtaaggagggagtcagtaatacttatggttcccattttgtaggtagaaacaggtgcagaatgctttgctttttttgcaaggtggactggaacacaactctgaacatgtagttttgaaatgtcagtaaacagcagcagggtggagacatgtgatttgcatgcagatagaaatgggaagcttgttttcagtaagttatttatcttttttttgttttttttttaagtaaggtatttcaaactctgaatacctgtgggtctgaaaaaggtaaaagttaatgttgaaggtttaagaggactttattgaaagaaagtaatgactttttttgatgtcctttacaccacttgagtttccctaaaacactttaattgtattggtgagcaagggtactcttttcctcttttctttgttgaaaacaggcagctgtaacttgaagtttggtgcctgttagagaatagagaatgtgaacaggtcattaattctggttgtactagagattcttgtgtgacatggactatttatttctttttattccactttttttctatctataaaatgggaacagtgttatccctgacccctccttgttactcgtgatatttgactgccagcttaatagttttgagatagctttgtgctacttgggagtaggatctgaagaaatgctatgtggcaattttatttaaaatcatttgcaaattaactaccatacatttttatgtattttaaatttctctttactgatttgaaatgtatgcttttgtgtatttttcaacttattgaataacttagatgtatatgttgtataacctagaaaatgtaagatagtttgataatttcaagtaccaaaggaatatttattttcacctacatgttacatatttatggaaaaatatattaccttgacactttttttaacctaaaaattttacttttaaatatttggttttgttttaggaaagagtaggaaactttttggcagacttttacctggtgaatggacttgttttagaatcaaggaaaagaagagaacatctcagtgaagaggatattcttcgaaataaggccatcatggagagtttgagtaaaggtggaaacataatggaacagaattttgaggtataatttttaattcttctaatttgtagttttcta

SEQ ID NO: 1757 - DNA, 2300 bp, Homo sapien
tatccttgtactataatagtaaaatgattaagtaatttaaatgtaggaaagaaaaactggctgcaactttaacatacttttttggggatttatgataaatgataggtggtgattttattacaattacaacattgtaaattctgaaaacaaatgcagttgttagataattatacagccaagagaaatcttactcgttttttttatctgaatttttgtcctaaaaagcctacgatccaatggaattaagtgagcttatttcacaggcaaatatttcattgatacgtatatcattttgagcacaaagttggttcagtgtgttctaactgaatgtatacaattttcatattaatagcagagcgatcaacaatatttgccaactacccagtttaaaacggctattaaatgttaaaatgtcagtgttcacattagtcttcaataataaatttactgttgcttaaaagtcaactcagtcacattattttttagaattaaacaaaaaattcagctgacaaggcaaaaagaaatggtcaatattgactaagataaaattaccataaaaatcataatactatttttagtcacagtcatcaagatgagacattactattagcaattatctacttaaaacaagcaaaaaatcaaatctctactcaaacaaaaatcggctgttgagaagtcactttaactgttctacgtatcaaataccaacaaatttctactgtgtggctttcagaaatctaacattctaagtttactgaaagcagacaaaaaagaaacaacctggtggcaggcaaaatcacaaccagttgcagtcaagatgggatctgtatgtgagcaatgaagggaggagggcaatttatgcgttcaaaatttaaaatgccaaggtagggggaagagagagaaataaagatatatagctccataaacaaagggagaaaaccatgttgggtgggaggcaacctaaaatttctgacagtccagaatcagcaaatcgaaggcctgtctcaaacaaaacagcttctcacgacaaactttgaagtgggcaaggaggatacattcctttgcacccacaagaaccaaccccttgaccactggcacgctattactgagtcgatcatgatttaccgaacggcccggatgatgggcaaaaagaagagtctgctggagggggcctaggattccagaagcctggggaggcacaccctaggctcggggaaggagagaggtggagaggggctagcactcctcaccgtgattatctttctgcccgatattgtgcgtgcggatgagagaggagagtctcctcacatcccccttgaagacgcactcgtgcaccgggtagtgtgcggggcaactgcctccatccgcgacgacagcaacggggttggtgccggccagaagggccggggactgggagttggcagtcacggaggaattgtgcagcggcagagccggggcgccggggggattggaggaggccggagctgccttcagctgtagccggtggtgatggttactgaagatcttatgacaagctttgccgcccttgccaatcctgcttctggtaaaggtaccgccgagggcagccgccgcttcctcatccccgggctccagcaggtccccttcttctttgctgggcttgtggtccctccgcagtgagcggatcttctccccggtcatcgccgccgccaggggcaagggggggaatcgggaggctcaccgctggcgacggagctggcgctgcggcggcacaaggcgattagagcggtggccaagagcctccagcgcagcatgaactcccactgagcccccgagcctgggacaaacgcatctcccggggaagagccggctctcgcctaggcacgaagggacgcgcgctcgctgggggaagctagaactcaggtgcccacgacaccaggatctcagtctcgccgtcgcagccgccgtcgctgccttacaccgaaaaacagggcacggccatcttcctcttgctcctctcgcgagagctcccccaggagtgaagagagagaaaacaccgcgataagtgagccacccgctccctccctcgcaccttctattcccagaatcactaggcgccggcgcctccgaggcagtgtgtttccgcccagagctggagtctcccagctgccagccgaccccgaacccgcactcccgccaaccgcgctttttgtgggcggtcggaaaccacagcctccgttggatatgttcggtgcatgttataaacaaccacttaaaccctccggatctgagcctcccgcagaggaatgcagaatgacgcc

SEQ ID NO: 1758 - DNA, 2300 bp, Homo sapien
gcatgagccactgcgttcggcctgagtcactgaattttctataaaggtgattgcattatgctattccctgtttaaagatctctaaaaagactattcctttttttttttggacagagtctcactctgtccccaggctggagtgcaggggcacaatctcagctcactgcagcccccgcctcctgggttcaagcgattcttctgcctcagcctctcgagtagctgcgagtacgggcacaagccaccacgcccagctaatttttgtatttttagtaaagacagggtttcaccatattggccaggctggtctcgaactcctgacctcgtgatctgcccgcctcagcctcccaaagtgctggaattacaggcataagccaccgcgcccggccaagtgtaaacttttaagatgacatacaaagccctgcatgacctggcccttcctctctctctagccttactgtcagatttgactgtaccacattctagcattgaagtattgggcaagttttttttaactgtcaagtgaggatactaatgctaatcagggggagataacagcatataaagtgccaagcatactgcctggcttagcgttaacaataaatattggctattgtggaagaagcaaacattattgcatgtattttttcagtctctactgctgtctcaagaggatgctttgaactgttgattgggtaatgttttaacataaacggaactctccactccaccgaaaaagaaagaagaggaagaaacagatttatctgaacagactgagaagaaaattggaggtgaaaagttgagtgactggggaggattaagagaggcccatcgagttgtttgtttgcggagatgagttagcagtagtataaactttaagaaagaagagatctggccgggcgcagtggctcatgcctgtaatcccagcactttgggaggctgaggctggcggatcactgaggtcaggggttcaagaccagcctggccaacacggtgaaaccccgtctctactaaaaatacaacaattagcttggtgtggtggcgcaggcctataatcccagctactctggaggctgaggcaggagaatcgcttggacctgggaggtggaggtcgcagtgagccgagattgcaccactgcactctagcctggactacagagactctgtcaaaaaaacaaaaaaacaaaaaaaagagagagagatctgaagtatttgctctcagaacatagggggactttggagagttaaatgggtgaagatctttaggatgttttgctaagccccctccttacgtcctcagtggccagctttagttactttgttaaagttttatggttggcagatttacgtttcttcagagtttgacactaggttgaggttggccatgaactaatacaattatatttcagttacacgattctttgccctccttgagtgtccccaccctcatatatgttaactctgacatctgcccgaaattcattcatctaataaatatttgagtggcctcccctctttccgattgctggacagcccatcattttccaaagtcagcacctaaactcttctatgactttcctgacaactcaacactaaaattcgtccctcccttttttgtgtgcaacccacctccccgcctccgcttttaattgtttggccttcattcctcttctacagtgctccctgcaatcagtactggtgctgtacatatttgctagcttcgtacatacggcacgaagtagatgctcagtaaatgttggttgactgagtatcctctgcatctcggtgacatcacatcctgcgtgccgtggcgtcattctgcattcctctgcgggaggctcagatccggagggtttaagtggttgtttataacatgcaccgaacatatccaacggaggctgtggtttccgaccgcccacaaaaagcgcggttggcgggagtgcgggttcggggtcggctggcagctgggagactccagctctgggcggaaacacactgcctcggaggcgccggcgcctagtgattctgggaatagaaggtgcgagggagggagcgggtggctcacttatcgcggtgttttctctctcttcactcctgggggagctctcgcgagaggagcaagaggaagatggccgtgccctgtttttcggtgtaaggcagcgacggcggctgcgacggcgagactgagatcctggtgtcgtgggcacctgagttctagcttcccccagcgagcgcgcgtcccttcgtgcctaggcgagagccggctcttccccgggagatgcgtttgtcccaggctcgggggc

SEQ ID NO: 1759 - DNA, 2300 bp, Homo sapien
atcacagagtagtatcataaccagttaaccagtcttttaagaatgaataattaagccatttttcactcttttgctattaaaaatagtaacgtaggtttaaaaagcatccttgctcatctctgtacacatattaagaatatatctaaaggataaattcctgcaagtaaaattttctacaaaagaaattgctgagtcatagaaaggggatattttaaatccttgatacatattaagctgcatccaataaagttttctcagtttaagagagtaaaaaaggcctgatttatagcatttgtattgggtgctatcttttttttttttttttttgagatggagtctcactctgtggcccaggctgtagtgcagtgacatgatctcggctcactgcaacctccgcctcctgggttcaagcgattctcctgtctcaggctcccaaggagctgggattacaggtgtgcaccactacgcccagctaagttttgtgttttttgtagagatggggtttcaccctgctggccaggctggtctcgaactcttgacttcaggtgattcgcccacctcggcctcccaaagtgctgggattaataggcgttagccaatgcacccagcctagtgctgtcttctgaatgattctttattacagtacactaaataaaatgtctgtatttatgcaactcagggtttgtcagcaaatattaggaggtaaaactaattggaactgttttagacccttttggcccctaaatgccatatcatattacacaaaaatacccacctatagttatacataaatattgaggtgagttgcagttgatgttatatttttaaaagaaaaatattaattaaatatgtattaatatacattagtgttttgaagtctatccattttttcccccagccatacaaagtttggtaggattctaaaagcttgtaggccctcaagcaccactcctctagtgcttaatgggttaaatgtccctaaagctaatttgaaaagcaaattgcctcattctttctcttcatatctttctttcaaactgtaaattttaagagctgtttattccttattctccttgttcttaatttgtttaataaagttttagatctttagcgaatattttgcaacaacagaaatatccccaaatttcctggtgctagaaaacagccacaatagtaagtaggtcaagtctgtattgcttagggaacagggagatttttgttttaaagcagtgattcttctgagagtagggctctgggcgcaggtgagtggtaaacaatcctttttcctgcagggatgttgctgttgtgtaaaagcaaaagcattttgtgtaaggatgttaggctccagtaagtatttcaaagccacattatctttctcattagggggagtttctctctgtactttaaaagaagataatgatgcttgaaaaagctcaagattgactaacttttaggaagctgccagagttgtgcatagacgtcctcactacagtagcttcgttatgtcttacgaacaatttaaccttcacttctagtcatcgtttcgtcatcgtaagcactgggtcattacagagttcagtgtacctaaaacgcaagctgtgactgatgagaatccaagctgcaaactgggcggcttgggcaactgttttcttaaccaccctccacgttgtggcttacgtcttttagcaccgccctcagggcaaaggatggtggtcagaggtaactaccacagtaaaagaaggctatttatgtggtctgtttacagttacccggtttcaacactaagccagctttccgccacgtctcgggcgaacctccggcctgaggtcacagagacgcccgggtggctctcaggagccagcatggcagcctcctcaggacgggtactcaggaatttcgcccgcagggactaacaccacttggacccagggactccagcttcactccgctttgtgcactgggtggggcggtcgcggtgacgtttcaggcaacgcctctgctgtcagccaataaggagcgggagacgcgtcgggcctgcgctcaatgggccgcgctggtcccgccccactgtgatcgtgagactgcagacccgctaataaaatccaccccaacaatcgctgtgtgccgctttagtgcgctcgccgtcggctctacctgcgtgctttagctccttctcgcctgatccttctgtctctcccaaccccggacacccggcttcgactggttatatcttcggtgttcttttcctctcttcttctttcgcggttcagcatgcaggaaaaagacgcctcctcacaagg

SEQ ID NO: 1760 - DNA, 2300 bp, Homo sapien
atggtgttactgttttgtgtaagcaaagaattttaaaatttactccacataataccttccatagtgttaactgttaacatttattcctcaatattcattaaatatttattgagcacctacatgtcaagcactatcatgaagggtatggtaataaacataattcttgacctcagggagcttacgttctgaaatttttattttatatataatcccagttaggcatacaaaattgtagaagttttcatgattttatataatcatcaccttcagaatagagcccttctcaccactcaatttaaaaatacacccactaccactagtataccctttcaatatttatcccctgcttcattcgtcttcctagaattgcacaaacacatcatgtattatatttattgatcttgtttattgtctctattactagactgcaaacttatgaaagtagagatttttatcccttttcttcactgtgtattcttagtgccagatatttactgaaagcacaaataaatgaagaaatgaatgaatcatcttacttattttttgtcaagcatctaatgagtctcaggcaccatattggctatttttataaagatcattttacttactcttcccaataagtccatgaagcatttgttatgggcgtctctacttcatatattgaaaaactgggcataagagagactaaaatccttgcccaagttcacatagccaatcggtggcaaacgggttcaggtttgtctgactcaagagttcatgttcttcacctctaaactacatactatttgtaaataaaatactagtttacagaagtagtgatgggtctgtaatggtccatactttgctgtaatgttcgtttatttgatgacactgtaggtttgaagcagagttttaattgagaaagcaacctaaatggcttgctgtgctacaatgtttttggcttcatatccctgtcctctccagccatggtttttgggaaagagtcctgatgtacatctaggatgtatttattattaaatatttgtctagagtgtttgtagtaaacaaaagtacttatcttttaaataaaacaagagggcaagtaacaaagtcaccttgtttggataaaatgtgaaggaagcaggtaaatctgtcaagagctatggatattgccaccaagattctgaagagccttgttcctatccagaaagacaggaaacacagttcataataaactgagtccttaatgcttttaaccaagatggttgtgaaacactcagaaaaaagctagaatatagtagtggtttaaatgagctataaagtataaaagagaataaagatagaagaacttggtagtataaataaaacatataaaaatattgaaatggtaattttatacatgaaagcattatgataaaataaccctgtggcaatgattgactacatcaaattattttttgacagaacaaaagaaagcactgtagatcaccaaaatccctaggtcaaggaattgaacattcttgactagtgcatttgcaaagccaaataactatagaaatagtatcttccagtattattgtatttatagttttccctttttctctccttaatttcaaatcctaatactctgccaagaagggatctgtatgtattagctatgtttcttctctggaatttcaacccatcccttatggttgtgtggaaattccatagacattttctagtagatgcagcaaaaatggtagagtttggtggaaataagtttcctttttttttttttaaatgtgcactctgttctatgctcaggttaataagagaagatgagaaggccagtctttcaaagcaaccccaaccctttgcttcctgtttttagtatgagtcaaagaaggcatattctcccaggccttgattgggtagagaaaaagcaatgccaggtagaggtattttgaatgggaagaaaagtgatgtgaaggtgaaatgggagagttctctgatccccttcatagggcgtgcgacaggggtgctcgcctgttctgtccccgttactgctcaaaaccccttacaggatggggagcgcgcaggcaggtgaaggagcccaagtgggcgtgtgttacagtgcgccattttagctttgccatccgcggacggcttgagtgttaaccagctcggtggaccgtttgcctttctgcgagggcagcgggtcagtgtaacaactttctgtatcctgagctcttgtccagcgtcccggaaaaatcgggtcgcacagagggactcaaggatgaatgcgagagttttgttgagtagtgggggtggctctcagc

SEQ ID NO: 1761 - DNA, 2300 bp, Homo sapien
cagcctggagtttttttttttgagacagagtctcaaaaaaaaaaaaaattctcctttttgatatgatcacatgtttaatttattttgtttaatgtttttataattgaattaataaagtacccagtaaaatgctataaatcaataagtattatccaaatgaaaataaattgaaattaagtaagactagtttcaaatgcagtctttcttgaaagagtgagtttggccatcctaaattacagttttcaagattgatctactttctttctgaggccaccatacttttggtactagaattaaagtgtctaaatcaaaaacacactacatggcttcgctttgacttaaaaacaaaatgcacaaacaataaattataagtctgattaactgtatgggtattttgttcaattgatttaactgcattttttttccctaggatataaatcatgtgatacagcaaactcaaagatgtgggactcaaatgacacttgtgaaaaactgataccctgtttgcctttaaagttatattaattaccacactttagtaaagtgtttactatttagaactctttcttccttcctagttggccacctgtacactccattcctcagccataaaagtaaatactgtatatctaaaactggtgctggttttgataagccatagtgatgacatcagcctgagttccaactcctggaataaagaactgtgaccatacagcgacttgtgggcagttaggtctcagcataacactccttgtcccctcatgtcactgatttggagccaaggtttgtgctccaatctaccaaaccaggttaaagaaattacatttctattttcaaatgcaagggatttaaaagtatacatggcgcacaaaaaactcaacgtacttaatgcctaatgccactgaactgtacacataataatggttaaaatactgaattgtatgtaatatattttaccataattaggaaagaaaaaaaactgcgttcacgtgtttcaaaggttttccacaactgtataatacatatagttggttatacctttgtaacagtgaccatatcgctctttctgcaacatctattaacccagacaccccagggcctaagtaagcatccattcttcaggaattagtaaacagcacttacacacggacatttctagctaaaagtaacacagacaaaaaaacctcaaaaatatcacgtaagggcaggtgttaggcaaagagcctctgcaaacatcccttgctcctctgcattgctctggtgtgaggagctaggacatggagaaacctctacctcctatctcaggattagcgaaccctgcttgagtgctacaagggtaagtaaatgctggcctgaagaagctgctgagcttccggatcccactgactgtcgttcgggcacttcctagagggtcaagcaccatggcgaaaggctgaggaggcaactcgtatctttcattctcctgcctcatcaagaatgaaccttgaaggcacccataggtcgcgcagtctttcagaagctgcaggagggctgtgactgtatggggttgcagactgaaaatcttattaacgtgaaagaggaatttgaaattaaaaaaaaaaaacccggccgggcgcggtggctcacgcttgtaatcccagcactttgggaggccgaggcgggtggatcacgaggtcaggagatcgagaccacggtgaaaccccgtctctactaaaaataaaaaaaaaaaattagccgggcgtggtggcgggcgcctgtagtcccagctactcggagaggctgaggcaggagaatggcgtgaacccgggaggcggagcttgcagtgagccgaggctgcgccactgtactccagcctgggtgacagagcgagactccgtctcaaaaaaaaaaaaaaaaaaaaaccccacaatatcaggctacagttatcatagcaattctgcttttaatgcactcaggacaaacttctagctctgcatatatgtcatttcaatgacacatcctgtctcctacccgactagaatgtgagcagccctgtgatctctatgtgctcataaacagtgcctaatgcgaatcctggctcttggaaggcgctcagctagtaagtgaggagctcagctctgaagctgtaaccaagaccgcgcgggcaggaggaaaggacacttcagcgctctgcggttgcaaacacacccctgcgggtgctgccacttagcaaagtcttaggttcccgcttactcgcacacgcatcctgacttcccccaaccctggaactacctaccaggagcggagaccagcagaccgac

SEQ ID NO: 1762 - DNA, 2300 bp, Homo sapien
tgcttatcaagtccaattggctacagcaagcacttcagtgggagaagtaaaagtttcaaagaagtcaaatatttgtgaataaaaatgagaatagtttttgatgtaactggaaaaagataagccttgcttcctttgctgtgtgaatggtgatatggtcttaaattttaaatattgaattacactagaattttactaactatagatggtataaacttgatagccactttcatccaaatgctttggataaagctttgtctaagaataacctcaaatattattttattttcaaatgatattaggctagaaaaatactatcccaaatacaggtttgagattaattcaaaataataagacaaaagtttacggaagattttagaatcaaaccatttcacccttcctagctgttgttcccattgtaaacgtgacattttagtcagtaaaacgcaaaagtgcaaaacatttttaaatgacagcaaaacacaaaatgaaattcatgttgtgattaatgcatcttattaaaatggagtttaagttgcattcttgcttttccttctttaaaaaacatataatgttatagtgatattttttcaaactctcatacagaatcaagacaacagcacataaagtatgcagagggacatatcccattcttacctcttaacagtaatttaaaagttaagaacacccatacagaacatcagctaagctaggaaaggcaaaactgattgggcttgttctgaaagttgatctgtgtcaatcaaaataatggtctttagagtgctatatgattaagtctaatttcttaaatatgaggaaaaatgaactttgcaattatttttaaaaatcttttcatctcttagacagtgtaaaaaggcaaaaagcaaaaaacacaagactttcccaagattaggggaagatgatctcaccgttaatattcatctgctgagagcagttatgggacccatgtcaggaatacatgcttcaaataagatgggacttgagaattgctgagagacttcaggaacattctttaacttcatggggcctcagttaccccacctttaagggaaataataatagcaatagtaccttggaggatttctgtgataaaatgagaaaatgcttgtgagaagtacataaaatattggcttactgaaagatgttacgaggcaagcaagtatgcctattttcattcaatgtttattatttcaaaggcaaagtttccatatagattaaggccttcataacatctgaataccttttctagttcttattgtatgaagataagaaggatggttggaggctttgtaaggaatacctttctcttctgctcccctctcactcccataggctgggagcagttgatttcactacctcagatatgcaaattgatgccaccttcctgtagccacttttgccatagctgacctttttgttgggtggtggggaggggagcgggcaggattaggcgaggggtagtagttgggatttcttggtcttggaattcaaccatccgatgtatttgtttccctgtgtctattcccttaagtctacaggcactgtctagtaattttatagttttcagcggcaccccaggggacaggacaccttggcctttttataatcactctagagtcacaaagcagaaaggaaaaaagttaacgatcagctatgcaaaggcttgtgtggattgcttaaggacaggcgattttcactttaccagagttactaaaggacttcaggagaaggatcccgtccctgtaggagcgtttgtggttgaagaagcaggaggacgagcgctcaggtgcgcctcggcagtttgcctggggtccgcaagtccagtgctacttattagctgcttgccgtccaccgacactttagcggagaactggaggagaccccagtgggctcccggtccggccaggagcagggcgtttcagaggagaccgtctggggcttcccaacccaggcgatcaggataggcaacagccaagagaggcgctcagttgctttgcaccctcctcccacctcggttctgtccacacccacgggcgccccgccccctcggccttataaaggggactcggcacctccgcgcgcctcgccaccagaggtttcccagagaggaaggcgtggctccctcccgggccagtgagccctggcgccgccgcggccgcggtcccagcagcggagtagggcggcggctgcgccccgcaccatggggggcagcccagccccagccgcggtaaacgccgacctccgccgccgcccgcgccgcgtctgccccctcccgctgcggc

SEQ ID NO: 1763 - DNA, 2300 bp, Homo sapien
cctaaaggcatctaaaaaataaataagaaaatgaaattccatatttgtggaaattcatattgaagtctaactgtggctgttttggtaaaagtatttgctgctttgaatcaaatttagcattaaagggctgccacagtataatcatgttaaggagaaaagaatgttgtgcacacttgcattataagccaataagaaatagataacaaggccaggctcagtggctcacgcctgtaatcccaataccttgggaggccaaggtgggcgggctgcttgagcccaggagttcaagaccagcctgggcaatatagtgagacctcgtctactaaaaataaaaattaaaacaaccagccaggcatggtggtgtgttcttataggctgaggtggaaggatcactggagccctggagattaagggtgcagtgagccatgcttatgctactgcaccacagcctggggaacagagcaagatcctgtctcaaaaaaaaaaaaaaaaatagaagtagagagcaaattattttttattgttaccattatttagtaacaatatttaagcgctttataggtaaaaatccttaagttctggtattccctttgggaaccattataattaaggtttacagaacacccatcatattcttcccaaacattttttcattgcttgtaactttccaaagaattctccttttgggctttctggttttattttaagcccaaaggtgaattttttgggaagtttgagctaaattccttcaaccaaaatatacaagtgaagaaaaaaaatttgtatttaaacatttgcacatttacttctacctgaagcatgtgaatgtcaacacttcatatttcataagtagtgggttttcataaaaatagtattgtaaatataaatcatcttaaagttagtttttatttcttcttgaatatttagcagttaagtacagttactagtcttttgttgctgtgccatatacctggtttttccataacagtttaatgagttgaataattccacatggaattatgtttattttcctcaggaagtggtatataagatacatattttaatcctcaaatggaaggatgtagttcctaaacgtaaagtcctgttaatgcagttatctgctgattttataatactataatatttgtgtatactttgaaaagccttaaaaaaagtttaaattctattttgatatagtaagcagggttttaattacacatgatagaattttaaagagacaaaattaaaatgtttaagtagaatgttttcatggttgatccagaagtcttctgttgaataagcagtaagtattcttccttataaaattttcatagttgttataaatcctgtttatttttggagctatctgataactaaataatcttccttatttcttcttttaatgaaatgtttgatttgtttctcaatcaatgaagatccagctccaggtcccacaggggctcttcttccccacgaaaaagatcttattcaagttcatcatcttctcctgagaggaacagaaagagaagtcgttctagatcttcttcatctggtgatcgcaaaaaaagacgaacaagatcacggtcacccgaaaggtttgggtttctgtagaaataagaatgggtgttcttaagtgtgtttaatagataaagtaaactttcctagtcaagggttagatttttattatctcttgtgttccgactttctacttttcaactttgaacttcaaaaaaacattactttgcttatcctttgtactttgatcaggttgtttagaattgtagatcaaaccattctttgatcattttattgtttaaatttttagttccatttataatttttatagccaactctcggttatttctgtcttttgagattgcaattcagaagctgtatgtcgaagtaatttatgagttgacttttatacttaggcttctttaaatactaatagtcaagaattctagagcatctaataaaaaattaactttcagatcattgggaatctgtcctcatttaaatatgtgtaaatgcatttccacagcaaattgcttcatgccctttgtctataaggaaattattccttgtagctaatacatttttcattttgcagtccaaatcttttttgagaaaggcctatattaggttactttatctgtactgacacttttaatattggaagaatgcaactgtcatctgtcagccttttctgcaacaggctaattactcagtttcattaattttctctttgttcccaattatatagtcattttaatggctttatttgtagtctttgcaaattt

SEQ ID NO: 1764 - DNA, 2300 bp, Homo sapien
ttgaggcagagatcctaagtaacttaatcaagatcacatgactggtaaatggaggattgggatatcttattctgaatttgtggctccaatcaagtatttttcccccagtaaattgtgtggagttttttgttggtaacattgacattaacatgactaagatggattagaagttatgaattccagatatgtagtgaggacaagttaaaatgtaaaattttacaaatttaaatttttataaatgctttttaatctgtttttagatgtggaaatgtaaactttgctagaagaaccagctgtaatcgatgtggtcggggtaagtatttaaagaagattctatttatactgtatatgtatcatttatttatttctccaggttcatattgcatgatttttctgttttcagagaaaacaactgaggccaagatgatgaaagctgggggcactgaaataggaaagacacttgcagaaaagagccgaggcctatttagtgctaatgactggcaatgtaaaacgtatgttttttaaattattgtctgctctttcttccaaaataatagatctggccactacttgtttatattacagctcttattagtgacattgacaagccagggtaaccttttaaatccaaggtattgttattcagtctcatctttaagtatagtataaagaagttttaaattattctttgcattttttaatggtaatagttgtcactatgatggattatgtataccagtaaacaaatgcttatggtaagctcaaaaccaatcggggggtggtggtacttaaaagtactaaggcctattacttcctttattgaaaaatcccaatttttagactgtatagttagtgtgaaatacaccacaaaactcattttgcctgtttacaaaataatgttagattcataagttgtgtgccgtaagtaattaagtctaattataggtaggtttcttaatgatttttattttcaggcttagatttaattcttcattgatttttccaacttccatcttttctctatgcagatgaatcctatgtgtatgaaagaggtctaaatcaaaaaagtattaaataaatttctctttttgtttgtttgtattttttgtttttgagatgaggtcccactcagtcacccaggctggagtgcagtggggcgatctcagttcactgtaacctctacctcccaggctcaagcaatcctctcacttcagcctccttagtaactgggaccacaggcccatgccaccatgcctggctcatttttttatatttttggtagagacagggttttaccatgttgcccaggatggcctcgaacacctgagctcaagcattctgcctgccttggcctcccaaagtgctgggattacaggcgaggcatgggccactattcctgaccctagagtcttaaataaatttctgatcctcaggattataaatttgtattggaaaagtttccagctacagatttggtcactggatttggtatgctttggaattcagtgcttgaactgagacctcaaaaaaataaattaatattatttatagggtataaccatactctttaaggtatattcagagactgagaaattagtggagctgttaatttaaagttatattttttcataagacatcagaatttctatacaggttcagtatcacttacctgaaatgtttgtgggttcagcatccctaatctgaaaatctgaaatgctcctgtgagcgtttctgttgagtgtcatgtcctctctcaaaaagttttagattttggaacgtttttggattttggatttgtggattagtgatactcgacctgtggttataatttgtcatttacttctcaaaatgacagaggcacttttcatactatataaattttgcttctctgcttaaatggttcagtccgttgttggaacccacatttactcttcaggccactgtacattttctttgtttacattaccacttaataaacatttctttgacagtggtttcatcctagtttttattttaaaattgtaaaatatctaaaaatttgatattcatctatattatagcctactaatttagtatttttcacttctaaagttgcagcaatgtgaattgggccagaagatcagagtgtaatatgtgtaatactccaaagtatgctaaattagaagaaagaacaggtatgataaaaccacattgtaactaaatgattttttttaaagcactaaatattgaaacgataattgtatcaccttcgagtaagagccacagtaagtgaggattctgtttattctgccctgaatgtt

SEQ ID NO: 1765 - DNA, 2300 bp, Homo sapien
tgagacttcgctgaaaaaaatgacacaaccaccaaaaccaataatctcaacacatgtagtacagtaagactttatgcttatactcaacaaactcaaacctaaagaattactggttcactcacatgaccttagaagtgtacgtgtatattggtaaaagtatgttaaatgctctggataacatggaatgcttaaactttaaaaagctgatttttaaggcattatactagaatacaatacagatgtgaagtatgggatgacactaaagtgaaacactctaaataatatttaggttaagtttttcccctaaaaatattccttttaactccattaagcatggaaaatatactctgaaaatttatcctgcatttaaacatattgtacaaacaacattctattcatatatttgtaaatgagttgaaatgaactctcattgagagtcctacctctgggtgtgctgtcattaaagacactgacaaaagcacattattttacaggtaacaacaaagtcagaagttgttgttctaaatcttttgaacgttttcaataatgtcttaccactcagagcaatactatccataacatataactttggttctattcagtatcatttgttaggcttgaactactccttcaggtcatcttaatatcaaattactatcaatagccaccaattagaatttgctacacgtcactgtttacacaccctatccatgttatttcatgttttcattaaaaaaaaaattctattccttttttagcagttaaataagtaatagaattttaactaaacccaggtttatttcaaagtttttgctttttacaatcaaaacctatttgtggctaacttaggtacaacaaataaaaggcttttatgtgaacatgagttgtacattaaattattttccatgttatttccgaatagatacacctatttgtgcacccttcaaaaaaaatctgattaactatctagtcgagtactggctttggcaacaatgtcaaaaagcagagccactaacacacgtgcttctctgctgcaggcatcttaagggctgagtaggcaaaaacacaggcctcttccctccttttcggctctaaggaggcgaaaagcccaattcttgtggagaaatgatccacaaagaaaatgtcagaatttcccaaaccgaagagggtagagcttccggaaaaggggaaaatagtatggaggaaaagtttgagtaaaaatacaaaacaaggtgaactataagaggcaaaaggacgagtgcgagaaagcaatattttccgtgaacaagagtaaagttctgcagagaaaagtcacgtgggggagatccaacaccaagctggcctgactggagaggtttcctatcgctaaaacctggccggggcgggggaggggggtgggggcaaaaaggtaggccatctcgcactctaaaaagagaggctaccttgcggaggtaatgtcgaggaaacgctgaagacatatctagaacaaaggctcccggaaagacctctctcgtgaggagattgggagccttcttcccgccagggaactggcggttcgccgcctcaacccgtcttaaggcacagaaaatcataaaaaaggaaaatgccggacggacctcggaaagcttccactaacaaactccgtcccaattcaggacccttcttgaactcactttttgtcagggcaaatccagtccccgtcactgactcggaaattcttggtcgacatcttgaacgccaccagcacagccacccgcagctatgtcttcacaggaggaaaacgggccggggactttcggcaactcggggctgtccccacactgcctgactcgcgcctactactgtgtcagggtttgataatgagggaactagccaggaattcagcttgtacgttgttgtccagactaagatgcctgtgctactgtttgttagatggaaaagttaaaatacaaatatcttttctagaactaaactcacaggcgccataaggacaacccaggcaggaggccttcgtggcactagaagcctcggagagccccctacaggtgggaggacccaagagtaaagtacttccgcttccttaggtggagctggaaaggtggaggcggaagtgactgatcaattcaggggcgtggggttcgtttagggtaagaggcggctcgggctcttcaagtgtttagagaaattattttaataaggcataaaaattctgttatttcatacacatgggatgtcgtttggaaacctatttttatatatacataaataggtgtaacagataagtaagcaacttatacatg

SEQ ID NO: 1766 - DNA, 2300 bp, Homo sapien
tgcagaacaaacacaaaatagcatagcaaaactgaatttcaatttaaactactgctaacatccccaaataatccctgagtattgtaggtataggacacagcaaagcctttgaaaacccagctgacatggaaccagtactcatagaagatgagaccgaacttttgacctgaaccaaattggatcgattgccttctaaaacaaaaaaaaatcaacattccctaaaggcttttaacaggactcagtctatgcaacataatgttcaaaatgtcctagataaaatccacaattacacagtataaaagaactggaaaaatgtgaccaacttgcaagggaaaatataatcaacacctgctaactcctagatgaccaaaatgttataatacagattttaaagcaacaatcataactagagagtagttgaacaatttctctcctaaacataatcatacttgcataaagacatttcagtcaatgatgaaccacatatacaaaggtggtcccataagattacaataccatatttttactgtacctttatatttagatacacaaataccactgcgttacaactgcctacagtatttagtacaataagatgtactaaatgcaggtttgtagtctaggagcaataggctataccatatagcctaggtgtgtagtaggctatacctgctaggcctgtgtaagcacattctatgatgttcacacaacagcacaattgccgaaagtggcatttctcagaacatatccctatcattaagtgaggcatgactgtatatgctgtattctaaaaaaaattaatgcatttatataccagaatctatgcataagaatgctcatactggtgttgtttgtaataccaagcctgagaaacagaaggaataaactgtcacaaaaccacaaaacggaatagtatcagtatacatcagtgcaaataaaagaattacacctatacacttctacatgcaactacctaggattaatttagaagcataatgaacaaaaaaagagtacagaatcaactatgcttacacagctcataaaattaaacatacatgtatgttaggttttgaagggaaggcaaggattaaagaaagagagggtggcttaacaacaaatacaggatttatgtccagcataagacctacagaggtgggagaccagcttaatgccagtgcccgttgcttcttacaggctggggtgatttataggcctgggtgggagtggtctggggggccatggcctgcttcctgggaacatgttgataaggtgttcccaggacgaggcggctctggcccttgttccagtggaatgtggtactttctcccagcagagtataagaggcagcctgtttctcacgcccgaaccccgtggaatgtttcactttgactaaggtctgcaaaatggcaggggggcttacaaaaatggtgcagtttggactaacaacgtacataaatttttaaaaagcaaaagaataaatcccaaatatgggaaagtgttatctgtggaagaaagtaatgggatggtatcagaaaagacactggtaatttaaacagtgttgacaatgtctcagttttaaaattaccagctggttcccatgtataagttgcttacttatctgttacacctatttatgtatatataaaaataggtttccaaacgacatcccatgtgtatgaaataacagaatttttatgccttattaaaataatttctctaaacacttgaagagcccgagccgcctcttaccctaaacgaaccccacgcccctgaattgatcagtcacttccgcctccacctttccagctccacctaaggaagcggaagtactttactcttgggtcctcccacctgtagggggctctccgaggcttctagtgccacgaaggcctcctgcctgggttgtccttatggcgcctgtgagtttagttctagaaaagatatttgtattttaacttttccatctaacaaacagtagcacaggcatcttagtctggacaacaacgtacaagctgaattcctggctagttccctcattatcaaaccctgacacagtagtaggcgcgagtcaggcagtgtggggacagccccgagttgccgaaagtccccggcccgttttcctcctgtgaagacatagctgcgggtggctgtgctggtggcgttcaagatgtcgaccaagaatttccgagtcagtgacggggactggatttgccctgacaaaaagtgagttcaagaagggtcctgaattgggacggagtttgttagtggaagctttccgaggtccgtccggcattttcctt

SEQ ID NO: 1767 - DNA, 2300 bp, Homo sapien
atgtagatcaatgtcaggatgttgtgaaatgaatcatctgataggaactgcttttatggttgtgttgagataagctgaatcaaagagcaatatgttcttttgttaatgttcttagtgtcacaaagtatcagcagctgtatttgcactgaaaagattagttaaagacacacaaagtcaatattaaatataactgatctgaataactatgtattgagaaaacataatgaggcccatctttctttatgttcaaacttaaattggccaaattctacatcagaattttagaattaaagtcaaagaatatgtccaatttaggttcatattatagagcctatagtagaattatattctgaaaacttaggcagatttgttagaaacgtgtaaacagttagatatactgaaattttagatgcaagtaaatgatacgatgcatgagaaactccagaatatcttgtttaattaaagtactatgaatagtctttattctcaaataaaaccaatattatcctctcaacatacacaactttctttctttctgtagaatcaagtgttatgtttttaaaataactatcaattacattcaaatggatcttttctgatatgaaatgttctctattgggaatatcaaatgtaaaaacagttcacccctacagtttacttaaaagtatataaattaaaaaaaaaataacataatgctttactaaacaaaagtgaaaatggaagcagattatcttgtgataacaggactgtactcaaggaaaaagaatctgtactctttcttgttctgtatttccaactttttaaatgttatgatatctagtttgagtacagtgtatgtattacattcaattgtgcaccacaggctcaactaaaggcaaaatttgcacagcatctgttgacaggaaaactatgtataacattcctaacttaagtagcacttagaaaaaaaagcataaatactaatcgattttttttttttttttgagagtgagtcttgctctgttgcccaggctggagtggagcactgagatctcggctcactacaacctgtgcctcccaggttcaagcagttctctgcctcaacctcccgagtagctgggattgcaggtgcccaccaccacgcctggctacgttttgcatttttagtagagacagggttccactctcttggtcaggttgatcttgaactcctgaccttgtgatccacccgccttggcctcccaaagtgctgggattacaggcgtgagccaccacgcctggccatactatccgaatttttaaaatgtgtaaataaaataagctataggaataagatacagtggaaagtaatatatttacattaattatcaagaaactaacagttttactatacatataacatcgacaaaaaatacctcataattatagtacactagtcaatagggcagattaaagaatttctcctgatggaatagtttatggatacaattatagatacaattcagagagggtggatttagatgaatcttacagaaatcaattttattaccttataattatactacatataattcaaaaacttaaaatgtgaggttttttgttgttaactaagcatatttagttcactagtttgctgaatatatttttctacctgttttctgtttgaggaatacagaaatctacccctacctccacctctcaaaaaagtgagttatgaggaaaagcacacagggtggttttcatcttggagaatctgccattatttagggtctgggtctcagttttgtgggaccagaaacctattttttctatgtttttgagttgataaaattggataagggactcttgctgcataaattctgaacaggctaaggaatacatgccatttcctaaacgtataacaaaaactctggtggatcaacatctttctcctgaaggcaagccaatattaaatctgatgtctatgtttatgaagtacatagaatttgtagacattttcttaaaatatctcaaagtcctattaggtatatgttttcatcctgattttataggagaaactgagattcacggaagttaggtagcctccttaagatcacacagcagaggaggagccaagatggccgaataggaacagctccggtgaacagctccggtctacagctcccagcgtgagcgacgcagaagacgggtgatttctgcatttccatctgaggtaccgggttcatctcactagggagtgccagacagtgtgcgcaggccagtgtgtgtgcgcaccgtgcgcgagccgaagcagggcgaggcattgcctcacctgggaagcg

SEQ ID NO: 1768 - DNA, 2300 bp, Homo sapien
ttggatgagtgtctgatgatcatagaagttttgctgaggcacagatatgcacacagcatttcaactttcccaatgtggtcagctggcactcaaattttctaggtgatgattactataagaacttcaagttcattcctgttttaaaaacagcttacattttctcaaactccattacagaatatcaaatcaactttatattaactattcaaaatatctctttattgaaactgatttttaattttacttcaacttttattggatctgttttttaatcaaatactggcctttgcagttccagattaaatctcatttgattaatttcaggccatttattctaggctttttgtactattatgtgatgtcttattgcttgatatactctctcatctgagaatttaaataatgttattaacaaccaactgcatatcatttatgaagatgtttaacagagtagagttcaagactactctgaatgaaacaaagcacttcacactcactgccaaagacttgcaatatgcctttatatttcctacttagctgatcagtaaactaaatgcaacctattaaaacctaagaactttctaatggcattatcaacaccttaatgtatcaatgacttttaccttagtcaaagctaggagttctttgcttggcacgagtagtgattttccctaatcatttttaaaatagatgtttaaatgcatctttctgtagaaagagatcatttataatttgataattaattcccaaaagagtatatatagctcccaaattatataaggatgtgctttcttacatggttatatttaaaacatattttatgctgcatttgagccatgtggcagagcagtgccagtttgcctttggcgtctaacctctgggttatttgtattatccaattttattttcttgaaaagtgaaatttttctcaaaagcgtatactaacgattttctaaataacttttaggcaaaatacattatttaattatgtactatgtttgcatgaaaataaaacaatagaccctagaaactgggataataagatcttatttttttcaatgtacctcaaacaatgtgaacaaatgggatgttatcagggattataaaacttttagaaaaatacattttgtcagtcttaattaatagtcttagatctggcattaatatagttagaacatcaggaagaatacaaatttatcttacttttaaaatgtacttttcattgatttttccaggaaagaaataagggaactagattatatattttagtatttgttctaattaggtgagtacccaattgtgagtgattaacaatagctcaatatctatttcatggaccttgctttactgctttaaatagatgttaattaaggttgtgctaatggcggtttgggaggtgggattgctattgtaaatggaggaatattaaaagaacatttcatgttgaaaacataagattatctactctttacttattatagggtagatagagtgctatgttcaatcagggtccagttattaaaagagtgatgcagagaatgtggagagagttaacaagagggcaacaaacgtgactgaatgctctggataagacaaaaaatgaatgtatttaacatcaacaaaatgtattttaacggcaacaaaaaaagtctaaagagaaataccatgtcagtgttcaagttattttcacactaaaagcacaaggtctggaatgagagggatctatatttgaatcctagatcctcctcttaacagctgccaacttgaacctctcctatatgcaaagtaggaataatatctactttgtcagagagttgttaggaacgaggatgatataagtaacatgcctagaatagtgtcaggcatatagagaagtccttttggaaatgatagtcataatttctactatttttatcagctactcttcaaaagcaatctgaaaacagggtcacagggctgtcttggaattgctaatcatggagttacttgtgaataggctagtatttgtcagagatgcaaagtgagaggaagaggtgacttgacggtaaacagcattagatcagttagttgtttcacatactaataatacaaggaagagtctggcagaattcaaattttgctgaatacattgaggtacaacttctgttcctgattttttgttttcttcctccctccctcctgtccttcctctcttgcttcctccttctcttccttccttcctttcttagaaatgtctttaaatgtagttatgtgcctctgaagggtatttagtcatgaggtctgacttcgccatatgcttt

SEQ ID NO: 1769 - DNA, 2300 bp, Homo sapien
aatagaacaaaaacatggtaattcgcataagggtggttgcttatgatatgtatctttattccccttatctattgactttgttttgatcaaaagcaattgccattccgctaacctagcaaaacttttaaaaatcgtttcatgtgctactttactgctgaagttgcttgcctcttaaatatttctagcatttattgagagatacttggattcatttgaatttctgtattattccttcagcaataaaatgagcaataattaagtaaaaataactttataagtgaatataaatgtatcatgatactaaatatgaatgtaaaaatgtgtatgtgtacatgcacataatattttatttgtttgttaccttaataagatgtgacactttagtttgctttcgtaagtatgcagatagcaaaaaccttactttaaaagcttttcagttacaccatcattagcaaaaagttacaaagccagcatgattaccgacctaggctgtttttagtatcttcccagtatgagtagttcattgaatttaaatgctattttctcccattttataggcacatggtcagagttatagcatatgttatttcctgttgctaaatttcttgtaaaatagcaaaactacagtatttatgctaaattggcactttttttaatgtagcattttaatgttgaaggtcacacttataaagaccatggagctttcttattattggacttctgaaatttttaaagtataattgaattatgggggggttggataaaataccagctatatcatttaatttatcatgcaacatatactaaattttttcatcatacaaataaaacattttataagtatacttctttcctaaatctactatagcgttctttgtaaggcaggcttgattgagagttgttgagaaacttaaatgtgtctttagttttctttagagtaagacatctcttctagcgatcaaatactgcttattagagttgcagagtcagcataacaattcaggtgggagccttaggattagataagagatcatgagaaaatagatgggcagatggatagacagatattaaaacatatgtaaagaactaacatgtatttaaagcagcaatataatgttgttatacctcattaaaccaagtagtataaaaacagaatgaaaacctgctataaaactggtagcaatttctaatttgacttctagcattcattttaatggatctctgtattaggaggtccttgaacctggttgtttacaaatggccctagagtaagcagtgccagttctttgctgtgtttgaagccagcatttgctgtttctgaaacaatctgagacaaaggtctcagttatgtgattcttcattctgaattaaccctatctcttactcttttggccatttaaaaaaaaaagtctacagtcttctgagtttctgaaaataaatttaaaaaaagaagtctcctaaaaactttcctgaaatcttggtgaattcaaactgtatgagattattttatttggtgcaaaattgcaccctgaaataggaatacatacctagtaatttggttttattttaatttgccaaacttcatttggcacagtttttacattccacatttaccattgaacaatattttaaaagcattcctttgcattcttcatgttaagtatattatggtctctgttgagcgaatttttgcagctcaatagttcttttcctactgggtaattattcagtatatttgtttattacttaactagttttcactgtgatgaatcttaggtttttattttgttactgattttgttagaaaactacacagatgacttctactgaattcttgctcataaagatgttttataagagacaaagaaaaagacacagtcaaacttatatgctgtgcttcaaatggttgtggactgcaatacgtcccctgtgaaaattcctgtgtccaagccctaactcccagtgtaatggtaaatggagatggggcttttgacagataagtagggttagatgaggtcatgtgcgaggctctggtctgatgggattattgtccttacaaaagaggaagagacactggagctcacttgcacatgaagaaaaggccatgtgaggacacagagagaaggcagccatctgcaagccaggaatagagccctcaccagagacctaatttgccagcatcttgatcatgtacttccagcctccagaactgtgagaaaatgcatttctgttgttaagccacccaatctgtggattttgttatggaagcccgagcaaactaatacaggtatacagtaggc

SEQ ID NO: 1770 - DNA, 2300 bp, Homo sapien
gcatcgatattagtgagagtctgtcatttcacaattatttccctagcataccagacggtaaagaaaatgttttcattcatccgcaaatgactaacattttattgatgtttcaaaatgcggttgaaactattgcactctcagtttccgagtcggttttgagagttaaggcagaatactaacatcagtgactcctgacgcaaatgtctccgttagctgcccagccttggagtgccagttcagcagggaggtgttgctagttaaggattcgtctgtaagccagtctgggtggtcacaggtgatgggaacccttccctttccccatatatccccgtgcatggcgataaaaatcactctgaacactgctaccaccaagcaaaacgactccctgcctgcctcgtaaagagctcagtctgcggaggcagccggatgctgacccctgcagagagtcttgcttcggtgcgctttgccaaatgaccctgctagcattatggaaaacgagttacggacgtgtgaggttttgcttcatttcctccaaaagaagaactgggatctggcaaagaatatcttcttcaaacactgctaaagggggatggggtggaggaagggaaaaagtgtgtgagggggagggagcttattttttaattacttattttccattttcacttccccgctctgcttcccaaactcctcgctgaacaagattgattggtgtaactgctaacgactcagcctcggttctcgcattgatttgcaaatggcccggaaaagcttaaggatcttgaatctggaaatgagttcaagaaggaaagaagaaaaaagagtaggggtggccccacgcctagtatctccttctgccttgggccagggcagggctgaaaacagcccggcgagctgcggaggggctgctgcgtggggaagcggaggttaccgctctgcaccgcggaggagcaagcctgttaacgcggtgtggaggctgttaagaaatacaaccctgcgactcgttaaaccccttaactctgccctgccttgactcggatgcgccgattattcggcctgataggctcaaatgggttaaactgcctcttacataactggaccgcctgggctctacacaattaaaacacttgattgcagtcttttcccgactctacatcccagcatgacccgccccgtccctcccagcgcgcctgcgtgccgcgcgtgcacaggcccccgcgcgcacgacacgctctctatcacacacacactccatgttgaccataaacaatcccctactcacacacacaacttagtgtcaacacccacagataaaagaggggcgtcctgcaatccatacgggccgaccgccacaaacacgcaagctgctctgccgcaaggccttgcacctcctcgtgtccccgcaaaaaagcagcgccccgccaccgtccctacctattcccgagaaaacgcagagagaactagttggctgctcgctaactgcagcgtagccacccaggcaagattagaagaaaataaacaaaaaaacaactcacagtcgccggcgtcatgatggcgccgaccacaacttggaggacttcaaacttacggtgcctcgagaggtaaaacgcaccggtgagggaaggcaaagcgcccctcagctctcttcaccccagccctgacacggagacttttctagcaaagaatccctctagcgcttacgacagtaaggagagccttcattctaaggtgcctctctttcccccttagtttgcataattgtgatacagttcctcctattttttttttcgttgtcttgcttttcttttttttttcttgctatcttttttctttctttttttattatttttttaatccccctcccttctccatccccagtcccctggcggggttgctaaggaaacggccgcttggcaacgcgcgcgagcccgggagccggcggccggcgcagcgctccgcgctgcttctgctgctgctgttgctgttgctgctgctgctgctgggattgcagccgccgccgccgccgctcgccctgcctcctcccccgccgccgcgcctcctccctcactcgccggcgcgctcgcctcctcgctagatggtgtgcgagccgcccgagaattagacacactccggacgcggccaaaagcaaccgagaggaggtgtagtgtggtgccagggggagggaggggagggagggagggaaagcgaagaggaggaggggaggcaaaaacaccgaaaaacaaaaagagagaaacaacacccaacaactggggtggggggaagaaagaaagaaaagaaaccca

SEQ ID NO: 1771 - DNA, 2300 bp, Homo sapien
atatgtctagcagtgaggttgtcatcataggtatggaggaaatgtggtaatacttccaattctaatgatttatttgaatcactgtaagtttgaaattggaaataccttcaaaactgaggatacatattgaaaatatcaaaggtatatcacatgatttttttctgtgtgatactataaaattataataaaaaacaacttacaatatgcaatttaaaatatattattaaattgaaaggatgaacaaataatatgtgcatcatctcaatggataaaataaagaatgttaaatatattaaatgagaagagcattacacatgggttgtggggctgtaggtaaatctattatttgtgcatttccaatttctaaaattgtagcaatgtacaactatttattttgtaatctaaggtactttttttttaaatttatgtttgtttttttgaaacgggatctagctctgtcaccagcctggagtgcagtggtgcgatctcagctcactgcaacctctgcctccctggttcaagcaattctcctgtctcagcctcctgagtagctgggactataggtgcacaccaccacacctggctaatttttgtatttttagtagagaaggggtttaactatggtggccggtggccaggattgtctcgatctcttgacattgtgatccgtctgcctcagcctcccaaagtgctgggattacaggctgaggtacttattcttaaaagaacaaaaagtcttgtatcccattttctcatgtttgtattatattgaataaagtaatataattaatgctaatatacaagtataatcaaagcaaagactcaaatcagatgacatggcttttggtctgggtcatccattaatgatctgtttgatcctgagcataaggttttgggcctgttttcctccagttgtattttgattgattttgactctaccagctctataatctttttcatctctaagaaaataattattattgttaaattatctaggagtcataatgccaggctactcctaaagcatatctttggggaagaatgaagcaatctaaattggggaggtgccatcttctataaatgaggcaaatgggttaagaccagggatacttcaacttactgatagacttgcttctagagatctgtgtatacattgaattgttccaaatgtttacccatgtaatgttaaaaatgttttctccgtatttcacattgattttcaattggatatggctctcagacttttagcagtaagttttagacactttatatttccattcagttatattaaatggtgactaaatctgtgaataaacaattcagaataatgacacccttcaccatttcagtgaggtctattaacagtgatttgctttggtaaatagaaaaatattagtaaaatattcgtcgcagtagttatttgtttaatggctaatataaaatggagtttactgctttgataagataaaaattagaatttttgtctataaacacctacttttggaagatatttagtattttaaattattaggactctgaagtatgtttttcttgattgaataattcatttattcattgaggaaatattttattgaaaagctaccatgtgccaagaactattccagatgccaaagacactaatagtgaaaaaaaaaatgctatcaacactacacgcacagaaaatcagtgccttgataaagcttatatttaaatgattcatgaagaagaaaatatatgtaaaatgtgcagcatatttttaattataatttcaaaggaaatacatagcagaaaagagaaaaaaggaattaaggtacagttatgaatagagtggtatcaaagaaagactcactgagaaagtgacctatctaggtggtggaaggtacaaataaaaaggctgaaagtcagatgcgtctccaaaaggttctgacaataacaaattggactctatggctgttgagcagtgcaagggataagggagagtagcaggagatggggtcagaaagggaacagggcagattgggtgatgagagatccgaggggtaaggaagcattgagctttaggagcaactgcgagtcttaaggagaccttgatttcattcagtgatatgggaaaccacagcaaattttgatcagaagagtaatatcaactaactccacttggaccgcatggaaacgaggaaggagaatactacagcaacctggaagccagtgaaaaatgatggcaacactatctaagatggtaaaaaattgacgaagaaaagctcatttcgaactgttgaggagagaaatgtatttgcaga

SEQ ID NO: 1772 - DNA, 2300 bp, Homo sapien
tattcttattcttaacatataatgagaataaagatatgaaatgatcaatattttaaattcagtgaaagtgaacatttttatctcactgaagtgactatttttcatcaattataatttctatgataactttagggatgtcttgcatttattttatcacaatgttattttaaacacaaactgatgtaactaaaacttataaacatttaatttgcacgctaaacaccagctccacatttgtaaagaaaaaaaaaacttagtattacctagtgcagaacttcatccagtattctgtgattttcgagatatctgagacaatcattaagcaaaatttgactaagcaaagatatattaatattacacctgctgggacacaataaagttgactgaatcttacaatactcccttgctgtatcttattaggggtattatcaaccctcattggcttaggtaagttaaagaaatttgggaagttattagaaatttttaaacaagtcaattatcaggtcaaatatacatatttttttataccactaacacttggtgtagtatgtggaagacattagagcatgggcaattaatcataaaataaaagtgttgtaaggtccctatttggaaacaggagtggcaggattaaagcatagattaaccttgatctacactatttaagccacgtaaaatttccgaataaatatttaaattaaatataaattgttgcacttttcaacaatgatagaggttgaatgtaagaaaaaaatcaataaacagaataagactcaatcaataaatttttttaaaaggaagaaaaaagcttacgataatcattacaggaaaagacatgaagtaagatgattctcaaaaatgccatatatttcaatcatgataataaatattaaagtacaacatttatcagctgaaaggaagagatcagtttgaaatgaaacaaattaccataagaattatgtaatttacaggagaaatatctataatgtaagagcttggaaagcttatataaaactatttggaaaaaaaatgcatctggtgtagattcaccaaaataaagctagaataactatatgaatattacaaaatagacattaaactcaatagtgtctttagaagtagatatggttatagtagtttgaaagcttcaattattcagatagatttaataattgtacacttaatttcagttaattctatggtctcaatatataaagacaaatgattagaattataagaagaaactatatatcatagaacaattcaatatatctctgtaaaatattgaccaataaagtagaaataattaggaaatgtataagacatttgagaaacataattaatatgttatttaagaagcaggtatagaatcatagaattaatatgttatttaagaagcaggtgtacaataacttgaagaaacgtaagttcaaagcttacatgaaataattacaaaatgtaaataatcacaaagccttaaagcaagcctcaaaaaatttcaaagattcagtattataaatacaatgttttctgttcatagtagaattttgattggatttaaatataaaagaaggtataaaaaagcagaaaatatatttccatataactcatgagtcaagttatcaaaatggacatttgaacatacttagaattgaatgataataaaactatcaaataacaacttcatgggatataataaaatttataatgtcaactattataaaaatttttgaaaattcaagatagacatccaatttaagaaataaaggaagcatacagtcaagtaaattatgaataataaaacaaattattaagattaaaaggagattctcaaaatgaaatttgattcagtaaaaagaccattgtcttcagtaaaaagacctatgttttcaagttgaattgaaagccaaaacatattttaactatattttaaacaagttgaattgaaagccaaaacatattttaacatattttaaccataaccaaaacatattttgaccatatcccttattattgagggaggtatttcttccctagtgctgtggggatgacttggacagaaaccactggacactatacagatgtagactgacagtttactggtcacctgcactaacagcctgagagaaaaggacactgcatatcacagagagatgcatagatgttacactcagaaagagagtgaacaactagaagatgtggaaggcaagctttttagtattaagagggtaggttgggatgttttctggttcctggtaaaggatgagattgtcttgttttaataattcttcaggcttgct

SEQ ID NO: 1773 - DNA, 2300 bp, Homo sapien
agaaaaacagcatactgagcaaaacttaaaataatagaagcaaaggcccaatgatgataagatatgatgcatatgttggggaaaaatatgtcgctcttttctggtattatataatcctaggccaaaaatggaaactattcttcagactatgggtggaaagccataaagattttgtcttcctttgtttgtgtataaggtacaatgttgttagaaccctacttaagaaagataaatatagcagtgagtgatttcttgaaacagagattctgaaaacagagaaagaaattaggagacttttaaaagtgttaatgggactatgttcaaccaactaatgagagactctgacttttgacactttggctcctcagtctcttgctttggacacacatatttagtgtttatttctggacactttggctttctatcctgatggactgccttttctatttgctagacttgatttcctactttgctgtagaatttacttacttttccaacgttgatactcctgtagcctttcgtgaaaatcttgcctattcaattattttctactgtccgtctagactacaagccctgcccttcttcatagttcacttaacttccataaaaccaccagcatcatatttgacatttttacacataaagacaaggtaattttctaaggaagatcaaacccttgtagactagagttagcaggaatgtaattttaataagtggaagaaatcaagaaacacctttttctcctaaattaacaagcataacttttatacttgtatttgtcacctgattctgaattcattagtaggtttgtcaaaaagtaaatatgcaaacaacaatgtgattcaatttattgtattaattaggttgggtatagtaacaaatagacccagaaatgcatattgactgaaacataattacttttgatttctggcttcataaatgacccaacttggatgattctggtccatgagaagttttttcaacaagtgattcaggcaggcaggcagcttctatcttatggttccaccatcttttggggtttcattctcatctctacgtagtggaaagaaggtgcacattgtttcttaaaacaatctcttggacaaggaataacacataacaattgtgttcacactctattaaaaaggacttagcccatggtcacacaaaggaaagcaaaggaagctaagagttttagtaattttgtctgtccaaaaaagggaaaaacgattgatggctgctactattttccaccagagttaagaaaaataaggtaaaatggattacaatgccctttgcaaatatgacatactaataacttgttaaatgtggcctaaggctgcctctgttccttgagtccttacataatgaattgcaacctaacttagtatgtaaacaaactgaaagcctaacttacaggtatatttttgtaaaagataactaagtcatagccaatcacagcagtcaagcttcagccaatcacaggccaccaactgatatgattatgtccaaataaggcaaaattgaaccataaccaatcaagctgtttctatatttcttccattttctatctataaatactccctgctcatttattacgcagagttttctaaattttcactggttctcagtgctacccagttcatgaattattctttgcttaattaaactttgtttcttttagcaaactatatgaaaaaataatatgtgtggttaagtagtactaagtatgtgataagttgctgctattgagtcactgcaagttaagtaattgtggaagataatacagaaaatataagaattagattcagtgcatttctatgtgaaaatgttttaatagtgattttcttctccaaagttactattaaatcacaagttgaaaaggtacttgggaaaaattcttcttagtaaagtaaataaaaggttcttatcaagtttattgatatatttggagagaaaataaaatgtacttagctcttgtataatgtataatatttgcttctgtttgatgtaggtcaggagtctgaagatgaaattgtggatgaaaaattggataccagttttaggatatcagttttcaaactacccatatacacttcaggttcattgaagaataatgcagtattgagagagaaaaaacaacatttttttcctgcatatcctcagccaatctatactactcatccaaagccaatcattaaaaaagacatacgattggagcggagtatgaaagagttttttgcaccacaaagagctggtatgaaactccgaacatttagtgatattgacaaatattacac

SEQ ID NO: 1774 - DNA, 2300 bp, Homo sapien
atccaatttctatggccatccttcccagatccaagaaatactctaatattctgtatgataccgtcctagatccaataaatactctatttaatattctgtatgatagaatctaacacatcactctgtttgtctcctcacaattgttaccactggattttttatttggttacttcttccttctttatttcaccttattagaatatacagaccccaaacatataggctctgctgaccttcactcccttgggacctcacttagttccacagttaaaattaattctatcttcttgctgacaattcccaaaattgtatctctagcccagacctctctcctgaattctagactcgtatgtataatgcatacagacacatacacacacaaacttccattacatattcactgcatacacatgtctctttattccacatgtccaaaatcaaattctggaccctattaccccaaaaaccttcctcagtcggaaacttacccatcttaattgatggccaatccatcccaaggcagtcattttgactcctctttttctcttacagtccacacccattaattccatcagcacattttattgtttttgtcttaaaaatatatccagaatctgaccaacttctcaccattcccactgctaccatcctggtcaagccttcaccagctctcacctgcaatattgcagtaacctccaaagaagtctccctgcttctatcattgcctcatcccccattataatctattctcctatctccgagtgatctctttaaacataagccaagtcacttcaaaaccctgcaatggctttgtttccctcaagagtaaaaaccaaaattcttcctatggccctttgttctctctctgaccttctctcgctactttctcctttggttactttcactcaagtctctgtattttctaaatgttcttcaataagatactgtttttttaattaatgaagttttaaatgtaaaactatgaaagagtaatctaatctgccattttatccaaatgtttccactattagaacacgattgtataacaagtctgagaagaaaaactaagtaaatttatgacaagagtttatggtgccctgaatgtctacgtacctaatgaagacgttgatacagagaaatcgtctcaaaaaatcaaacggtatggtgaaataccacaagttctgggtttgggattgaaatatatttcttaaatcttttattacttactaattgtgataccttgactaactcactattctctgattcagttttcttctgtgtaaagatgaagtggtctgtaaaaccaagaaacctcgtgttctataacaggaacacctttatatagctacccaaaaaaacacctaaaaaggctgacttattcctaagagtgttattgaacattctagattaatctgcatatacaaaagaatgccagagaagaaaccaaaataccaaaaatatttggagcctggttgcggactgaattttatacaactttcaaagacactatttgagaggctgtcgtgtgtagcctactaagaaaaaacagaggggtggggtggctcactctctaggaaccacaaacttaaggttcctagaaagagcagagattttaaatattcagactgtgtatgtatcatgacccagggttgggggcagatggcccggggtggcgggggaaaggagagatggcggagatcttctatcaggctatcctggggaactgctccaggctgaaacaaaccaccagttaggacgaaccgcctttgatgtgaaagctgggaagctagaatgtagtttcgccttatccttagcgggtcggttctaacaattttgtcacccaaactgaaccactcaccgggtcaactgggctgcaagcccttatgagttggagacaagtggcccagccccaacacagtcagacaaatcgctgggcggccatctgctcctgagaccgttgctagagaaacaagacaacatccaagttctccacatcatggttttccgggcgccagccaaggcgctccgggggcgtggttacgtgggcgacgcacggagggggcgggtcagaaacaaccgggcggaggcgcaccccagggcgcatgcgtgctgtgcggcgcggtctcagggaaggtggggctatggcagctgctagggaccctccggaagtatcgctgcgagaagccacccagcgaaaattgcggaggttttccgagctaagaggtaccagagaaggcaccggagttctcctgggcaatgcagagggagggtgcttttacgtgccaggaggtttgctggac

SEQ ID NO: 1775 - DNA, 2300 bp, Homo sapien
tgacagtgttcttttgcattctgcattatgtccctaagaggtcaagagtattttttcccactaattgctttcttcatgtaaattgctggaggaactctggagtggagaggacctcaagggttctactgataaggtccaaaggagtattcctatctgaatagtgtgaatttcattaaaactaataaaattttcttttaagtaacattctggaagtttttcaaggtaagtcataatgggtaagaacagttgctattccttttatctttctaaaaaaagtcaatttatgttcaaattttaaagtttgtaaagctgtgggtagagatatgcagcttatacactgtaagtcacagaaaccttttcttcaatgattattctgcttaggacctatattataaaactgaccataaagcgcgtaccaattttggctccagcaggatccacaaaaacgtgatattgaactccaaggggtaactcctttcttttcagcttttctgacagctgttggttgtaagcaagttcctgtttttcatcagccgctgttattgcaactatgtcccagaattctccacgtgctacaagtttgcctatttggaaaaagcaaggaaatgaaaacaaaaattatcagaattttctagttgccacaggtttgcctattgagaaagatgataaagaaggtaatatccattatcatcttccaaaatgtatctttggcttttgaaagttagggaataattagtggtgcattaatacgattcaaaatagttataatgaagactgttcacaagttccttttttttcttttagatcactccctccttttatggtttgcaatccaatttaattataaattctgaatgacataatgtttcttgattaagagagcgacttttaacttgccaaagactattgcctcaattcttcaataagaagaggagataaacataaacaaatctccagctttgcaaatcaattcttatgtatcacggacacttggtgttaggtgactaagaaagacacaacccaaagatcccttccctcaatgttgctgtttataaatgtgggtactttattttctattactttaagatgaaccatgcaaacttacataggctgttagaatataacataaaattctggataacagaaggtcccaactctctgatgacatctttaaaagacagtgtgcacttttagtagacagttggaatctctttattgataaacaaaatgatttagcattttaattagttaacaaacagaacttgtcagctagaatctaatagtcctgaaagttttactgttatccaagaattagtcccagtattttttaagcagtcactgcaacacaaatataatcacttttattagacaggtgtacagggattaagtgtcatagccaattttttgataacaaatttcttccttttaatttttaatccataattcctccatgttctgttactccctcaacaaacggttacattacagaagtagatgaacgtaatgtaaagcgtgaagtagatagggggctggcatctactcataaagttcaaaatactgtgcttcgtatcttttagatttatttaaagcaacttttattaatgagctaatcaatgcataacttcactagtaagattttcttcttcttcctccgccctcatttttaatatctatactactaagaataaagtaagcaacaagcatgtcaagcagggacagtgaaaagaataaaaaactcaaaaggattattagctagctactcctggggagcgtcataggcctacagatgagaagtaaacgggaagtgacagtccagcaaacctcctggcacgtaaaagcaccctccctctgcattgcccaggagaactccggtgccttctctggtacctcttagctcggaaaacctccgcaattttcgctgggtggcttctcgcagcgatacttccggagggtccctagcagctgccatagccccaccttccctgagaccgcgccgcacagcacgcatgcgccctggggtgcgcctccgcccggttgtttctgacccgccccctccgtgcgtcgcccacgtaaccacgcccccggagcgccttggctggcgcccggaaaaccatgatgtggagaacttggatgttgtcttgtttctctagcaacggtctcaggagcagatggccgcccagcgatttgtctgactgtgttggggctgggccacttgtctccaactcataagggcttgcagcccagttgacccggtgagtggttcagtttgggtgacaaaattgttagaaccgacccgctaa

SEQ ID NO: 1776 - DNA, 2300 bp, Homo sapien
attttgggtaatattttgagtaattttctgcatttcttatattgctatcgtttcattttatttccagcaaaatgtattgcattagaatgtgggagaattcaactgagttgctgattggattttcaaactcatcgcagaaatcacacctttgaaagccaaagctttcatttgtaaaacctaggctttttaagagaataaaagtattcttgaaaatcaaaaggaaaaattctaaaaagcagtacatcagacttgtgtcccaagcaggaaattagaaacacagtggaagatgatgtaagagctaatttttcctccatatgtggaaaacatacatgtacacacacacacacggatggaagatccgagatattagaaataagaaaagagatcaagaaaaatatatttagttgtcctctagaaggctcccatctttgtccttctggattcagagtatagaaaccatgattattttaagaaactctgagaggagaaagagctggtgcattatttcctaaagtgtagccctgggagattgcaagtcttttaaagaaagctatccagtatggtcttcaagataaggaagaagagattaagcaggaaggtccctggacaaaacaaagactttccaaactgagaaaatgggggtcacagaagtgcttagagaaagctggtggaactgaagatgtctggttttcaaacaaggagaatgtagagtgtatggaccaaggtaaccagatgccactgcagtatagcaagtatcaacagctgtggtaggcatgtactgataagaagggaaaaggagaatatgtccagatgaggacaaaaagtgtctatgaagccagacacctgatgcgccaactatatctcatcagtctggaagccttacctctgaaacttctattacttttgctgagcaaaaatatatggtgagtcctaactttgtctaatcatttattcaaaaagagagttgtttgaacatttaactatagaaaatatgaaatctgtatctgttaagttaaagctatatcctctggatgtgaatctgaagattaaaatttatactttctaggtataagaagattatctgaaataaatatatagtgaaaaatttaatgttttctttctgggtttcccatttattctccatcatagactgggttctttatatcagtagaaataggcatacaatatgcatacaaagagaaatgtcctaataaagtaaatggaaggtgcatgaaagagaaattctggaagacaaatcaataatatctagcttggatattagagtcacatggtcagaactgattccagacttccaacttactagtaactttgtgttttctcatccataatttgtgaataatatctacctagcagcactgtatgtatgagattaaataatgagatatatgtaaagcatgtaaactagggtctgacacatagcaaatgctcaattttcttattcttaatcttactgttcttgtcatttattattttacgaattgctatttgtagaacttaatgttttacattctgatctatgattcttatggtcggaataatccacaatagtataaatcttggtctatgttgagaatttcttcatacaaacataattatgtagctcttatacaggccaaacctgcattcatttctattagttatatgctagaggtaatgaatttttattatttatttatgtatgtagacacattctattaccactctttaccaactgccattattttggcttaggagaaaatgatcttgaaaacaggtctatgtagttttaacagctcttttgtgaacttcggatgtaactgaatcattttctagatttatctgttaaataaatggtccatgaaagtatgtatgggtagataattgatggaagcaaataatcctattgaaacatttgctatttatttttgatacagttcttttaaacagactgattagttccctttatgatttcaccctcgaaagcacacacgattttgttctttatcattgttgcatgacattccatttggcagttgggcttatttttagccagactatcaaagtatttttcaactggactgtcactgcacttgaacttggaatcttataacttgaagaactgccctggagaaaggaagaaacttataataaatgggaaattataaatctagaccaacccaaacttgtactggtaattattctaattattcttatttccttaagtgtaatatggttcaattatagttactgataactaacaactcattggaatatgtgttaatttgtatacggaagataag

SEQ ID NO: 1777 - DNA, 2300 bp, Homo sapien
aaaggagtaaaataaaaatttcaggtctatcaatagggctgaggttgactttacaggtcatcctctgcttatcacagcagttatttcctaacttttacctaaaagcttccaaagcaaaatgtagaatcaaatatttgttcacagaacatatagccaattcacctgagagaatatggtccattttatttcattacagattattaccgtatttgaaacaaaattaaattgaaacaataggaaacaataacgtgtgtcaagtctctttaatagtgtatctgttgctattcaaattcctgcatgaaagtatactaaaaagtcagttataaaaacatttaaagaaagtcttctgtttttctaatctggtttctaaatttatggattaattaaagaacattcagggaaacagggaaataaaattgcctagccaccatgtagtaatatattatgcctaaattctaggagagaaagtgctaatggcatccagctgagatgttatatgaacacaacactataagggtgtcagacatgacgttcctcaagcaagggagaaagagtaattgaagcttttctaagaaatattagtataaaaacatgacttttttttatggtaaccccatgggcttttgaaaaaatatttaatataagagagcaaacaatattcacaaacaatggcaatttgatgaagtggaatgagtgtgtacttggaagtcagactaacctgggtaaaaaacgccagctctgccatttactaattgtataaactgggaaataacacctctctaatctttcattttcttattcatgaaatgggaatagcaatgctgtactcacagaatcctttgacagtaaatgagataatttatgtaaaatgcttagcatagtgcctggcataaagaaagccctaataatcttccttgtgcacacctttcattgcttacaaataattagattttcttgcttgaatacaatttgatcaataacaaccagtatctctgcattgcagaataaatatttgggaaggtgcacctgagttcctctagttgaatgcccattataaaagatatgggttctctaagatcatggtgcctctcctgtaagtcagcccgctgcacaatcaagtgttacctggccctcttcatgttgccaagtgagaaatggagctcagggaaccagcataaatacaggtactctggctactgctatttgctatgaacaataaagtcctttttctctgactcaggtgtcttatgtcttctgccatgatccataaaactgtggctggctaagttgttgcttgaaagaagggtaaaatctcaaatgcctcacagtgcttgatgacaattactaaaattgaaggtgggataatgtgaccatatgatgaataaatgaataccttttcctgccaccatacacataaatatattcaaataagcacacttcttaaaagtcattcaataaatactagaaagcctagtgatttcaagaacatgggaagtttgaccagatttatgagtcatggtctgttggatcactctaattggacctcttgcagatggaatacttaccaccaagagccaggacataggctaatggcaatgaatcctttcctagttaaaaaaaaaaaaaagaaaaaaaaggtcaaatgaatcactgtgaaatgtaccatggttctccatctctccagttgggtcagttaaggcaaattcacctagctgttcaactatctgggaggcaggctattgaaagaagactgatctgaaaattcctaccagtattgtataatctaatgttcttttatttaatcctagacatcaatatattcaaaaaataataataaatttatacctgatgttagctgtgaagctctccttagggcctgtcaactacttctggccattctattccttagttgaaagaaaaaaaaaaagtggcagaaggaagaaacaagaataggaagggtggaaacaggccgtcttttgcagaggatttctgaaggttcttcctaggtaatgatgtgcccttactgccacttgtgtcaacctccagcttcctcggtggcttcccaccctcatcttcactgctgacaccagactcagcatcacagtggcagtggtagcccaatgccaagggttctgttattatctgtccagcttattggaggtcacataaaatatcaaaaggtataaaaacaggtcatgggaacattgctgagctatttcacatcatttaaataagtggggtcaatttaagtgcatttacattaaaaggtagccttggtttaaaaatctctgaagcataaa

SEQ ID NO: 1778 - DNA, 2300 bp, Homo sapien
gcttaacgtttttgaggaaaatctgcatcccaatgggatttaagagcattcaagaagctatccactctcttagtggaaaatacaaaatgaataacgctcatttgtatataaatataaacatcagtccttttcataatacataaggacatagaaaaaatgattaatataatttagaaggttggtttatcatgtaactattattctccatgtgccttttttatagcagcacagagcagaatttgttgaatccacagtaaatgataacagtgcaataaagctataaattatttacaaaatataattaactctcaccagaaaaattgaaaatttaaaagcagtactctaaataattcttggatctaagagaaaaaaattcactggataattaattaattgcaattattagtgccaacaggtggtatttgtaaggtgaccaatttctcactatagcctcaaagaaccaccccactcacactataacaacaacaacaaaagtaataaaccgcaatggagaaatactcataatcagactttaagaaatgtataagaaggaaaaacctaacacatgggcttaataagaaaaatatgctattccacacaaagcagatgaaaaagaaatatgataaatgggaaatcactccaactatttgaatagaagactaaagatgatgataatttttgccagattaaatccaaaatttgttgtagaacatctgcaaatcctaacaataatagtttgggatttgaaaaaaattcattaatttggaagaaatagtactgagtaatgtgaaattctttgcaataacagaaataacatacgactatacaggaaaacaaactctggaagaaatatttgccagatggatatgacaaaacatttatgtttgtatggacataaagatggcaacaatagccattggagactaccaggcggggaaagtgaaagggggccgtggattgaaaaactacttattgggtattatgttcactgcatgggtgatgggatcatttgcacaccaaatctcagtgacatgtaatttactcatgtaggaaacctgcatatgtaccccctgaatctaaaataaaggctggaaaaaatgattgatgtctgtaatacataaagagttcttacaaatcaatgaaaaagcaaacatcataacagaagaatgtacattgtatagcaggaaattcacaaaaggaaagcttgctactaatattgacagctctatccttgccaccacttttcaattactaaattatcaaataaagaaagaattggtggaaattgtgaaaatagtgcaggcacataggactttcagtcattattgatgacattgttcatcatacctcctttttaaaagaacatttagaaatatgtataaaaagcttctaaaaattcatagcaattcatattccaggaatgtgtcctaagggaatagtcagaaatatgtgcaaaaatgattataagtagtgtttaaaatagctttataatcacaattgaaatagctcaatatttaacaatagacattgatgaaccgaaatttagtaagactttattataatgttttatgtgttattgaagagtcttttaaatttaatgatatgggaaaatagtcacaatatattgctaaattaataaagtgggatattaagggctacctttagtaagaatcgagtaaaaaatacttggaaatctattaagatgttaactagtagtcttctctgagtagtgaaactatgataattattttcttctttgtatcctttagttttttcaagctttggataatctatctaaatactgtctccatatttagggaaaatacaatacatattatttaaaatatatttgtttttatactaaaaagctgacattgtaaaataagaatattttgatatttaaaaaaataccttaaagtatcattatatcatttgagtgaaaaaaaaaaagctgactttctaagaaattttctgtgtgtgacaattccatttggcaactaatgctgtgagaactgacaatcacctttgcctccagtggtcacctttattgataggtaaaagacaggagccttaggggatgaagggctaaatacagagaggcaacaaagtgatatgtcacattgctgaaatgggagtctcagcatgcacagtcctcttttactatgggtggaaaacagttgaggttagacaccagccaagttcttgcttttaagtttcagtttcagaagaacatctgagaaaaaacgaccaagtgaagccttttctggtttcacacctagtaagtccttgatacttaggcc

SEQ ID NO: 1779 - DNA, 2300 bp, Homo sapien
gtaatgaatttcctttcctcttttgtttgaattatactgtctgcttttacttcagcaccagtcttaaggcttaaaagattcagagtagagtttatattgaagacatttagacagaaatgagtccattccaataatatccttttagacccctaaaataggaacattattcaacgtaacattaaattgagcaaagccattgcatgaagagcataaattagttattgtcagcaagtttgcagtatgaatgaaaatacaggaatgtaatggaggacatctcctttgtctagaatactctataattgtggcatttagttatgtagaggacttcaacaccatatgttttaacaaatactttgggtcataagggtatgtataatggaaggacataattaaagtttaatctgttcagtaaaaaggcaccattaattactctaggcaatttattgggttattaattggttctggaaacatgtcaagatactaatttaaatggaattttttcccctaattgtctagacagcccctcgaccatatactgctccaggaaatatgcagcctccaattcgattacagcctcttcccagtaatcctgcagtagaaactgttccaaaggtaacttcaaggtccagatcaaaaacctcattgctggaaaatgaagctctgtttcccattggggtaaatgttatttttatcaataaatatattttaatttttgagtagattattataggttattacagtggtcaaggtattatattcgattaaaatctacacagtgaaaattatattgtatatgtatgaaacacttactacatacttgtgattaattatgtcttactcaaatgggaaggcctgtaatttgtgtcactgagcaaaaaagtaaagaatagattggtaataatgcatggtgatttctccttagtttacaaggctgattgaaaaacaaaggggaaaacttttctgaaccagatacaacttctatcagaaaagacctagtgttgacttcttccaaattttaaacgcatgaaacctagaaaatgaaactttccaagaataggtttgcatttgcatgccgacttactttcccatcaatgtatgaaattgcttcaagtttgacttttaaaaggttgaatatagaaagaatagaatgtccatctttaaaaaatgctgagtttatcacacataggagcttgattctgctaccctctcaaggttatatctcagataattttcccttattttaatagagcacaggaaggaggtatggtaaccatgaaacatgagttacttaaatagggaggaggaattagtacattcactaattagggaaagtattgttagtttttctaaaatgaagaaaattttgccagcttaagaaaaaacctgcgacatgagtacaattgtcattatgttcaaaggaatgattatgtttcatttaagaaacgcaagatatatgaaattaagatatttttatttttaattgacagataaccttgacactaagaaattaattcagacaagtgattgtgtttcacagtaaaagtataaatacaactctaaaaataataatatattaatctgcttaatatgcttttcagtttctgaagcacttttcataaatcttatttcagttaatttaataatagttttctagaaaccaagagaaattaatccaaaagtggtggtgcttcatccagggaagactgcttacagttaggcaggaacttcttgagtcttatgtcaattagtttgacactttctaggctctggtctccactttgaagacccagagatttcctgttttagccagggtccaggaatagtcacatcttgtgagactgtccaggctaactaaacgaactcaaaacaagctcatttttctctagataataaacgaaaatgggcaactcaatgatattcaggggctatttattcaccaagagatgtcatagtcaaggcttatagaagaagtgcattatcccctagtaggcagacatatatgagaagccaaatcacaatgagaaagttgcctagtgagcatggaatcagaatgaggggagatagtgtaatagaatgttaatcgtataaggcctatatggcctgatacacccatctcatcttgggaatgggctagccaaaggtaccagaaaactcaaaggtctttggctaaaatcctctgtatcctccagcagtaactttgccattaggactagaaatactcaaagtccaatgagtaggatttcctctcccctagatagtacttggatgggtgctttccatgcttgccaaggtgattatat

SEQ ID NO: 1780 - DNA, 2300 bp, Homo sapien
aatcctgagtatctaaatagtatattttaatttcccttctcattgaaccagtgagaaaataccattttctatttgcaaaaatgaattttgtaacaactagtatctatataagattacattatttacaccatccttagggattggcagcacctggggcaagttacagtgtatctttctagttcctcctcctccttccccagtcccgatttttatccaggtgaaatctagttacagtgagcattaagggcaacctcaaatggaaaccaatgttagtggggatagacatacggtaggggacacggggagatgacctctgccttagtctagctctggccagttgggctctgaagcagccttgaatccttcagtctcaggacctaagctattgggctagcatcatatttttttttttttcttggaatggctctggtcactcaggtccaaaacctgtaatggtatagaatatctggcttctctggcaatttataggggccacggaaaagtaaatcaacttgtaattgttaaaggcatttgtaggctgaaatcagatagatctggatttgaatcctagtttttcccattggaagccactgtagatgtcagaaaaaataactaatttctttatgtattagttttgatagctatgaaatggagaaaaaaacctgtctcataaaatgaagatgaggattaaatgagatagtaaatgctcaataaaaggctgaggagagcatttagtaacaactcgttacaaatgccaccactcaagagtttccttttttcccttcactcatgctgcaaacatttattaaactgttgcttccttctgagaatatagaaaaatggaatagatgtacaaaatgaaatggaggagcttgcatttgagtagaaaaggcagcatctacttcagcaagtgttatacagggggtaagcacaaaacaggcatatcccagccgagtggccccctgaggccagagtcattagcacacctgaggatgtcaaagaggaagtgtttaagctaagtgttacaggatgaatagaagttttccaagtagtcaagggtgaaagtatgtttccactagagggatagcgcaagagtttggttttgctagagtttaaggtagtggagaaagtggtcacacaggctcgggaaagacactggggccaggtgatgagggcccctgaatgtcacactaaggagtttgaactctgtcatactcagtgggtctttaccacgtgaggaaaagcagaatgacgttaatgaggtgatgctcttcccacctctaaatgtggctgacccagaatagagaccctagaaagctcagtcaccactgatgcgtccaacccttcacttatacatgaggaacctgaggccagagatcaagtcattctgcaaaacacctgaccaagcatgaacaaaacaagaataggttatctaagtctagtgcttaaacttcctccacattcagatcctcctttaaatccaggctgcttcatctaagccctgcattccatgtactggattccaatgtaagtactgtttctgggtgctttactgaataactgcgtctcccccatcttctgaaagccagctctgtcagccctgcccactggaagtggggacctcagctaggaagaaggataggggttttccaaggagaaaatgagtcgattgtaatgccttacagatgcagaaacaaattcaaaacccaaaacagattgagagacgtccttctttccctcaaatttgcaatcgctgttttagcactggaaaccaccgcatcacgcagtagctgctccctgctcttattaccctcagccgctacccagtccttccttccccagggcctagcaggaagcacgccagccaaaatgtgtgggtgtgcctgtgtgtgtgcacgagtgtgtttgtgttttcatgttacagatacctggggaactcgcgccctagagcaacagagcaggggcttgcttgggtctcctccctatcagggcccagaaaaaggggtagaagctggcttcacttccagcttccgcaggctcggttccagtagcgcctccgcttctccagaccctgggcgcttgcctctctcctcccttagcaacagggaagctgtggataccaacggagggtgggagcccgggaggctgcgggtagcccgggcgcccaggggcggcggcggcccagcccaggtgcccgcgcacaggggacctcggtgcggagccacccctcgagcgcgactgtcgcagcgccagcgcgcacggggccccacgcacccaccctccgcacctgccgcggggtc

SEQ ID NO: 1781 - DNA, 2300 bp, Homo sapien
catttacactcttaagttccttaaagttagggtgggtcctataggaatcttaagttcattgtatgtatttaagtgtttacaggagtgtagagaatatataactcttgggttatatttgtttttcaggttggattagcagcatgccaaattgctagagcttatggcttaaagattttgggcactgctggtactgaggaaggacaaaagattgttttgcaaaatggagcccatgaagtgttcaatcacagagaagtgaattacattgataaaattaaggtaaaattttccactgttttacaaaagtcaaactttgttccttggagacttgcgtggttttttaatatgtttttaaccaactactcctttaaagctgtttgcttccttttttcagtgcgatgaatttttatgcgtgttttaaaactttatttaaaaaacagatgtctaagttttaaacttttactatcatttttgtattgtttatgtgtattaaatagaatatagcttctctagaatcttatagctataaaaattgattttttaatgcaaataacattctaagtaaagctgcagctttgtatttgcagctgtgaggtattcttaatataatttctactgatgtgaattctccatggaaggtgagatatctgtaaattacaaactggatctgtgtggcccagggaataaagttcatttgttagctggatgctttggaggaataatcactactgcatccaaaatggtgaggtggcatttatttagttgctgcatttaacagaattcaagcagattctgaagttcttcacttgtactatattagcaatttgctaaacacttattgctttgctaatcctcaaccacttcctcacgttagggagattagaatttcccaaatattgagtactgtgtaaattagatcattacaaatgaaggaaaaaataagagtgagagtttattaccttttttgcaatcatcttgccaaaaagccgaacaaaagcactcctttgttatacgtctggggaacctaagatctagcactgctgataccattatccaagaatattcacaaagatgaaaaatggcccgttattttaagagtatggtttttgttcagcaataatctaattttaagaccatgaggtcttgggagcttccactgactccttctgcttaagtctctcccattctcaaaaacattctcttaacctttatcttactcccctttctcttctcctctttcccacaaaacttcttgaaaaagtagtatttattgcttttacttccttaccttccaccacttctcactgcagttttgcttatagcccaagtatttatactgcttcccagaggtcactgagaagctcctaattaacagtctgctggtcttctttcagtcttcatcttgtttgatttttcaggagcatatgaccctgaccacatttctttgaaacaggttctcttcttactttcctgacttttcactttcaatctccgccctcttcatattatttaatattaatattccttaggttgtttttgcttggtctctcatcttccctggtgctagactttcatcctgatcagtctcatatactcttgtggctcccttactacccatatactgttgatttccaaaactgtctttggcctgagttcacttccttcatgccatcaacccgctagacattgctactcatctggtcgcccaagacagaaaccctcattttgtttgtttttcctgtcttttaattatcattctccctcccacccagcaagttggttacctcattttatcagtttcatctctgacatgcctttcaaatgtatttccttatctctattccactgaccaccataacttagtttaggcctcagtttctccagccttgactgttattcataactgagctaatacacccttttatctatgctgtcatctccctcttaaaaaagatctccagaaataaataaaatggaagctttatgaggagaggagttttgtctctctgttccctactgcacttgcacatgcagtaataaacccctgtaataaaaaaacaaaacaaaacaactacaaaaaaaaccccacacaatccaaatcctttaatatggcattcactgtgttttcactatctgtcccaacttacagtctcctctctcctacctcttcctctccttgccactcccccttacctgattatgtacttcagttcctcttgtatttcaatccttgtgttctcagtcccctccatctttgcttttctgtttctttggtccagactgactcagcctcaggtctagct

SEQ ID NO: 1782 - DNA, 2300 bp, Homo sapien
actatacttcaaataggccttcctgtttatcaaatataaacttttaaaaattaagagtcccttggtttaatttttggtttaattttacctctgaaaggttgccaatatgccttacaaatctaggaaatagaaaatctaaaatccctcttccaacagtgatctttttcctggctatgcttgtatccatttgatttaaacgaaaattaaaggaattgggaaaatgttaggagtatattttaacataggatgaacagatcaagtcacaaagccagagcaaaggaacattatgagacaagagcaaaagtaaaattaaataagaattctggcaagaattttaaaaactgaaaacttagaaaaaaaatcaatcattacaaattgttctgctgctaatacacaatgactcatgtaagcatatggtttattattaacccagaaatgtaaaaaaggcaagaattacaagtggtcagagaaagtctcttcctggctgtgtgatcttatcaggtcacttctgttcacttgagataggacggggtaagaagaggggaggagtttaataatttcggactcctccaggttccatgatcgtatggaacagggcagtctgttccctaatgctggaggagtagagcttggagagatttgctgctgaactcgctgcgctaaccagacacgtaatcacagtggcttcagagggactcgcacaacaatttccattagctacggacaagcattccaaactttagcctttaggtttaatcattgacacaccttccctggtcactgagtctcctctagaaactcagtataaacatccaacgatgtgttaacagggtgttttgtaattttcttttgaagattattctaggtggtgggcgtcacagggtcaataaaactatacatttctctcaaagactgcaatcctgatggcaaagctggaggaagctccgggaaacctgtaattgtgggaatccaagacaaaaaatcccccacagctgggctgtgggaaggggccctacctaggagaagaaatcaaatcccctacagctgggctgtgcgaaggggcactacctaggagaagaaatcccctacagctgggctgtgggaaggagccctacctaggagaaatcccctacagctgacaggtgggctgtgggaaggggccctacctaggagaagaaatcaaatcccctacagctgggctgtgcgaaggggcactacctaggagaagaaatcccccacagctgggctgtgggaaggagccctacctaggagaaatcccctacagctgacaggtgggctgtgggaaggggccctacctaggagaagaaatcaaatccctacagctgggctgtgcgaaggggccctacctaggagaagaaatcccctacagctgggctgtgggaaggggccctacctaggacaaatcctctacagctgagagctgggctgtgggaaggggccctggacagaccgctgggcgctgctgcaggaatccccaaacccaggcactggctgcagggaaaaatcaagcgggtgactggcggggggggggggggggggtgcagcgtggggctgggggacagggagtgcggggggcggaggctgggcaggggtagtgccaacggacacctcatggtgtggtagcctaaactcagagcctaaacgcaggaccagggctaggagcccaggaccagaaggcaaaacttcctacctgatttatggatgggaacttgcagcccctggaggggaatggcttcggtctggagctctacgcactagttctctgggaggacagagggcaggaaaggggtgcagccaaaatcaaactcggttccacttggacgagcagtggggagattcgctgtctaaacaactaaggagagtttttaaaaccacttaccagaatctagagtgggaattaaaatctgcgtgggcttcttcagattccacagaaatgaggactgccacaccttctccaacttttgcaggctccacccaggatgtgcgcctcgctccacccaggatgtgcgcctctctccacccctaggcgaaggcactagaatttcccaaattaagaacgaagaggaagtttggaccttttcggccaccgctcgcttcaatatggctgcccccagggagagacgaggctaccatgaaggagccgagcgcagaccctgagtccgtcacccatggatcgcagcgcggagttcaggaaatggaaggcgcaatgtttgagcaaagcggacctcagccggaagggcagtgttgacgaggatgtggtagagcttgtgcagtttctg

SEQ ID NO: 1783 - DNA, 2300 bp, Homo sapien
acatagcataggtgagagataagcagagttgcaatttgtcaaacatggtttggagaagaatagttaagtggcttgttagagaaccattgcaaaaatcaaggcgagacagagttatggaaatggggcaagagagagtttgtgggcaagaatgccattgctctgaaggtgatggaagtgatttaaaaatgaacaggccctgctaacttgagagatcagcaaataaatgatcagtcaataatggacctaaagaatgagcctaacaatgtgctgtcttccatgctcttaagccaatactacgaataaaatcagtacacagccaacttttacagtgcatgggccaggcacaaagccaaatatttcaaaaaaaattatcctattttctccacacaaaatccctataaagcagatactttttattatcctcagttcatagaacaggaaggggcagagttgagatagctttcctaaggtcacatagcccgtggtttttaatctaagcagtatcactcccaagcagccttatcctcaggggatatgtcccaagaccccctagtggatgcctgaaacctcagatcaatttctttttccttcttcacttcacaatttcactgacaagattcattctttccgtagatcttagcaacctcagcatatgctgttttttctttccttaagtctttccttaagaactttcaccttttcacttcaaaaaagcactttaaaacttactgttggcagatccaaatcgccagcatcattactcccgtactttggggccattattaagtaaaataagagttacttgaacacaagcactgtgataccaccacagtcgatctgataacccagaaggctaccaagcagctaaagggcagcaagaatatatagtggaatattctggacaaagggatgattcaccttccattctggaaggagctggttggctcaagattttatcacgctactcagaacagcatgcaatttaaaacttactaattgtttatttctggaattttcatttaatattttcagactgctgttgactggggtaactgaacctgcaaataaggaggtatggcttgtacagctgcttcttgatttatgatggggttacatcccaataaatccgtcataagtggaaaatgtaagtcaaaatgcatttactacccctgtaaacccatcataaagttaaaaaaaaaagtctaaccatcctaaattatatacgatcgtacttttctctgcgtaaaactactagagttgtaataatggaggggctcactaggaggcagtaaactccttaacactggtgatgttcaagcatgcagtaacaatgatttgccagagctgttgatgagcggattccggcattcaataccttagcaagctacaaagtctttagattcccttagtattcatataataaaatcaaattttctaaactttgccacacaagatagttcccaggtcagcagtttcaacatcatttgggcacttgttagaaatgcacagtatcaggccctaccctacacttaaagaatcgggatctgtattttaaaagatgctcagctgattaatagccacgttaaacttttagaagcactgatctaatcccctaaatttcacatataaagaaacagagaccacccctcagaggagcaaacacagacatgctggatccggtcgtcactggatgggaacagggctcctgaagtttcgcactagaaggcaggcgatggacaggcgcaaaggggcctcacccggtcaaggagtaggatgcggccagcgcaggagctggtggtgaaaaactgatctcgcatgttcagaaactgcacaagctctaccacatcctcgtcaacactgcccttccggctgaggtccgctttgctcaaacattgcgccttccatttcctgaactccgcgctgcgatccatgggtgacggactcagggtctgcgctcggctccttcatggtagcctcgtctctccctgggggcagccatattgaagcgagcggtggccgaaaaggtccaaacttcctcttcgttcttaatttgggaaattctagtgccttcgcctaggggtggagagaggcgcacatcctgggtggagcgaggcgcacatcctgggtggagcctgcaaaagttggagaaggtgtggcagtcctcatttctgtggaatctgaagaagcccacgcagattttaattcccactctagattctggtaagtggttttaaaaactctccttagttgtttagacagcgaatctccccactgctcgtccaagtggaaccgagtttgat

SEQ ID NO: 1784 - DNA, 2300 bp, Homo sapien
aggggcagatggaggaatttgggaaaatgttgatgagccggttttattctgacctcatctctcagctctgtggtagcaggatatggaaaacataagcagtctccgcttgggaggaatgatggaagatggtgtctacaggggagccaggtttcagtaacggaaggatgtaaagggtgcattaagtgaaaggatgttaccatggaacaaggcccaaaaagttatgtatgtcacgcatctcagtctttttaaatttaactctgtgtctgtttttgagattaattcattcattgataaaaatatttattgagcatctgttgtttgccaagcacagcactagatatcaaggtgtacagtgatgagtgcataagttcttgaaaatggacaggatgtgtactcatcatgttgtatatgtattagagttaggtgacatatttaggaatatgtggatatttggagttttggagttttataggcttcgtaagtagaacttagcctgtttattgaatcaaacaaagatgaaaattggtccaaatagagatctattctgtagatatcaaaaatttcttgccatagtctcccattataataggacataaaagtaagatgagatctctgcagtggcaggggggtttcctaactttcagatcattctgatttgagacctaggataacacatttatagttacatttttattctggggttattcattcatttattcaatatagtcttactgagtatgccagcactctactacatgctcagaatataacaggagacaggtagataggatccttgctctcatgaagtctatattccataaaagtagtcatttttgataactaactctctgggtacttacatatatcatctgtaatcctgtgacaaccctgatagctacaggataataatatccagctttataaatgtgaaaaatcaagactgtgggaaattaattggaattagctgacatcacctttcctaaaagaatgttggtgtcaaatgcatgcaacacaccatgctatgctgcctgctgcaggctactgtgtcaagcagagttttgtgttaggtgttaacatgagggtagaaaagaaatgaggcctggttttcagagagcctacagtttattgtatcacaaaactaacactaaaactccaatagaaaaatgaataaagggaaacaataatttacactaaaaaattcaaatagctaataaatgagaaacattgtattttacttacaaagaaatgaaagttaaaataatgcgatatcattttcacccatccaggtagaatgtgttttttgatgggaatattcagtgtataggtgtagtgatctctctcaagtgcagctattagaagcgtatttctttgaatatctattgtgaaaacaagcagtatttatcaagagccttgtaatgtttatgccttttaacgatgtaatgatatttctaggtgtctatataaagaaatggctaaaaactcacatcacatcattttcaaaaatgcttaccacatttttgtttgtatcagggaaaatttgaatgtaaataaaggccaatctagatgacataatgttgtactgccactctcaataaataataactttgaaaaaacaatgtaaaactttatatgtaatattctaattgtgacaaataggtatatggattaattaataaatacattaattcagactacattaataaactgaaaagaaaaatattgagaggagttatttctagttatgtagaggtgatctgtatttgtaacctcacacattatacaaattacctaaaatgagccattacatttatgtaataataattgcattcttttttaccctcttctttgacccctacatttgggttggaaagtgaggtaggacagaggttgtcaagaggtgattccaatccagttttcagggctgttcttaaagaactgaaatgcatttatttccctaataaaacatattatttatttgatttatatttataaagctaatatgggacatagtcaaatttacataacttataagctcttggtgtatttcagtcatttcgtttcagtacacacagatataatagtagtacttatttcttcacaggttttacaactgcctacagcatgctttggaaagggaaacgatgactaacttacatcccaagatcaaagagaaaaataactcatcatatattcataagaaaaaaagaaacccagaaaaaacacgtgcccagtgtattactaaagaaagtgatgaagaacttgaaaatgatgatgatgatgatctaggaatcaatgttacc

SEQ ID NO: 1785 - DNA, 2300 bp, Homo sapien
gttttttttttttaaatgcaagaggttcctccccacacacaataccccgaaactaccgaagcagggcagaagtattctgaaggagaggaggggaaagaaaccttaaaaaggcatcgtatgtattaaaagcttcaaaagaaactgccgcctatttatttcttcccaaaactttgagatgcaaaaacaataatgatgcaaactgtaaagagcttagccacatcagggtgttattactgaaagttggaacaacctaaagactccatttaaaattaatagtaataataataaacacctgtcggaggcccttctgaggaaggggggtggtatttgagggaaataaatgggattaatcacttctgaaacaatttttgccgtgtttctaagcctacagcagctatagctgagttcgcaaatcttcttggtgtgtctgccaagaagacacaccaagtcttaagaaacctagtggtttctcccttagcgctgagtaatttcaatatcgcaagcgctggtaaaaccattccagtttgcatggtctcttccagccctttttcaggactttggaatcccagccaattcctagacaagggcctgtttctgcttggatggactgtgactggggagagactaggcccagccaccaaggcacccagggcacactactgtgatccgctgtagagtgggacctgtcgtactcaagaatgaagactccatctactgccctcgcgtctcctccgtgttcttcctcctctttgtggactgtaaacgaaggtgtatctcctttctaggccagagaggatggcgtgcagcagcgcctggctccaaatgacctcagctcccattctgactgtccatcttgggtcctctttttaccctgaagcaagccaaaacctacatcaatgtctggccatcacacacagcatttccaagtgcgcgtccagagtctgtctatgggggcttgccccaggcttggcttctcctatccaacacattcctactggccgcccctccccgcccccagagcctcctgtataaacagaggctctgactcagttggtctcttaggcactcagagtaggtttcccaatttaattgcaaacgctgaggtctgaaggactcgcaggagggaagaactcaaatgaagcataatgcctgaggatcccttggaggttataagcttataagcctctgttataagacaaaatagcaaagtaattaaaagtcagccctccgtgtcggatgtctgggtttgaattctgacctggcttggtaaaatatgactttgggcaaattaaagaagtgaggttgtatatgccacaacatcagtggggcgtttgacaaataacaagccacttgctaattattatgtcagaattttcatgccctttcttacctagctcttcaagggcttgaaagatgcaggaactgagcaagaaggtacctatgcaaagacgtaggagcgctagaattaagaaggcagagaaagacatgaaaccccctgcgcctgccagcatatactttcattcagaaagcaattttttattgtctagtgccaggcactgaactaggtttcggagcgtcgtcagaacagcacatggttcctgcatccaggaagcttgtagagcctcaggaagaactgcaggggtcgactttattcaagtttgtgtcgggaaaaactattgctaaaggcttctcccgagtggtcagtaaatgagaaacaataaatagcctttgcacaaactgaaccacgcagcgcagcctctgctactgcacacaataacaggagttcggtcaaggcccaaaaggaaagttccagaagtgagcgcagacctttggacctcagtctgtacggagatcgagtcaccgtctattcaatccaggttttgttccacttgctgatgattagacatcaaattatgcaatctgcaaggaaaaggagagagaacgattttaccgccgatttaagcgttctcctttttccccttcgtggccgttttattcggcactgaaatgctgtttaacctcagcaagagtaggcgtgggaaggtggcgctcttccccacagcacaccaggcaccccccagctgctcagcggaagtgggcagaggcaagaggctagcggctggaccacttgtgctggagtggtaaagaactatcatgaatccatttactgaaagtgtccatttctgaactcaccctaaagaggacaaacaccgcaaagtagttaaaagtcaggcattcgcgtcggacgtctgggtttgaattctgccctggcttggtaaaatagggctttggataaatta

SEQ ID NO: 1786 - DNA, 2300 bp, Homo sapien
cggcacgtcctttgctactagtttacacacaaacatctgatcgttcttccaatacatggcactgctagggctgcttatcacataccaactccagagggtcagaggctgtccgtgtctgccgatctcccccctcccccgccccgatccactaataaaagctgatgccgagaaggataatgctacaagtgtgtcttcgtccaaagaggccgctgtggcctgaccactttctgatgaaccgttcttaaaattcctttcccagcttcactgagctctgagtgaagtgagcactgagcttttcctgagtccctccaggaaaagaaaaaaaaaaaagttttgttttccagagggtggaacctaatataaaggaagggggcgtgtgggggaaagtctttcctggagaaattgcttcgcctctttcaggaaaacccgccttctctacatgttaaaatctttatcagaacacgccaactgacttcaggtttagtactaaagaaaaaaaaattgggggatgtcctgttaacttgactttaaaaaatctgctgtctgcatttgccataacttttaaattctcgctccccaacccaaacctaaacaaagattcaggttacatctctttctgcagcaagcagaaggggaagtggaggtctgggtgacttgaaagttttagtcattctcttgaaactcgcagctgtccggtgtagccgaggaatgccaccgctcctggcagcctgggagctgacttatctagcagttcgcgctccctttccgaaaagttttctcattaagataaagaaggaacatctgagcaacacaaaagcttatgatttgcgactagatttgaaatcaaggctacaagaaagacaaaagtatgttgctaatgagtattgctctttcatctcctagacaaaatgtaagcccgagcagccttgtcttctgcctcaagttctgactgcggggcggggaagcggcggagggaggtattcagggtaccttaattttgattaagattggaaggtgtgtttgtttaaacagactctttgtggtataaactttatttcattatttagtgtataaagacaaatttggttaaaagattatttttaaatgatttttgtttccatttaaaaagctaaacttctgaaactaagaagatctaggagtctatttcttaaaggcctttaacagaatcataggattttgctttaattagatggaaatatatatgtaaaacacacacacgcacacacacatatcttatctccttgccttatttgtatagaagaaaaagagcgaaatgatcttgcccagaccccagctcggtcagcagccggctagcggaggagatagatagcctttcctgtgatgaagtgagcctgtgtaagagtctgggaccgagttaccactacaaatttagtttttcctccattgcatttttctcccataaacactagagtcttcagagcattttcctatcgccattgtttttcttttcgcgcagctgcgcacaagttaatattagccatccccctgccggtcctctctgggagatctcgtttaaatttactgagcgaagggaggaggacgatataattaatctgtgccctcttagaaaattgaaagattggggtggactgacttttcaaaaagctaacttgtgcgtgggaaccagaaagacttgtgtttttcatcaaatgcagaaatcggtattgggggtggtggagaaattcacataatgcattttccatgaaatagcatcgttgtggagaccgctcttccgaatggaaagtcagagtcgtgcagaacattggcgccatcaggtcgtgtatagagcaggatttcgttgaaagtggaattaaacataaaggtccggtttggatatttaattacagtgtgtgtgtgtgtgtgtgtgtgtgtgtgtgttagggtttaaagtgaatctggggtactgtctggctactatcgaggagaatttatcgcgcgggtcatttggagatccagagagagctggagctgtgttagggaagcagggcgggggtgcgggcatttatgcggtctttccacccaccctcgcctaatcaggcggctctcagtcaggttttcaaaatactaaccttgatctaagagcgtctatctctgcataagtggagaaaatgattcatttttagaggtttctgggcttggggaagaagaatggtcgtcagacaggagcagaagacgtgaaagattggtctggcctcgctttactccaggcgccttgtgggatgctgacctgtcccggggtgcagctgcgcgcacccctc

SEQ ID NO: 1787 - DNA, 2300 bp, Homo sapien
cacacactgtaattaaatatccaaaccggacctttatgtttaattccactttcaacgaaatcctgctctatacacgacctgatggcgccaatgttctgcacgactctgactttccattcggaagagcggtctccacaacgatgctatttcatggaaaatgcattatgtgaatttctccaccacccccaataccgatttctgcatttgatgaaaaacacaagtctttctggttcccacgcacaagttagctttttgaaaagtcagtccaccccaatctttcaattttctaagagggcacagattaattatatcgtcctcctcccttcgctcagtaaatttaaacgagatctcccagagaggaccggcagggggatggctaatattaacttgtgcgcagctgcgcgaaaagaaaaacaatggcgataggaaaatgctctgaagactctagtgtttatgggagaaaaatgcaatggaggaaaaactaaatttgtagtggtaactcggtcccagactcttacacaggctcacttcatcacaggaaaggctatctatctcctccgctagccggctgctgaccgagctggggtctgggcaagatcatttcgctctttttcttctatacaaataaggcaaggagataagatatgtgtgtgtgcgtgtgtgtgttttacatatatatttccatctaattaaagcaaaatcctatgattctgttaaaggcctttaagaaatagactcctagatcttcttagtttcagaagtttagctttttaaatggaaacaaaaatcatttaaaaataatcttttaaccaaatttgtctttatacactaaataatgaaataaagtttataccacaaagagtctgtttaaacaaacacaccttccaatcttaatcaaaattaaggtaccctgaatacctccctccgccgcttccccgccccgcagtcagaacttgaggcagaagacaaggctgctcgggcttacattttgtctaggagatgaaagagcaatactcattagcaacatacttttgtctttcttgtagccttgatttcaaatctagtcgcaaatcataagcttttgtgttgctcagatgttccttctttatcttaatgagaaaacttttcggaaagggagcgcgaactgctagataagtcagctcccaggctgccaggagcggtggcattcctcggctacaccggacagctgcgagtttcaagagaatgactaaaactttcaagtcacccagacctccacttccccttctgcttgctgcagaaagagatgtaacctgaatctttgtttaggtttgggttggggagcgagaatttaaaagttatggcaaatgcagacagcagattttttaaagtcaagttaacaggacatcccccaatttttttttctttagtactaaacctgaagtcagttggcgtgttctgataaagattttaacatgtagagaaggcgggttttcctgaaagaggcgaagcaatttctccaggaaagactttcccccacacgcccccttcctttatattaggttccaccctctggaaaacaaaacttttttttttttcttttcctggagggactcaggaaaagctcagtgctcacttcactcagagctcagtgaagctgggaaaggaattttaagaacggttcatcagaaagtggtcaggccacagcggcctctttggacgaagacacacttgtagcattatccttctcggcatcagcttttattagtggatcggggcgggggaggggggagatcggcagacacggacagcctctgaccctctggagttggtatgtgataagcagccctagcagtgccatgtattggaagaacgatcagatgtttgtgtgtaaactagtagcaaaggacgtgccggagctggcagttccccctgagaaggtgagcgagccgacgcctggccagaccagctgaatcgcagtgtccttgaaactcgagttgtttgggctcctaaacaaggttcagaaactacctgtaacggcctcatcttcagacctggcaattttttttttttattacgtagtagcgttagtcagtaatcattgcactccctccccaaaagctcacttaacctgagacatggagactgtaatttgggagatgaagcctcgagcctaaggcgctctcaggtccatgtgagtcgtgcttttgttctatttgctgtggtgatcgtggcggtccgggagagtgggtcgggaggactgggcggctgtcgggtggaaccggagacctggctcgtttcgttcggctgcccgcggacac

SEQ ID NO: 1788 - DNA, 2300 bp, Homo sapien
ggctctcccggcaagcccagggatcccggaggcctttctggagccccgcagagggaggtgtgcctcagggcaggcaagtgtccgcgggcagccgaacgaaacgagccaggtctccggttccacccgacagccgcccagtcctcccgacccactctcccggaccgccacgatcaccacagcaaatagaacaaaagcacgactcacatggacctgagagcgccttaggctcgaggcttcatctcccaaattacagtctccatgtctcaggttaagtgagcttttggggagggagtgcaatgattactgactaacgctactacgtaataaaaaaaaaaaattgccaggtctgaagatgaggccgttacaggtagtttctgaaccttgtttaggagcccaaacaactcgagtttcaaggacactgcgattcagctggtctggccaggcgtcggctcgctcaccttctcagggggaactgccagctccggcacgtcctttgctactagtttacacacaaacatctgatcgttcttccaatacatggcactgctagggctgcttatcacataccaactccagagggtcagaggctgtccgtgtctgccgatctcccccctcccccgccccgatccactaataaaagctgatgccgagaaggataatgctacaagtgtgtcttcgtccaaagaggccgctgtggcctgaccactttctgatgaaccgttcttaaaattcctttcccagcttcactgagctctgagtgaagtgagcactgagcttttcctgagtccctccaggaaaagaaaaaaaaaaaagttttgttttccagagggtggaacctaatataaaggaagggggcgtgtgggggaaagtctttcctggagaaattgcttcgcctctttcaggaaaacccgccttctctacatgttaaaatctttatcagaacacgccaactgacttcaggtttagtactaaagaaaaaaaaattgggggatgtcctgttaacttgactttaaaaaatctgctgtctgcatttgccataacttttaaattctcgctccccaacccaaacctaaacaaagattcaggttacatctctttctgcagcaagcagaaggggaagtggaggtctgggtgacttgaaagttttagtcattctcttgaaactcgcagctgtccggtgtagccgaggaatgccaccgctcctggcagcctgggagctgacttatctagcagttcgcgctccctttccgaaaagttttctcattaagataaagaaggaacatctgagcaacacaaaagcttatgatttgcgactagatttgaaatcaaggctacaagaaagacaaaagtatgttgctaatgagtattgctctttcatctcctagacaaaatgtaagcccgagcagccttgtcttctgcctcaagttctgactgcggggcggggaagcggcggagggaggtattcagggtaccttaattttgattaagattggaaggtgtgtttgtttaaacagactctttgtggtataaactttatttcattatttagtgtataaagacaaatttggttaaaagattatttttaaatgatttttgtttccatttaaaaagctaaacttctgaaactaagaagatctaggagtctatttcttaaaggcctttaacagaatcataggattttgctttaattagatggaaatatatatgtaaaacacacacacgcacacacacatatcttatctccttgccttatttgtatagaagaaaaagagcgaaatgatcttgcccagaccccagctcggtcagcagccggctagcggaggagatagatagcctttcctgtgatgaagtgagcctgtgtaagagtctgggaccgagttaccactacaaatttagtttttcctccattgcatttttctcccataaacactagagtcttcagagcattttcctatcgccattgtttttcttttcgcgcagctgcgcacaagttaatattagccatccccctgccggtcctctctgggagatctcgtttaaatttactgagcgaagggaggaggacgatataattaatctgtgccctcttagaaaattgaaagattggggtggactgacttttcaaaaagctaacttgtgcgtgggaaccagaaagacttgtgtttttcatcaaatgcagaaatcggtattgggggtggtggagaaattcacataatgcattttccatgaaatagcatcgttgtggagaccgctcttccgaatggaaagtcagagtcgtgcagaacattggcgccatcagg

SEQ ID NO: 1789 - DNA, 2300 bp, Homo sapien
atataggaagccctcattatactaaggagagtaaaggaagagaaatccacatctagtcatacattattctgtttattcaacaaatatcaattgaacagctgctgtgtacagacactattttagactcttgatgtacaacagtaaaggaacagactaaggttcttactctcatgatgctcatagcctaagtaatatatatcttagaaggtggttattgctatggaaaaaagaaaaggtagagcaggtaaggggagattgagaatgccatggtagggcaaggagtgaaaatggcagtattagcaggagggctcttttggggaaaatatctaagaaaacacttggaagcaatggagttagacagttaagatgaaggaaaagttccagacagtgggtacagctggagcaaaggccttataacataagagtgtgttgaagaagtggctgagagcttggtgtggatgggtgtactgagtaaaggaaaaaatagtaggagatgaggtcatagaatttatgaagggggcagagccttacagattattataaaacctaagcttttactctgaatgaaacagggaggcaatgtagggctttgggtagcaaagagatgagatataatgattgccctagtccctgtgttgagaatagaccatggtgaggcaagagtggaagcaacgagaccagtaaggagatgattgcagaaatttatatgccaaatgagagaaactcttgagggtggccatacatgcttttatttgtataatagctgtatttcctgatggattgaatgcagctatgagagacagaagaaggagaatgattccacagaaatatatgagatgtaatacaaaaataaaaaataaaaaaaagaaaacatagtgagcaaagaatataaattagtaagcttttaggtaaagctaaacaaactttgcctgcataaaataataattgctttagacattggacactaaaattattattttatgcaggcaaaatttgtttagctttacctacatgctaactaatttatttaaaatgtacataacaaaattattgagcaataattagagtgggtgattattgagtaactaaggtcttgtatttccttgttaacatattgactctaggcttattaaaaaaagaacagattttcaaggtaatctattataaaaatagagtagattgctcaaaaagagtagagaagaaaaatggaatataagtaaacaaacaaaaaatcatcaatttttaaaagacaagaattggaagaaaagaagtatagacacaaagtagaatacgaaaagcaaaattaagaacatagaaacaaatataaatatatcagtatataaagtataaatatgttaaactcaccaattagaatacagagattgtcaggtcagattaaaatatacacatacaaattggagctataaattatttataaaagttatacaacatgtaaggaaacagaacatttgcaagtgaagggatggaaagaatatactagcaatcaataacaaaagaaagtggaagaagacataatatcagacaaaacagattttagaatgacaatgttatggataaaaatgatttagttcactaaaaatatgccaaccctaaacttgttacatctattaaaataacctcaaaaatcatagaattgcaaggataaataaataaatggataatcataaattcgtattaggtataaaccttaggaggagtttttgacgcatctttctactgaacaaatatatcatgatgtcttactgatggacattaaggtcatttctagtcaaaaggacatttaaagccagatgttgccataattatcaagacaaatactgaaaacatttatatcaaatacagtagcatgtttagactattggatccaaataaaatatttgctgtgtaaatatgtgtcttgcctttgcagaaattaccatgctgatcagtttcatatagatatgtatgatgagcacatatagctcctatttcagaaaatcatattttatattattctgtttttctttctttttcaaggaatatggcactgttaccagcagtacaccaatcttcaggaacgcccaagttctgtattaactatctatgacatcgggattcagactaacataagcatgtactttgaactgcaacaaacatggttcacatttagtgagtattttaaaaactggtttcattaaaattgtaataatgagaaaatatctttttgcctaaaggaaaacttgggttggtataacctgttaaatgtatttatcactagtgtcataaaaagtaatgtgtct

SEQ ID NO: 1790 - DNA, 2300 bp, Homo sapien
ttcattaccactgaatcgtggaggagccaagatggccgaataggaacagctcctgtctacagctcccagcgtgagtgacacagaagatgggtgatttctgcatttccatctgaggtaccgggttcatctcacttgggagtgccaggcagtgggcgcaggtcagtgggtgtgtgcaccgtgtgcgagccgaagcagggcgaggcattgcctcacttgggaagtgcaaggggtcagggagttccctttccaagtcaaagaaaggggtgacggacgcacctggaaaattgggtcactcccacccaaatactgcgcttttccgaccggcttaaaaaacggcgcacgacgagattatatcccacacctggctcagagggtcctacgcccatggagtctcgctgattgctagcacagcagtctgagatcaaactgcaaggcggcagcgaggctgggggaggggcgcccgccattgcccaggcttgcctaggtaaacaaagcagccaggaagctccaactgggtggagcccaccacagctcaaggaggcctgcctgcctctgtaggctccacccctgggggcagggcacagacaaacaaaaagacagcagtaacctctgcagacttaaatgtccctgtctgacagctttgaagagagcagtggttctcccagcacgcagctggagatctgagaacgggcagactgcctcctcaagagggtccctaaaccccgagcagcctaactgggaggcaccccccagcaggggcacactgacacctcacacggcagggtactccaacagacctgcagctgagggtcctgtctgttagaaggaaaactaacaaacagaaaggacatccacaccaaaaacccatctgtacatcaccatcatcaaagaccaaaagtagataaaaccacaaagatggggaaaaaacagagcagaaaaactggaaactctaaaaagcagagcgcctctcctccaaaggaacgcagttcctcaccagcaatggaacaaagctggatggagaatgactttgacaagctgagagcagaaggcttcagacgatcaaattactctgagctacgggaggacattcaaaccaaaggcaaagaagttgaaaactttgaaaaaaatttagaagaatgtaaaactagaataaccaatacagagaagtgcttaaaggagctgatggagctgaaaaccaaggctcgagaactacgtgaagaatgaagaagcctcaggagtcgatgctatcaactggaagaaagggtatcagcaatggaatgtggggaaaagcaagagagatcagattgttactgtgtctgtgtagaaagaagtagacataggagactccattttgttatgtactaagaaaaattcttctgccttgagattctgttaatctataaccttacccccaaccccgtgctctctgaaacgtgtgctgtgtcaactcagagttaaatggattaagggcggtgcaagatgtgctttgttaaacagatgcttgaaggcagcatgctccttaagagtcatcaccactccctaatctcaagtacccagggacacaaaaactgcggaaggccgcagggacctctgcctaggaaagccaggtattgtccaaggtttctccccatgtgatagtctgaaatatggcctcgtgggaagggaaagacctgaccatcccccagcccgacacccgtaaagggtctgtgctgaggaggattagtaaaagaggaaggaatgcctcttgcagttgagacaagaggaaggcatctgtctcctgcctgtccctgggcaatggaatgtctcggtataaaacccgattgtatgctccatctactgagatagggaaaaactgccttagggctggaggtgggacctgcgggcagcaatactgctttgtaaagcattgagatgtttatgtgtatgcatatctaaaagcacagcacttaatcctttacattgtctatgatgcaaagacctttgttcacgtgtttgtctgctgaccctctccccacaattgtcttgtgaccctgacacatccccctcttcgagaaacacccacaaatgatgaataaatactaagggaactcagaggctggcgggatcctccatatgctgaacgctggttccccggttccccttatttctttctctatactttgtctctgtgtctttttcttttccaaatctctcgtcccaccttacgagaaacacccacaggtgtgtaggggcaacccacccctacatctggtgcccaacgtggaggcttttctctagggtgaaggtacgctcgagcgtgg

SEQ ID NO: 1791 - DNA, 2300 bp, Homo sapien
ttacaggaggtgatatatcctgaaacgttaaaattagaaggaaaaggtccagaattaatggggccatcagagtctaaaccacgaggcacaagtcctcttccagcaggtcaggtgcccgtaagattacaacctcaaacgcaggttaaagaaaataagacccaaccgccagtagcttatcaatactggccgccggctgaacttcagtatcggccacccccagaaagtcagtatggatatccaggaatgcccccagcaccacagggcagggcgccataccctcagctgcccactaggagacttaatcctatggcaccacctagtagacagggtagtgaattacatgaaattattgataaatcaagaaaggaaggagatactgaggcatggcaattcccagtaacgttagaaccaatgccacctggagaaggagcccaagagggagagcctcccacagttgaggccagatacaagtctttttcgataaaaatgctaaaagatatgaaagagggagtaaaacagtatggacccaactctccttatatgaggacattattagattccattgctcatggacatagactcattccttatgattgggagattctggcaaaatcgtctctctcaccctctcaatttttacaatttaagacttggtggattgatggggtacaagaacaggtccgaagaaatagggctgccaatcctccagttaacatagatgcagatcaactattaggaataggtcaaaattggagtactattagtcaacaagcattaatgcaaaatgaggccattgaacaagttagagctatctgccttagagcctgggaaaaaatccaagacccaggaagtacctgcccctcatttaatacagtaagacaaggttcaaaagagccctatcctgattttgtggcaaggctccaagatgttgctcaaaagtcaattgccgatgaaaaagcccgtaaggtcatagtggagttgatggcatatgaaaacgccaatcctgagtgtcaatcagccattaagccattaaaaggaaaggttcctgcaggatcagatgtaatctcagaatatgtaaaagcctgtgatggaatcggaggagctatgcataaagctatgcttatggctcaagcaataacaggagttgttttaggagggcaagttagaacatttggaagaaaatgttataattgtggtcaaattggtcacttaaaaaagaattgcccagtcttaaataaacagaatataactattcaaccaactacaacaggtagagagccacctgacttatgtccaagatgtaaaaaaggaaaacattgggctagtcaatgtcgttctaaatttgataaaaatgggcaaccattgtcgggaaatgagcaaaggggccagcctcaggccccacaacaaactggggcattcccaattcagccatttgttcctcagggttttcagggacaacaacccccactgtcccaagtgtttcagggaataagccagttaccacaatacaacaattgtcccccgccacaagcggcagtgcagcagtagatttatgtactatacaagcagtctctctgcttccaggggagcccccacaaaaaatccccacaggggtatatggccccctgcctgaggggactgtaggactaatcttgggaagatcaagtctaaatctaaaaggagttcaaattcatactagtgtggttgattcagactataaaggtgaaattcaattggttattagctcttcaattccttggagtgccagtccaggagacaggattgctcaattattactcctgccatatattaaggatggaaatagtgaaataaaaagaataggagggcttgtaagcactgatccaacaggaaaggctgcatattgggcaagtcaggtctcagagaacagacctgtgtgtaaggccattattcaaggaaaactaatttggtggaaagataataaaaataagacatgggaaataggtaaggtgataacgtgggggagaggttttgcttgtgtttcaccaggagaaaatcagcttcctgtttggatacccactagacatttgaagttctacaatgaacccatcggagatgcaaagaaaagggcctccacggagatggtaacaccagtcacatggatggataatcctatagaagtatatgttaatgatagtgaatgggtacctggccccacagatgatcgctgccctgccaaacctgaggaagaagggatgatgataaatatttccattgggtatcgttatcctcctatttgcctagggagagcaccaggatgt

SEQ ID NO: 1792 - DNA, 2300 bp, Homo sapien
tgtgttggttattctcttacaagagctgcttctctgcttagctacaccgcatgcagggagagatcattcgtcggatcttgtgacaggcaagttgctcattggcttctgaagtcctagcaagagagactatccataagcctagaaattggccaaagagaaatgcagtttcttaacattgatagaagaataagatctgttggcaggatttctcaagggacattagcattcatttgtgacatctcatcaaaaggacagtctttcagaaaggccaatggaatcttttacaatccaatattgataatgtttttaacgaaaaaatgctatagttcataatcaatacaagtcttataaatgcaagctggttacattggttataatcacgtcaccacccccacccctgccttttccaatattagtacaacaaagacttcttgctcaattacttaagtgtaaaacttatgtttaggttaatttattcatttattcatttagcacatatttattgagcactgaatatgtaccagattctgtgcaaaacactagggatacggtaatgaacatgatagacaatgaagtaagaggaggcctggaagaagcaggtgacaaataatatgaaccagaaaatttcacatagtgattaataccaggagaaataaaacaaagtgatgtgcgagcaaatgattttgaggttactttagattgtctggaaaggtggcatttgtgtcgggaaacaagtgatgaagagtaatttgcatgccaagaactggaacataacacttcaggccttaaggtagaaatgaggtggtagcttggcacattcacatacaaaaggaagaggtgtaatgtgtaaggaagagacagttagggagaagccaggcctttttggtcataaaaaggaatatagagtttaagtgcaatgagaagccattggatattcacttgctatttggggatacattcctctcctggaagattatttcagggagaggagcattcctacatcaactccctaggccaactaaggtgacctaatagacttcacttttctaaaaggtccagttatactcacgttattttctcttgctattcaccagaatacctatgcaatttcaggctgagatattgatagcatctctaggaatccctgcttagaaaacaattctagagagaatgaggattaatttaacatttagtacaagatgataagattagtcacttccctggcaagcctttcaatgcaagtaagtcttaggaaaaacatattgtaatggtagagggggattctgaggggtccagaacatgactgtgcagtaggcagaatgtggaaggcagcatgaggggctcctagataacagaaaggggtccacagaaggagaagagtgatgtttggaaggggacatgagaaagcctctaaaacaacatcagccaattcgtgattttgccaagtggaagcctgatatgagcatgttccaagagaaacattctcattcaaacacagaaaaagtttaaaccagggtacttttatgcttttgactgatctttttataatgaagcatttgtaacaataaaagcacacagatgtttacaaagtctctttgattttacttaatcactgtcaggttgttctgatggattacagacctcacaaatgaaaatagcatgaacatattaatgataactgctgtttgttggaggtagttgcttgatagctagttaaggaaatcatgctcttgggtctcattttactgtagagatgttggtaagtgggatatggggtatattggatgattttctttcccctaagcatttgtgacaagaaggtgctatgatattcaggaaagacacaaataatagtagattattttaaaggtaatcatggcctacttccacctccaaactacctacttctttgccaaggattaacaatgaaaaaatatactatagctccaggactttgttcagtctcctccccctctttatactccaagtgactcctttgaggctagcaaggctagtaggacctcagggattacctaagaatggggtatggcccttagtgatactggaacacaatgtgtttatgacatcagcttttttttcacagtagtgaatcgtagcatgttagagttagaaggttcagtgttgatggagttattgaagaaatgatggagtaagaggtgagtgatactgctaaatgcaagaagtctatgtctgtaggaaaattggtcaagtttgttattcataagtacgtattctatacaactcaagaaatacacacacacacacacatatatatagtg

SEQ ID NO: 1793 - DNA, 2300 bp, Homo sapien
gctgagggtagttacgatctaggcacaaatgtttcttatgattaggcataattgaagcctgtcagtaacaatatgaacctgtgatcaattaagcagctgaccaatcgttaccacctcctccctgctcctgttacccaaaaaataggaagggctgtggaagctctgtggctgcctttgctcacgagaagcagggagctctcttcttcttcccctggccctttccttaaaacagttccttttgtcttaagttatcatttctacgttcgtcccttcatttgatctcacaatgatggtctcaagcagtaacagtagtaactgctgtaacgatggtctcaagtagtaaccgtggcagttggccacactaacattctttgatatctgttggccgtaataaagaaatcaatgtactttgtgctcttagctgccacattttagcctagatatttgccctggcatgcttatactggtccaaggaagcattaggccatagcctgttttcttccttatctggaggtgtttttacctttctcagcattccacaagttgcttcctccttcctttgttctcctctgtctttgcctcttttggaaagttctaagttgctagccaatcaggacaagtacagaggtccccttccagccaatggaaaccggacacggtagtagggtgcacgtgtcaggttataaatgaccctgtctcctttatgcgtgtgtgctctcgtggcaagactactagcgagcggcaacctttctgcagaaagtaaactagccttgctaagagctcctttgtctcagtgttgatttttgcaacactgagcgcccgttcccaacatcagtaaggcttttctttttaatgaaaagcagccccaaatccttttctaagagcagcctgtgaagtcgagctgcaggcacagacaaacaagggggtagcttgcttgggtgaatggtggcaggaactaccgactagacatgtttaagatgagggctccatcttcgcttctctgccagccacgtgtacagtaagaaggggttacaataggcatatgggtgattttgtgcttttcgttcatcttttctgtgtttaaaatgttcagaataagaaattggaacaaaggagacatgaatagacaattcctaatcatctttaagagtccgctttgtgttttacttaccaccaccactttgaaggctttcttgcctataccaggacaaactcagctctttatcccttttccgaattttcctggtactttcactttgaatatagcgcttaattaacattctgccttgtacctaggactaacacactataaattcccagaagacaaagtaggggaatacaataacaggatatagaattttaacagctaaattagatgaatttatgggtgacctttattgggcaaaagaaaatgttaagttagtataagatttagtataagctaccatctcaaaactcagggtctcactggaagagaaagtgactccaggtagaattcctcagggagacattcacttccatcattcgctgaaccaggagctttggacagcctcggattgcacccgcatatccaaggacaccacatcagcggacaagtcataaacagccttgggaatacgcggaaaggtcaaatttacctaaacaattaaattctcttttaaattttaaggaaacacaagtatgctttcgctttaggtagggcatttgagagcaaaatgtactaatactttgaatccgccaagcagacacgatctgggtttgaccgttctctccgggtaaaggtgaaggctgaccacgggggccgctctccctccaggccccagccacgccctctaacccaggttcccgtcctgcaccgcgccgcaagtccccccaccgttcagcgcaaccgggccctcccagccccgccgccgtccccctcccccgccctggctctctttccgcgctgcggtcagcctcggcgtcccacagagagggccagaggtggaaacgcagaaaaccaaaccaggactatcagagattgcccggagaggggatgcgacccctccccaggtcgcagcgacggcgcacgcaagggtcacggagcatgcgttggctacccggcgccggggaccgctgccaccccgcctagcgcagcgccccgtccttccgcagcccaaccgcctcttcccgccccgccccatcccgcccacgggctccagtgggcgggaccagaggagtcccgcgttcggggagtatgtcaaggccgtgacccgtgtattattgtccgagtggccggaacgggagccaacatggcagcg

SEQ ID NO: 1794 - DNA, 2300 bp, Homo sapien
cggggtcactttggaaaaaggtgggattcccgcggtaaatatttggagggtttaccagagaaagaaaaacgatattctaaagagaggatgccggctataacggggtcgcctgacgggaggatacggaaaatgaaacgctaggctacgttccgtccggtggtaggaggcgtgaaagcaggttgggggcccctaggctggctccttcctcagcccgacttcccactcctcccggccgcacctatttttggcccagggccccctgctccgacaccacaatacccatgttccagccccaccgcaccgctgggctccctctcaccctgcagcatcgcccgaaccccgctgccatgttggctcccgttccggccactcggacaataatacacgggtcacggccttgacatactccccgaacgcgggactcctctggtcccgcccactggagcccgtgggcgggatggggcggggcgggaagaggcggttgggctgcggaaggacggggcgctgcgctaggcggggtggcagcggtccccggcgccgggtagccaacgcatgctccgtgacccttgcgtgcgccgtcgctgcgacctggggaggggtcgcatcccctctccgggcaatctctgatagtcctggtttggttttctgcgtttccacctctggccctctctgtgggacgccgaggctgaccgcagcgcggaaagagagccagggcgggggagggggacggcggcggggctgggagggcccggttgcgctgaacggtggggggacttgcggcgcggtgcaggacgggaacctgggttagagggcgtggctggggcctggagggagagcggcccccgtggtcagccttcacctttacccggagagaacggtcaaacccagatcgtgtctgcttggcggattcaaagtattagtacattttgctctcaaatgccctacctaaagcgaaagcatacttgtgtttccttaaaatttaaaagagaatttaattgtttaggtaaatttgacctttccgcgtattcccaaggctgtttatgacttgtccgctgatgtggtgtccttggatatgcgggtgcaatccgaggctgtccaaagctcctggttcagcgaatgatggaagtgaatgtctccctgaggaattctacctggagtcactttctcttccagtgagaccctgagttttgagatggtagcttatactaaatcttatactaacttaacattttcttttgcccaataaaggtcacccataaattcatctaatttagctgttaaaattctatatcctgttattgtattcccctactttgtcttctgggaatttatagtgtgttagtcctaggtacaaggcagaatgttaattaagcgctatattcaaagtgaaagtaccaggaaaattcggaaaagggataaagagctgagtttgtcctggtataggcaagaaagccttcaaagtggtggtggtaagtaaaacacaaagcggactcttaaagatgattaggaattgtctattcatgtctcctttgttccaatttcttattctgaacattttaaacacagaaaagatgaacgaaaagcacaaaatcacccatatgcctattgtaaccccttcttactgtacacgtggctggcagagaagcgaagatggagccctcatcttaaacatgtctagtcggtagttcctgccaccattcacccaagcaagctacccccttgtttgtctgtgcctgcagctcgacttcacaggctgctcttagaaaaggatttggggctgcttttcattaaaaagaaaagccttactgatgttgggaacgggcgctcagtgttgcaaaaatcaacactgagacaaaggagctcttagcaaggctagtttactttctgcagaaaggttgccgctcgctagtagtcttgccacgagagcacacacgcataaaggagacagggtcatttataacctgacacgtgcaccctactaccgtgtccggtttccattggctggaaggggacctctgtacttgtcctgattggctagcaacttagaactttccaaaagaggcaaagacagaggagaacaaaggaaggaggaagcaacttgtggaatgctgagaaaggtaaaaacacctccagataaggaagaaaacaggctatggcctaatgcttccttggaccagtataagcatgccagggcaaatatctaggctaaaatgtggcagctaagagcacaaagtacattgatttctttattacggccaacagatatcaaagaatgttagtgtggccaactgccacggtta

SEQ ID NO: 1795 - DNA, 2300 bp, Homo sapien
tgagagggagcccagcggtgcggtggggctggaacatgggtattgtggtgtcggagcagggggccctgggccaaaaataggtgcggccgggaggagtgggaagtcgggctgaggaaggagccagcctaggggcccccaacctgctttcacgcctcctaccaccggacggaacgtagcctagcgtttcattttccgtatcctcccgtcaggcgaccccgttatagccggcatcctctctttagaatatcgtttttctttctctggtaaaccctccaaatatttaccgcgggaatcccacctttttccaaagtgaccccgtctctgtgtcagaaccacgggaaaaagaaaaatggagcagctactccttgaaatacttaatgtttaataagcttttcgttgtaacgtttccacgttgcttacgggaaaaaaaaaagtaaaaaaaaaacctgcagaattttatgtgaacttgtgtgtatattctagtattggatcttaatagattctaaataagtttgtcactagatgaattttggtatcttaaatattcttgatatgttcacaccactgccatttagatgtcacttaaaattaagttaaagttatgtcttggaccaaaaaagctgcggttttagaataatcctaaagaattgctgcccatgttttgctggtgttatgcaagttaatgtgcagtgaaggcagaaattgggagatttcagctatttttaactcctacaccagaaaagcagatttctcaacctccaaggaaggatctaaaaaaaacctgatatagaaaacttacaccctttttctcttctttaacccataaaactgacactcttatattcccaagaaatgcacaaaagtgttcaattctagtggtgctgtttcgatatttggaatttcattgttctagacagagagcccgaagtaataaaaccaatagttatatagcattaggctttcaaaacattatcgtactttaatcgtccgaaaatacgcagtgagattagtcccattttttggttttgaacggaagctataagcagtttgtaaacctgtctacggccacaaatatggttgtggaacctagattcacattcagcaattataactccagatcccgtgctgtttctgttttctatttgcaaaccacctctctaattaactggctaactttgttatgtaattaacaggttgatgggcattgtattctggtaatagcaacctttgcactttgttctatgtaacatattttcctgaacagtcacatgtgaagtgactttttccctatttaaattccctcggttggccaggtgcggcggctcacggttgtgatcctagcaccttgggaggcctcggcgggttgatcacttaaggccaggagttcgagaccagcctggccaaagcagggaaaccctgtctttactaaaaataggaaaaattagctgggcatggtagcatatgcctgtaatcccaggaggctgagtctgcagtgagcggagatctctccaccgcactctagcctgggtgacagagggagactctgtcaaaaaaaaaaaaaagtccctcagtagaccatttaacctggtttgagttctgacttttgtgcatggtatttaaaaacgcatttataatagagtcaggttttttgttctgatttttgtggaatgttttcctttgttatggaacctagtgaccaattaggatactaacagaaagatcagtatagcaaggtggttaatagcatgcgctcttgatagtaaatgttagaatcctggttgcactaatagtagagtgactttgcctaatttagttgactttctgagccttcgtttcttcacatgcgaaagtggaataaaagtaatggcttaatcctagacttgacctgggattcagtgaattaacctgtgtaacgcgactgtaaatcagagtagatttggtctgtgactgctggacaataagcaccagagaaactgtttcacttttttttttttttttttttttgagacggagtcttgctctgtcacccaggctggaatgcaatggtgcagtctaggctcactgcaacctccgccttccgggttcaagcgattctcctgcctcagcgtcccgagtagctgggactacaggtgcgtgccaccacacctggctaatttttgtatttttagtagaaatggggtttcaccatgttggtcaggctggtctcaaacccctgacctcgtgatccgcccacctcagcctcccaaagtgctgggattacacgcatgagccaccccacctggcactgtttcactttcaaa

SEQ ID NO: 1796 - DNA, 2300 bp, Homo sapien
aaaaaggatgagttcatgtcctttgtggggtcatggatgaagctggaaaccattattctgagcaaagtatcacaaggatagaaaaccaaacaccgcatattctcactcataggtgggaattgaagaatgagaatacctggacacagggcagggaacatcacacacaggggcctgtcatggtgttgggggaggggggaaggatagcattaggagaaatacctaatttaaatgatgagttaatgggtgcagcaatccaacctggcacatgtatatccatgtaacaaacctacacgttgtacacatgtaccctagaacttacagtataatttttttaaaaaaagtaacttccaatatttttactattagcactctccgaagaagtgtttgtggtggcggtggtggtggtggggagggtggcctgtgtgtgtggcgaggagagggggcgggtacagggctggaccttgagatagataaggcaaacaggaaggaaatgtgaacatttcattaatattcatttaaaaaatattcattgaacacttactacgtgtaagcaggcactctactaattaacagccatttcagattttcagagtgcaaagggcctcaagaacaaatgatttatttttttgagacatggtctcgttctgtctcacaccctgcagtgcagtggcattatcaccgctcactgtagcctccaccccctgccccacagctcaagtaattctctcacctcagcttccccagtagctgaaaccacaggcttgggcaaccacgtctggctcatatttttattatttgtagagacgggggtcttgcaacattgcccaggctggtctggatctcctggaaccgcctttgcaaaattataactgaggaaattatggcagtgaaagaaatcagacctaacggattccatcttgcttctaacttttgtttttgagactagtctcgctctgtcgcccagggtggagtgcagtggcgtgatctctgctcactgcaagctccgcctcccgggtttaagccattctcctgcctcaacctcaggagtagatgggactacaggcgcccacccccacgcccggctaattttttgtatttgtagtagagacggggttttagccaggatggtctcgatcccctgacctcgtgatccgcccgccttggcctcccaaagtgctgggattacaggcgtgagccaccggccgcttctaacttttaagctgtccttcttcattcctgagcctaggctgaaccaatttagggaggaattcagtttatggtttgactctgaaacaaaattgataatatccctttcccaaaaagaccgcttttttgcctggggaccagtctgcctttgcagaaccaacagattagctacaagattagaaattacagtttagaggtcatgcagcctctggctccaagtttctgaacctccccaaattgctcctggggataacatcactattgtaaaacctaagataagttcttgagatattttgcagaccctgctctccatggatcagttgaaaccacccagattggtaatttggctcaaccagttctgccatcctacccaggaacagaaaacagcaagaaaaactcacgtctacccactatgagtccatctccaacctgacccatcagcactccctacttcccaagcccctaatcgccgaattatctttaaaaactctgaatactgcttggggagactccattgcaagtcccctgtcttgataaatgggctatcggtcagcagcaggcaaagtgaaccacaatattgggtggttacactcctaggatcaagcaatcctgctgtccggcttcccaaagtgctgggattacaggcgtaagccaccgcgtccagctagaacaaatgatttcttaaaagcaactcagatatttaaatattatttaaaactgtttctagacaaatcggagtgactatgggacaagcatatggtcgcaggactttggacgcaggcagtgaggacacctatgagcgatcagtggggtcctacggcagccgtggaactgctctgccttgcaggcgaaagtgtggtcagctatatcggagcgcgatgggggcctgagaggcgcatctgcgcaggcgcccggctcctaagtctacccaggaactgaccctgctctctcctttccctgttagacatggtaagtgtgagtttagcgctgctgtccggatgggttggtagcagacagggtggagtagggttaagcacactggtcaccttaggattggtttcctggtgctggagaatggttaggacacaggcctt

SEQ ID NO: 1797 - DNA, 2300 bp, Homo sapien
tcattaatattcatttaaaaaatattcattgaacacttactacgtgtaagcaggcactctactaattaacagccatttcagattttcagagtgcaaagggcctcaagaacaaatgatttatttttttgagacatggtctcgttctgtctcacaccctgcagtgcagtggcattatcaccgctcactgtagcctccaccccctgccccacagctcaagtaattctctcacctcagcttccccagtagctgaaaccacaggcttgggcaaccacgtctggctcatatttttattatttgtagagacgggggtcttgcaacattgcccaggctggtctggatctcctggaaccgcctttgcaaaattataactgaggaaattatggcagtgaaagaaatcagacctaacggattccatcttgcttctaacttttgtttttgagactagtctcgctctgtcgcccagggtggagtgcagtggcgtgatctctgctcactgcaagctccgcctcccgggtttaagccattctcctgcctcaacctcaggagtagatgggactacaggcgcccacccccacgcccggctaattttttgtatttgtagtagagacggggttttagccaggatggtctcgatcccctgacctcgtgatccgcccgccttggcctcccaaagtgctgggattacaggcgtgagccaccggccgcttctaacttttaagctgtccttcttcattcctgagcctaggctgaaccaatttagggaggaattcagtttatggtttgactctgaaacaaaattgataatatccctttcccaaaaagaccgcttttttgcctggggaccagtctgcctttgcagaaccaacagattagctacaagattagaaattacagtttagaggtcatgcagcctctggctccaagtttctgaacctccccaaattgctcctggggataacatcactattgtaaaacctaagataagttcttgagatattttgcagaccctgctctccatggatcagttgaaaccacccagattggtaatttggctcaaccagttctgccatcctacccaggaacagaaaacagcaagaaaaactcacgtctacccactatgagtccatctccaacctgacccatcagcactccctacttcccaagcccctaatcgccgaattatctttaaaaactctgaatactgcttggggagactccattgcaagtcccctgtcttgataaatgggctatcggtcagcagcaggcaaagtgaaccacaatattgggtggttacactcctaggatcaagcaatcctgctgtccggcttcccaaagtgctgggattacaggcgtaagccaccgcgtccagctagaacaaatgatttcttaaaagcaactcagatatttaaatattatttaaaactgtttctagacaaatcggagtgactatgggacaagcatatggtcgcaggactttggacgcaggcagtgaggacacctatgagcgatcagtggggtcctacggcagccgtggaactgctctgccttgcaggcgaaagtgtggtcagctatatcggagcgcgatgggggcctgagaggcgcatctgcgcaggcgcccggctcctaagtctacccaggaactgaccctgctctctcctttccctgttagacatggtaagtgtgagtttagcgctgctgtccggatgggttggtagcagacagggtggagtagggttaagcacactggtcaccttaggattggtttcctggtgctggagaatggttaggacacaggccttggaaggttttttgagtgtgaaatattactcagcgttttctgcagacctcgcgggcaatgccgcttctaattttatccaggccttcttctgtagggagggcctgttaagagttgagcagcccgatttctgaacccctctaaaaagctgtggctgattggtggcttttttttttcttggagagggggtgtcaaagatttctttaaaatcgttagtgatgtggtctcgctttaagatttttaatgggatcagaagaaaattcggtacttaatcacttccggtaatcttcatgacctgttatagtgactgcagtgtactctcaatgaggaagatatagatacgaaaagaactagagccgcatcacatggggacttctgcaaatacagagactcggattaaaggtggagaagatggagctaaaggaactgcttatttaatacatttgaacaacttttggggtacttagaaggtgctttgaaacctgcatttgattaagcaagaatt

SEQ ID NO: 1798 - DNA, 2300 bp, Homo sapien
gtaaagttttttaaaaactacttgctggaaagggaaaaatatttaaaaaaaaaaactttacaaacttgctgaatatttgagtggagggagggaatagaattttatttgataaacgtagataatctctgctttagggatgaacacagtgcaggccagagagaccagctgcttcatgggatgtgaaaaatctacttttataaagtagggtaagtttatttcattattagaaatggactaatactttgggttctattagttttcttctctttggttttcttctctttctgggctttctttaagcagcttaagataatttgctgttacttttttgtggcagggtcttggctctgtccaggttggagtgcagtattttgggagacagttgctggggctggagagctctgttgcccaggctggagtgcagtggtgcaatcttggctcactgcaacctccacctcccaagctcaagcaattctcctgcctcagcttacagagtagctgagatgtgcaccacaacacctggctggtttttgtgtttttagtagagatggggtcccctggcctcatgtgatcctcctgcctcggccaccaaaagtgctgggatttcaggcctgagccacaatgcccagccccacctaattttttttaaaaagttttttgtagagatggggtcccattatgttgcctcggctagtctcaaactcctaggctcaagtgattctcccacctcagcctcccaaaatgttggaattataggcaagagctactgtgcctggtcaatttgctgttatttttgacaaaggaattttcttgggaagtaaaggcacttcagatttagctttcctcctgactaccctaaagtgaaagttaagcttgaactcaatttaaagtggtagttgtgcagtgtttgtttttagatgactcatgtatgatttggtaacacctgccttgatttgatctatttttattgtaggagaaattgacacaagattctctttttgtgcggtggcaactttggctttgttggtaagctttgaatatttgattgaaatgattaaagttcatgaatactctggaattttttttttttttgagtctgatctgctgaatactctggaatttaacaggcatctttttttttgtttgtaggggaagcttgatgctattaatgtggaaaaggcaatcgaatttgttttatcctgtatgaactttgacggtggatttggttgcagaccaggttctgaatcccatgctgggcaggtaatttatgaatacagatgaaaatgtattgtcattttggaagccagtgtagtaaaataagaaaattggttatttcagtgtttgtcaaatacacataaagttaattcgactgtaatagggcatcttacataagaattgcttaattgctatcattactttgctttatatactatatacctttctctgtcggtggattcgtctgacctaagcaaacataagtgggtttataagcaccaaaacacttttgttttccattaatttttcactaaccatacagataaaaaaaaaaacaacacatttttctttctttcctaagataaattatgaacctcttttcttgtgccagagaacactgaatatgtgaatggatggctgtgaaatactagccatgaagaaattttgacaataatatttcagtgcagaattgcatactagtaatagtatgcttggattttttcagatatgtggtattaatacatgtttggaattttaagtgtcagatcaagaagaaaaacttaagatataaagtggtgttttaataatttgagttttatcacttttaatgtcaagaaattattatacacataaactttatgtctgtaattttagatctattgttgcacaggatttctggcaattacaagtcagttgcatcaagtaaattctgatttacttggctggtggctttgtgaacgacaattaccctcaggcgggctcaatggaaggccggagaaggtattgtttgataagccatattctgctagctttagaaccttgagtgaatgctgctgctttgtcttgcctgtttctatattgtaaattggccatgagcttatttattacctttccctgttgtgaattttcagtaatatatcctactaaaagactccccttgacaaagtagacccccatgagttgaaatactcattgatcctaatgtccatttccagacagtcttgtacaggaatctccatgtttaaggacagttgattttggcaaattggattttttaaaaattagactacagaatttttgtttgc

SEQ ID NO: 1799 - DNA, 2300 bp, Homo sapien
tataattatacatattgtaaaataaagaccggtattttattttctgctttttattctgaagtcctgttattctgactacagttctttgtgtatacttctgtgtctgttatgttcaataactgagctaacataaaataactctaggtttctacttgatttttcccccatgtatacctttcatctgttctatagcaagttgatgtaaattggtttgtcaacaagaatgttaactgatgaaagtggatagaacccatacatgaattaaatgatgcacaaaataaatggctgttgaaatttggaaatgattgataggtttgaatatggttattctgaattggtcacagacttaggttaaatggcaatctaccatcttaaaatggggttgtgattcggactgtcctttttttttttttttttttttttttttttagcattttatatatcagaattacccaaagaaggagttgtcttcaaataaggaaacactaacgggtaagttgatggtcaccacagtatttttttgcacctgtctttttcttaaaaagctaaaatgggtacaatcactcttttttatttttttgtgacagaatctctgttgcccaggctggagcgcagcagcacgatctcagcttaactgcaacctccgtctgccgggtttaagcaattcagccgcagcctctcgagtagctgggactacagccgcacaccaccatgcccggctaatttttatgttactttagtacagacagggtttcaccatgctgaggagctggagaccagcctgaccttgtgatccacccacctcggcctcccaaagtgctgggattacaggcgtgagccaccacgcctggcctaaaatgagtacaatcactctaggggtttacagttttggtgaaagtgaggtattctctatttttaaattttattttttagagacagggtcttcctttcttccccaggctggggcatagtagtgcaatcacagctcactgtaaccttaaactcctgggctcaagcagtccttccacctcagcctcctgagtaccagggtctacaggtacctgccaccatgcccactatgcccagctgatttcttaattttggggacaggcactgtcttccccaggctggtctccggaggtgaagtaatcctctggcctcagtctcccaaagtactgggattacagggaggagccatcgtgcccgatctgaaaataaggttttttgatggaaattgagatttttctcaagtatgtttggaatgccctgtgcaataatcattccaagaacagagatgttcttaaggactgttgtcactgcatgtgggtaaaccgctgtgcataactggtttattgagatactcaacagtggcaggatttcagtagtggtgtaaattaatgtcttctaatagcttctgtatggcagtatccagataatttcgtcatgtttaatccatggatctctggtaagttggtactattggccttatttaaggaattttctaaaggtcaccactgcaaagctggagtttgaacttctagtgtgccattaactgatttatatgttagaaaccacagtactagaaattggtagatggggaattgttaactgagagatcttacccagtcagtctttccctgtttcctactctactatgcacacagccatgtgcatactatcttttgataatataactatctttcctatatttggtcacaagatcaaccttaggtgggttatgctgtgtgagcattacacgttctcattgtgtcaaaggcactgggtgtactgtgttgggtggtttctacatttaaagataagctagtgtgcttggacgtgtgggaaatgcatgtaacatttgcaataagggagattgggtgctgtgagaataatggggctaacaaatcgggtggtcattgatgggccttgcagagttctggtcagtctgatacctgcaggctgaggatgttccagtgaggttcatgtggaaagtgatgggtttgggaatggctggaagcagggtcatagacctgaagtacgtgaatccatgtggaaagctgagcctgcctgcgcctgcgcagtgcagcttagtgcgtcggcgcgcagttctcccgcccgtttcagcggcgcagcttctgtagttgggctactggaggggtcgctcagaaacctcatacttctcgggtcagggaaggtttgggaggatgctgaggcctgagatctcatcaacctcgccttctgccccggcggtttccccgtcgtcgggagaaacccgctcacctcagggtccccgctacaat

SEQ ID NO: 1800 - DNA, 2300 bp, Homo sapien
ctagccctattctctttgggttcaaattccagctttatcacttactagacaaatgatcttgggcaagacacttcagctctacatctcagcttccttatctgtgaagtaagaattaaaggagttaatatataaagcatttaaaatagtaccggatatgtaacaagtaggacatagagttagcatgtatgaccatatatggtcatacaaaggtaataatactacgttgttatagaaataaaaagtaactcatagagcaagatatgtgtaatgtatcctatttgtataagaatgacaaatttttttcagattaggtctctgtattcttttaaaaaaagaaaattttatacacacataagcaaaagcatttgaaaggctatacataaaactgctaggatgattatctcagggaggaattgttgctggctctatagtgtttcaattttttataagttttatgtattgtattaagaaatcagtaaaataatttaatttaaaaaatattttttgaggcaaaaaaagtaaaacagaaaaagtgaaagaaaatgacaaaacttggttttcagaaagatgacaatatgtagttagtttaattaggttgtccagctgggaaaagacagtttagagtttacaaaataaaatgcaatattagtagatgtatattatagtaaatctaaagtaataattttttcttactaaagagacatcattcacatgatttaaataaaaatatgccaaaggaaaaagaatatatttaattacctttaaaaacgctaatacatacatccaaggttgttaagactgatcactctgtgaatagtataaaaaggtggctgaaacattaactacagaataatgataaaaacaaccataacatctttcccctttattgtagtggggcaaggacaccatatcaagcttgaagtacctttaatgttcaaattgtatacattctgcctggtttatagaggaataatttctgtaaaatttaaaattctaaaaaaaggtcagatgcagtggctcacgcctgaaatctcaacactttgggaggtcaaggcaggcggatcatgaggtcaggagttcgaggccagcctggccaacatggtgaaaccctgtctctactaaaatacaaaaattatccgggcgtggtggtgtgcacctgtaatcccagctactcaggaggctgaggcaggagaattgcttgaacctgggaggtggaggttgtagtaagccgagatcgcaccattgcactccagccaaggcaaaagagtaagacactgtctcaacaacaaaaatctaaaacaaagtctttaaattttggttaatattgtatgacattctttctctttgggaatgaatatattggcaggttacttaacctatgtaagcttcagtcaggcacagtgcctcaagcctgtaatcctagcactttgggaggctgaggcagggagatcacttgagctcgggagttcaagaccagcctggccaacatggcataactctgtttctataaaaaatacaaaaattagccaggcatggcggtgcatgcctgtagtcccagttgtttgggaagttgaggtgagagaaagcttgagcccaggaggtcaaggccgcagtgagccatgatcgtaccactgcactccagcctgggtgacagggtgagaccctgtctcaaacaacaaaaaaattatctgtgtaagcctcaatttcctcaactacaagataggggaaataatcaatgaggattaagtgagagcatacagtattcatgcagaacatgagaacaacacttgaatttattcactctagcaatcattgtctgcttacataatagcctacaaaggataatcaatgtatttattaccattatttagtctactgaagaaacatgcagaacttgagaaaccaggcagactaccttgaactgaattcttagaaaattaaatatattgtatcttagctttcacgtatgtcatttctgtccaatatgtctctttcaaatgtcaccagttacatacaatatcccctctgacctatgctggtgacctctacctattgtggaggaatctccacctattgtgatgtcatccagtactttatggtaatatttattttttctggttacagtttaaagggcacttctgtttgtggagtaaagcctgccacattgtcaaaatatgtaactggaggattacagtatgcttacctctgattttatttctacagtgctgctataagtaacaatgagtaaatctactaaattatgtggtaagacttcttgtccaagaagcaatatattctgc

SEQ ID NO: 1801 - DNA, 2300 bp, Homo sapien
gtcataacatgttaaaagtttgctccgttggtgttcatcctcctgagacacccaaggctgatggcaattatcctattcatcttctcccacaagtctgtctttagcggaagatttttttctttacataaagagctatcatataaaaagtgctcatagtgccagaaattgaggtaaatgcaatttgcaaacattattatctcatttaattctcttgaggatagataatattagataaggtaaggattaaagagaggttaagaaacttgatcaaggacacccagcagggaagtacttagcagggctgttcactagggcctgctgtttctctttccagatgtacagactttctagagagaacgatgtgctctgcccaccctcacccctttgctctgctgttctgccagggacatgcaggagacggaggccttcctcttaaccgcaagaggccttccttttttactaatattcctcagcacagaccctttacgggtgtcgggctgggggacggtcaggtgtttctctttctccttcctgagatctttgcttccaatttggctaaggccctttccatgttatagtatcatgtatctcttattcttgtctttctcacttaactgtgagcccaccttgatgttagatattctgaaagtcattctcctatccctgaaaggtcttcaataaagatttttcctccacttagtggaaggtgaataaagtttattcttccatttagtagtggctcaataaaaaagtttgtggaatcaatcaagggatgagtaaatgaatgaaatactgaattttcctggcctatgaaggaccatgagctaaagcagcggtttaaagtatatagtcccaaacaaagaattcttactaaaaacacaccggatctgtaaggcagaggagggaggggcgggaggaagaagtcgaagagcagggtgtggtattccagggagactgaagacaggagcttcccatgggacaggcagttcatccacaggctcagcttctgcaacctccttcctgtggttactcctgctctctaagaattctgcatgttctcatcaagaaaataccaaattccttgaaagcctggattctgccttgtggtttgtgagccaatctcatgacaccaccagcccacagtgcttttcctgattccatggaggcaaactagacggagcttctagcaagtgaaacttcttttgggtagatatttgggggccgcttttaaaatttttctgacagaccaagtggtaaaaatctgtgtgtgtacacggaatgctctctcccttctgcaatgcgtttactctccttgtagaaataactgcttctcttagccggctcttgcttggagcagggaagagcaaagtcctatcatgtacacatacacagtttataaacatatactgtacaatcaacatgtacatatataatacaatatacacatgtgtgcatcctgtatctgtatactgtatatcatgcatatacaatttcataaacaagcttgtaccaggaaaaggcaataatttatatattatacacacatacatgtatatgtaaaatatgtacacacacacaaaatataccatacagagtgtaaggttcatgacgtctttctttcgttgatatttgtgctcacttattagcggtaaattattaattttagataagcccatcacagagtgaaggctcaatccttgaacagcccagggagaacttcgttgctacttttgaaaagccctttgatgtgcccaaagtctccagaagggcgatgccaaacccactcaactttgacaaagtgtgaaacgtctgtaaaaaggagttctctgatgtgtgagaggagacggaaccgagaagaaaaggccgtactctgccccccgcgggacccaggtccccgcctgctgcagagcgcactctgcgcacgtcgagccgcgaaaggttcacagaagaaaacaagagaaagaagtagcaggcactgaggagccgccggcgccggcgcccaggacggcacgtgacccgggggcggggccgcgcgggccgcgggccagtggatggggacgggggcggggccgcggctcggggggcggggtctgtggcggcgcagcttacaccgcggtccccttatttggatctgcgggaatgtgggctggagaggtcctgccgtggtaccagcctccagcctgcccccaggactgcccctgacccaggcgcgcccgctgctcggtggcaggagggccggcggagcgccatggcctgcatcctgaaggtaacgacttggatctgtggctcggacgcgtggt

SEQ ID NO: 1802 - DNA, 2300 bp, Homo sapien
gtcaaatggtatttctggttctagattcctgaggaatcaccacactgtcttccacaatggttgaactaatttacactcccaccaacagtgtaaaagcgttcctatttctgcatgtcctctccagcatctgttgtttcctgactttttaatgattaccattctaactggtgtgagatggtatctcactgtggttttgatttgcacttctctaatgaatagtgatgatgacctttttttcatatgtttgttggcttcagccaaaacagataaatagacaaatggaacagaacagaggcctcagaaataatgccacacatctacaaccatctgacctttgacaaacctgacaaaaacaaacaatggggaaaggattccctaattaacaaatggtgttgggaaaattggctacccatatgcagaaaactgaaactggaccccttccttataccttatacaaaaattaagatggattaaagacttaaacataagacctaaaaccataaaaaccctagaagaaaacctaggcagtatcattcaggacataggcatgggcaaagacttaatgactaaaacaccaaaagcaatggcaacaaaagccaaaatagacaaatgggatataattaaactaaagagcttctgcacagcaaaagaaactaccatcagagtgaataggcaacctacagaatggtagaaaatttttgcaatctatccgtttgacaaagggctaatatccagaatctatgaagaacttaaacaaatttacaaaaaaaaaataaaaataaaaaaataaacagccccatcaaaaagtaggcaaaggatatgaacagacatttctcagaagaagacatttatgtggccaactgtcccctttaacaaaacaaaatttcttttggctttccatcacctagcaaacttagtatagatgtattagcttgatatctgaggcaattcagaataaagttatcatttgtgtttctagctttttctccttcttcgtgctccagtaagacaaactactgtacgcctatgagtaactgtatgtattcttgtctgcgtgctgtttcctctctctggaaagctctgttcacacatatctgtcaattaaaacacatgcattttatcaagctcaatttcaaagacatctttgctttctctcttctcaatcggatgcagttgttcctgtttttcttccatggcagtatgtttagaggaatgttctgctgcttggcataatttttttttcctcttgttacttttttgaatcttacttttgcaaatcctatagcacaggcagagtttcctactcatacagggtgctagatacagaaacagaagaatgagtgataatgatactgtgtctacaagaatgtgaacatccattcattcatttatttattcattcatttgtttcactcaaatgttctttgaatgcctgtagtatgtaaggtaccatgttaagagcctgggatacagagatcaagatgacacagtacattccagttctctaagaactcacaaatccatgtaggaaaatcacataaataattacacagtgaaaaagtacaacaatagaagtgtctttaaattatgggaatgatgggactttacctctgttagagtggataggttgggggtcaaagcatggtggtgaggaggggattgagcaattagaaaaggtttcctgtcattggaaatgtctgattggggttttgcaaactgaataggagtgtacaaggaatatagtgagataaggaagggtggagatgcaatggaagagttcaagaaagcagctctgcttgctctcagcagcccagcacactaggacaatttggtcaccaaataattattttccatttccaggtaaaatatgctgaatgacagaatccttcgacccctatgaaagaaaaagagaagaataaaggaacctccttctgtgactgcctttggttgaaagtcattcgttcttctttttgtttttttaatgttttgtagagaaagtctgtgattgctgtgagcttcatagcagcgttccttttcctgctggttgtgcgtcttgtaaatgaagtgaatttcccattgctactaaactgctttggacaacctggtacaaagtggataccattctcctacacatacaggcggccccttcgaactcactatggatacataaatgtgaagacacaagaggtaagatcccagagggttacctagcagttggagagtatccatggtaacagcttttctttaggagccagagggcttccaactcactgaacttactctgtctgccccggagagct

SEQ ID NO: 1803 - DNA, 2300 bp, Homo sapien
tctcaatttggagactcaattgaataatttccagtataatcagcattttgatagaatctcacaacttatttttctctgcttttatttcctgtttttctttgttccatctttctaattctagtgaaaatgcaaagtctaatttctcccatgttgagaataaatttttcatctatgatttgctgatagagaagagcttggtaagggagcaattcaaggaaactattttgccatgcacatttctgatcaattcccacagattctggtcaaatgaaagatattctatccaacatttaaacattgaaaaatttaactgaacttacttatcactgatgtgtatttatcccagaaattaattaatatctgtgaaaaataaaaatatttcaatactatccgtgcttcttggaaaatgaactataaaaaagggtcacaatttttctgaaattggcatgaaaacattcaagataaaaataatagactaaacattattttctgttatgcataattctatgaaaaagcaaggtaatttaaaaagagttttaaaatgtgtgtttgaatcttttccaatttaaccaagtgagaagtagcaatgatttacattgttatgatgataatgtgaataagaaaccttttagagtatatgattttacattgctatcaaacctatcaaagaaaaggcaattggaatttggaggaatgtttgtatatatgcacatagagtctatttgtgtgtgtgtgaacgcacatatatatacatctatatacttataactatatataaaagcatatatataatcctatattcttcactggtgcatgtgaatcacagaaagccctattttagacttcatctgaaattcgttgggttacattttgaatcctgatgaaaaaagcaaaaatccaaattaaatggactgattgctaagagtacgtaaaatcatattcaaaagctggccagaagaataaagctagagaagctgctaaatctagaaaacacaatcagatgccacagttgtcacaaatcagacttgtaagtatagcaatctgtattgtaggttctgccgattgcaggcttagctaaagtcacattgaaaaacattgcatcaagcttcattcacactgaagtaaatgaacattggtcctcctattcaaataagccagtctttagcataagcaaaatccagatttgcatgatttttattatatagctacagaactgtgaccactgtgaaaaaggaaaattatacaaggagattgctcttggaggatttggtatgaatcagctgaggtaggaacaagagtctgaattggggacctgctgaccttccaagaagtagaaggccatcagaagaaaatcactgttacttagagaagagacaacactaaagtacttcacctggtagtgttaattggatgttaattatgagctcggtttaatttcaataagcaagaaaatataatcagatgactgatttaaaaaaaaacaacaacaatgtgcccatctagcctttaatgtgacatgtcaaatgcaaataataaattatgttattcagtatcagttgtttgcatgtcttagcacaacaaaggatttacagtctgagggccaagagagaaaaaatgcttttttcttaaaacagcatatttaaaagacaagacctcatcatttcagtagtgtacatagattagtgactgaaggagccagtgctagcctttttaagtaggtcaggcttttagagctgaaagagattttaaagaccagccaattcaactcctacaccttggagctgaggaaacagacagaggtgaagtgacttgcctgtagttataaactggactaatggcagtactgagactcaaattcttgtctcatgttttcttctctagtgctttttccactacactttttagacagaagagtagctggaaaaagaatgcctaactgatttactaaagagtctattcatggaatccaagggctccaaattgtgctaattctgctcaggatgaaacaaatccccacgctgaagtggagaaatattttcataattgaaggaacatatcccattgattgtctacactttcttctctctgtttgttgctattggtaaggctaggctatgttctgttatcacaaaattctaggacttgtttaaagaacttaaaggtcagtttcttagtttctctttgtgattgaggatgagcaagccattgatacaccaagagctgctgagtgttggaggttgcctggtgaaactggcaggccctgttgttgacatttccccagagctaaaatgtcctcatac

SEQ ID NO: 1804 - DNA, 2300 bp, Homo sapien
aagtgcttgataaatttgtgttgaatctatagtactctgtcttttattgcctagtcatgaacttgtctcaacacacgtgcatacacacacacatattaggttgtgagctcttagaggagaaggtctgtcttattcaccactgtattctctaatacagaaccaccaaataagtggcaatcattaatgatcatcaaattgaagtaaattctatgacttgttttctttatctcgtttccctcaccctatcttgtccatttggctctcaagccagaatgcctgaaatggctgcattaatctaatcaaatatgtaaaagccaagaccttgaaatctttcaaatcaagctctgaattacatttttaaatttaccctggccatttcataagtagatttagcaactagctaactgctatcccaggaggggaaaaaaaaacccataagcttaatgaatttggtcagacatacagtgtaacagatgtccaacatgctgccatgaacttaaatcatagatatgatgcctctgtttggcatggcaaaatatattagaactgtttcatcagtcactgggcaacttgctagatggagggggaataatcctgaaaaatgcaggagctgcttctaatagcatctaaaaggatccctggagaaacacagataatctgcttgcagtgattcatcaagttggtcctttgtttcattaatttgagtgtcaagtgcaaccatacaataaagaattgccaagacctggtaagattctcctctggctgctgcttttcctgccctaacaactggtactattcatgcctaaagcacaaactgaataaatagtttcaaggctggcaatgttggacagtgcttcctattttgcttttccttgaaaggctaaatcgtgtgctttcttgccctctcccaaacacgttgcactgatattcattattgcaccaataattttaactttcttaatactaagtatggaaggatgcctcataagataaaaatagttcctgttgtatcatcagtccagcaatagattagggaagattaaaaatggattgtaatgccttctttggccttgagaaagctcttattgtgcccatggttcagtaggcctgctgatcatttccatcttaatgtaatctttaacattacactgctacaggtgagatgttaagtaatacattaagacaactattttcactgagcaatttcacaagaaatatgtttttagctaaattagacatttaacaaatgccatttgtaattcaatgcagaggagacagcatccttaaaacaagctattgatgtgactttcccaacataaaacaatacttatgtttttttaattttaattgaagtcctgaatgtgaaactatcgccgtcagtgcagtagaccaacggaaagcaccaaataccttaggattatgaaataagccatatgcagttttatctctagcagacagaaattcttcatccaaattaggaagaatctacaggtcaagttaatcatgtagctgtgacgtgctgaatgtttttaaaactttaagatcatttagatgaacactaggaaactcagaggtcaggcagaaatgtaaattgtaatattcaatgaaaataataaatgaaataattgagatgaaatattatctaaagaatgcatgagaataactgaatctgataaagtaaaattaaaattaagagagaagagaaaataagaaagtgagcaattgaaaaacggaataataaataattttttaagaaaaataatttcatcatgtatttctctatgctacgtacataaacgcaaacgctataaatagagttattgacatttgggaggttgatttgtttttatcaacatcgcaaaacagaaaatttaggttgcagattttcacatggctatcacgttcagaatccaatcaggttctccttctttactacttgatgacttctttaaagataaataagcccgcggaccaagaagtgggtacactggctcggttaactctctctccccagaaatttcactactgaaaagattattatttgggggcggggaaggggatgtagaggtctttaggacccagcaggcggcggcaggcggcagttgtgtagatcgctgagagactacgagggtccggttcagttttaattctgtctctaatctctgcaacagccgcgcttcccgggtcccgcggctcccgcgcgcgatctgccgcggccggctgctgggcaaaaatcagagccgcctccgccccattacccatcatggaaaccctccaggaaaaagtggccccggacgcgc

SEQ ID NO: 1805 - DNA, 2300 bp, Homo sapien
ctgcctcccaggttcaagcgattctcctgcctcagcctccctagtagctggtattacaggcatgtgcccccacactgagctaattttgaaacatggggttttgccatgttggccaggctggtcttgaatgcctgacctcagatgatctgcctgcctcggcctcccaaagtgctaggattacaggtgtgagccactgcacctggcctctgatggttttataaagggtagttcctctgcacatgctctctcacctgctgccatgtaagatgtgcctttgctccttcttcatcttctaccatgattgtgaggcttccccagccatgtggaactgtgagtccactaagcctttttctttagaaattatgcagtcttgggtatttcttcatagcagtatgaaaatgggttaatacaagtaaagtctcatcaaagtgtgggtatgaagttacatctggtcatgaatttgaggcataatcattaatcttgtcagacattatcttatgtacaggaagaggcaagggctaggatcaccaaacttaccttttgtaaaaattcagtgattcaggcaagagatgtgcaaacctattccctatcctgcttatggtcttcaaggcattcttccacaaggctgctcacagtcaatgagtcaggggctttgtgaaatattgctggcaaaggagcagaatgagcaaatggcttcttatctttgctactttgtttcataatcatcagcatccaatagatatctgttgaattaatgaatacatggaagatattctggcagtgtatttactttctaggattcacgtaacggaaaacctaaatttgactaaatagcatgaaacctctcacaaagtgcaatagcaaaagaaacaaataaaaggaaaagagagacaagagaatgggaaaagcaatagcataaaatatggcaaaggctaatgttacttatttataaatatattattcaaattcatatgcaaaacataaatatataaacaaagaatttacatcagaggacacagagatagtttagaaacacaagaaagacatcagatcttgatagtaaccaaagaattataagtatagttacctaggggtaacatttcataccaaagaatttaaaggaaaaaaaatggtatggtttggtgttgtgtattctgatagtgctgtaagcttgttcattttggaaagcaacatcatttatagttattaaaatgttttggaatattttgaccccaaattcctagttcaggaaaattatacaaacaaaataattcaacagatttaaaaagccaaacacacaaaagatactctttacaatattattttcatagtaaaacttaaaaactttgcattgtgcagcagagggacaattactttggctgaggcatcaataatggatggaattttatctcaccattaaatgttaaaattgtgaggaagcagcgtggaaacgtttatgtcatactagatgaaatgcataaattaaaactgaactcacataataaagagaatggtggaccatacatatacaccagctgtgtctcttccagataggctttagttccataattacagaagatactcaagaaacaaaaacgtaactagcttcccatgttaatcctttcaccaggtagtagaccccaagcctctaaattgcagcgcccacccacattttccatttatagtttatccaattaatcatctttttgtgccaaaacgcttgttcttcccaccacatccagcttcatattttcaaagaattggcagcactcggcaaaataaataaataaataaataaataaataaataaaataaataagggaacagagaaataagtttttaaagtttaaggagttacgggttttccctccactcacctttcaattttttttcttaaatgttatacctattttacaacctccaaactgaaaatgcagttaaaaataaaaaggtcaatatcctgcgtctaccttgtcccggactctcgagctccacaaaaccgcagagttctaaagccggaccagagggccacctcgaagaggcgcggatggtgtcgcaaaaacccgcagcgctactttacggcactgcctccgccccttcaggtgcgggaagtctgaagccggtaaacatggccgtcaccgacagcctcagccgggctgcgactgtcttggcaactgtgttgctcttgtccttcggcagcgtggccgctagtcatatcgaggtaggagtcaggctcatttgaccacagccgggaggccggctgtgagccctccagcagatgtccgatacacagtagctga

SEQ ID NO: 1806 - DNA, 2300 bp, Homo sapien
ccgacatgcagtaaccattttgattcattatagcttgcaggaaagcattcccaaataaacaaagggccaagggccatgagccttctatatacccacacatagaatttcatcacagggaatgagaggccagctttcccacagcaaggatgtatttagtgttccttgtcctttctctttcctctcttttgaaccattagcttggcttttaagcattatatctctctcatgtagcccctccctacaaagccacaacttcctttgcaaaagtaattatgaacatcttcctctttcacgcatctctctccaccctggcacacaccaaaatacactaattgtctctgcataaggctacttgaaaacttgccgtatcaccatttactacatttttcaggctatctacaatttttagtgcagtgcagtctttcttatccattctctttttacaagcaagttgccaacacttgtccggtaacactaaagtacacttagaattatgcatttcttcaagggaagacaggtgagccatgctctgccagattcttgtctgcaaaggatgaccttgaaaagtcctggagaaactggccttttcattcctgcgtgttcacctccactgtgcctgctcacaaaggaagccttaatgccacggaccattgtacttttcaagcatcattgcatagggaagagacactgccttcactactgccatagccaatcttaaataagctaaagaaatactagaagttgggactgtaagtgaaatggcatattctaagggcaaaaaccaatttccatggaactgaaatacctgcctcgtttaaggcaaccatatgacacacgggttcacaagtgctaaaagttcatttactccctcaggtaaaacaaagctgcagctgtagttaaggcttgagctgcagttgtttccggaacaagaaatagaaccaagaaaagatctgcaaagaagcacttgaaatggacattcagactctatagttttttaaagcagtggcagcgttgcttctttctccagccagaccccagataccagtgcctaccaaagtgtcctctctcacacaccctcctacagtgttaggctttgtgggaagttagagatcatattctccgggggcaaggactatctcccaaataggcaatgtgaagacatcttagcagggaattgagtcatcttgggagctaggaggaagatgggttacaccttaacaatggtctgcagcaggaagatccattaaccattatgccttagcgcacccactcatactcactcatattcccccaggggtgctctgatacgacactgtccacggactgcacactcttcaggtctaattaatgatgcccaccctccccacctactaaacacatttgcaatttaagcatctctagctctccactaccacccacctttctcctccactgtcccttcttctccatggagataattaactagttgactacttattagtccttcagttgattaggatttcaggctcacactaaggccttatcctaaagtctataaagatttgtgacaccgacagggtaaaaattcgaaaccagctagcaaaactttcctgaaggatagagatactcaagatctaaaaattatctgaagggttggattccacaccatgaatccccttttcccccttccccacagctccctatagtgaaagatccgtaaccttaggaataaatgataaatcctgtgactattaggtttttcctgggagttcctcggagacccggaggtaaccgtgtatgtgcgtgcgagtgtgtctgtgtgcgtacaaggtccggagaagcgaaacggtcgcaggttcctacagaccccgaccctgttcccttggccacctggtccccggtagctgcatccctgggcggcgcacgcagtgaagcgtcgcgctctggcgccggtgccgcaccgaggggtatgactacgaccccttgcgcgtgcccgcccccacctccgcacctcgcgccagcccgcgcagcgtgaccggcagccgccgcagacccggctcggggaggcgcggagcgcggcgcgctgaaccggagaggcgggccggctgctgccttgcgttcgccacgctgtcctccctcctccgctccctgcgccccacccctggcggccgcgctgcctggcagcccgggaagccgcggcacagctgctcggcgcctgcagctccggctcgggggctggaaccgaagcgggggcggcgggagcgcggagaccacagcccccggggagaggcggagggggtccctggcctgggcggagaggc

SEQ ID NO: 1807 - DNA, 2300 bp, Homo sapien
aaggaagccttaatgccacggaccattgtacttttcaagcatcattgcatagggaagagacactgccttcactactgccatagccaatcttaaataagctaaagaaatactagaagttgggactgtaagtgaaatggcatattctaagggcaaaaaccaatttccatggaactgaaatacctgcctcgtttaaggcaaccatatgacacacgggttcacaagtgctaaaagttcatttactccctcaggtaaaacaaagctgcagctgtagttaaggcttgagctgcagttgtttccggaacaagaaatagaaccaagaaaagatctgcaaagaagcacttgaaatggacattcagactctatagttttttaaagcagtggcagcgttgcttctttctccagccagaccccagataccagtgcctaccaaagtgtcctctctcacacaccctcctacagtgttaggctttgtgggaagttagagatcatattctccgggggcaaggactatctcccaaataggcaatgtgaagacatcttagcagggaattgagtcatcttgggagctaggaggaagatgggttacaccttaacaatggtctgcagcaggaagatccattaaccattatgccttagcgcacccactcatactcactcatattcccccaggggtgctctgatacgacactgtccacggactgcacactcttcaggtctaattaatgatgcccaccctccccacctactaaacacatttgcaatttaagcatctctagctctccactaccacccacctttctcctccactgtcccttcttctccatggagataattaactagttgactacttattagtccttcagttgattaggatttcaggctcacactaaggccttatcctaaagtctataaagatttgtgacaccgacagggtaaaaattcgaaaccagctagcaaaactttcctgaaggatagagatactcaagatctaaaaattatctgaagggttggattccacaccatgaatccccttttcccccttccccacagctccctatagtgaaagatccgtaaccttaggaataaatgataaatcctgtgactattaggtttttcctgggagttcctcggagacccggaggtaaccgtgtatgtgcgtgcgagtgtgtctgtgtgcgtacaaggtccggagaagcgaaacggtcgcaggttcctacagaccccgaccctgttcccttggccacctggtccccggtagctgcatccctgggcggcgcacgcagtgaagcgtcgcgctctggcgccggtgccgcaccgaggggtatgactacgaccccttgcgcgtgcccgcccccacctccgcacctcgcgccagcccgcgcagcgtgaccggcagccgccgcagacccggctcggggaggcgcggagcgcggcgcgctgaaccggagaggcgggccggctgctgccttgcgttcgccacgctgtcctccctcctccgctccctgcgccccacccctggcggccgcgctgcctggcagcccgggaagccgcggcacagctgctcggcgcctgcagctccggctcgggggctggaaccgaagcgggggcggcgggagcgcggagaccacagcccccggggagaggcggagggggtccctggcctgggcggagaggctgagctgagtgcgcgtgagaaagagggctgcaccgctgctcggcgcggactctgccagccccagcttcagccccggctcaggtcgccgcagcccgggagcctccccgcttgcgccccaaggcacgcgcggcacagccatgaacaccaacgatgccaaggagtatctggcccggagggaaatccctcagctttttgaggtagggctagagctggccgacgggcggtagcatccggggactgcatctcaggggttcgggttgaggcagccgcgccccgtcccaccttccccacacggggcatgtaatgaaggggcttgtagaagcgcactcgcccgctcccccgagggtagtcgcctttcccgcgggttgccagggtccttgtcagaaggctgggcttagaagcctgcatctcacagatcaagtttcagtcttccagcagggttctgaaagcagcctgctcccatcgcgcccctcggatgtggacacccagggtgggctgcagaccgcggccgggccgcactctctgggggcgagggccaggtcaggtggctgcactgtcgcccagcagcgagtaaagactcgaaactgagggagccagagccctagtcactctgctggtcgagggt

SEQ ID NO: 1808 - DNA, 2300 bp, Homo sapien
taaagacaaaatcaataggcaacagtgataacttggatagatagaagtttagatgggtaagggttagaatagatactaagtcttctagctaagagatttaggaaaggagtgttgctacaataaaaataaataagttgagattttatttaggtgggaagttgctgagattaatttttggtcttgctgagtcacaggtaacattcagatgtaaatagagctgtcacatagacatttgaaaacatagaactgggtactattgaaagtcagtgctgacagtgtagatttgaactttatcagcaaaaggtagtggttgaaaccaaaacagtggaagggcactgaaagagtgagaacctggagagggaagagtatgatctaagccttggaaaacacccccacttcagggatctgaggaggaacaaatgtgagcagaggacaaaacaacaaaataaaaaataagaagttaaaggagaaccaggaccacatagaatcatgaaaactaagagatagtaaatgtggctaaaatgtattgagcacctgccatgaaacatacatgctatgtattttatattatttaatcttcataataactcaaggaggtaagttcctgtatctctattgacagataaggacatagaggtttagcaagattaaattatgtgcctgttgttcagctagtaagtcctggggcaaaaaaactggaatccatgtcttccagcctcccaagtccattttttaactagtggtctccagagtgcacaaagcaaaccactgtgatatgggaaaaaaatcattaaaattacaataatagaatcccatcctttaaaaattgtattttcatatatatattttacaatgtgcattctgcactagtatagtaatacatgcatatcatatgtacatgcataatttgtaaattaataagtaattgcggcatatgcttaaaacatttactaatgtgaagaggcagtaaaacactttggagattattgcttcaaaccactatgcaaactgtctttttgcctcgtcccattctcagttgtaagctgcattcacttcatatagtcgtgctatgttttaaatgcaatgctagttctaatttagttaaatagaaactttttacttcataggttcttttcatcctacttcttagtattttctgaaatttatgaagacctttgggccttttagtgctttgtgatagtgaaaggaacagaggccttagaccagacagacttgagttcaaacattaacttttactttactgaccatgtgatctcagacaagtacttaatttctcagagcctcagctcatctatgaaatggagataacatttaccttgcagattgttgtaaaatttagcaatatctttttttttttttttttttgagatggagtcttgctctgtcacccaggctggagtgcaatggcacaatctcagctcactgcaacctccacctcccaggttcaagcaattctcttgccttagactcctgagtagctgggattacaggtgcgtgccaccacctgtagagacggtttcaccatgttggtcaggctggtattgaacttctgacctcatgattctcccgcctcagcctcccaaagtgctgaaattacaggtgtgagccaccacgcccagccagcaatatcttaaggaaacagcattgggcctggcatacagtagataatttttaaatggcaccaaatagtaataataacaatagtacttgtttgctgtagagaacatctgtggcccagtagttcctcccatctaaaatcaagttgcatatataatatttttagcaaagtttggctgagactgttcttaattcaacttggaaacttatttgagcatatataaaaagtgttggctactgcatatggccacatgagttagagaatgctatttacatggactacagtgggaatggctgctcctggccttgggtagagcagcagccctggaaatacactgtcaaaaacatagagggccaaatatatggcagcctccacagaacaaaaggaaatgaatgcagctgcccacacatgcattagttggtatgttgaatgcctctctatttgttgatgctctccacagatctgtacccccgatttggtggtattcctggcttgtgctaatcagagactcaaagaaagattactgaagcgtgcagaacagcagggccgaccagacgacaatgtaaaagctacccaaaggagactaatgaacttcaagcagaatgctgctccattggttaaatacttccaggaaaaggggctcatcatgacagtaagttag

SEQ ID NO: 1809 - DNA, 2300 bp, Homo sapien
aatcccagcactttgggaggctgatatgggtggatcacttgaagtcaggagttcaagaccaacctggccaacatggtgaaaccctactaaaaatacaaaaattagccgggtgtgatggcgtgtgcatatataatcccagctactcgggaggctgaggcaggagaattgcttgaacccaggaggcagaggttgcattgagccaggatcatgccactgcactccaggctgggcaacagagtgagactccatctcaaaaagaaaagagcctgtattttgagtcaggtgtatattgttgtatgtgatgcctgttagccatgagttttaaatatttaggcttatttttgtatacctttttgcatacgtcaagaattttggattttgagaatgtgtaaacttttgtttggggataattttaaaagaaggaacctgggttttgagaggggagtagaagtggatagaataaaatagatgtttttgtaatgtagctttgggagagagaaaaacctgaggccagtaaagctgagcttcaaagtgcattcttatttttgttgtcgaagggaggtgaggaagtcaagtcagttttggcatacagtttagaattgttttttggctaatggctagggttgttagtgggtgaagtttgaggcacatctttgtctcatatggctattaaccccacagctatacatttaacagtttataaaaagctttgggaaatctatttatttcaagcatccagatttttctgcatctttaggactatgagaagatacaggagacaagaaggaatattaaaatcaaatatttgaataaaggaccatacaaaagaaggaaaagcctcttttaatagtcgaaatttaagtgaatttacacgtttttgttaaaactgtaggggaaagaaaagtaagaaaagattgaccatcttttcttggatttcagtggatttagtgatttcagtggaaatcactaaaatgtgtaatctaccaatttgtttacttattttctgttttcttatgagatatttttacttatgtgaatagaaaacttttctaagctctttcataagtttattctctaatttcattgttccctgtgaagtcttaagtttctaactagaaatttttcctaccatgaggatttctaattacgtaacccccaaaggtgggagagagtattacattttgaaatgaaatgtgaatgtatttatttagaaatccaatatttaaaattaaatacatattttcttaaatttggtcttgggtatggcttagaaaaagctggaacagctactcatcaaataccctcctgaagaagtagaatctcgacgctggcagaagatagcagatgaattgggcaacaggacagcaaaacaggtaattgaggagatgactgcagattgctggtatgcttttggtagttttttaataaaggagaataatgcagctgacattgggcgatctgccataacactttcagctacagagtgctgtagtatgtggtgtttttttaaaaaaattgtatatattttcgttgatttcagaaacaacttgagatacttctgctttggatcattacgaaatattaaaaaatgaacatataatggacttaatttctcttgaatgcttactaaatatactaattgtatactttttggttatactgagcaaacagatttgtttcattgccttagtgtttcctggttgtctttctaaaaatgtatcttgcagtttactccttcatattcccatctatattaatagatgtgtttttatactacaaatgtaagtgttcacaagttgaaatatgtgtttagctttagaatcaaatttaaatttacttgaataatttttgtttggcctagattttaaaatatatgtgtatttggtggcagtttattgttaattctagattcatgatgagtattgaattcttagcattcattagatactcatgtacgttttaatttttaaaaacgactcaggtattgtatgtcatctcattgtgttaagagacttgtcatgtttccttaggttgccagccgagtacagaagtatttcataaagctaactaaagctggcattccagtaccaggcagaacaccaaacttatatatatactccaaaaaggtaaaagaaaatacatgaaagtaaactgtagattaaatttattaaagtaagaattgctatgtaaaaatctacacatttgacagaatagtgttgtattttaaaacttctgttcattctaagcatttccttatattgtgcaaaagtggagggtaaggactccattattgctgctca

SEQ ID NO: 1810 - DNA, 2300 bp, Homo sapien
gaagggactgtgaaactttgcactattgccaccactggcctctttctctaactaatcatcctgcatctcattcaaagttaggaaataaaatgacagggtaccttgtgaaaactaaacagaagaggagtcggggaatagagacttcaaatattaacagctcctttattctgcttgatgggagagcctctggaaaatatcaccaaatcactagtttacccaaatggatcaatcaaggcatttttctatatcccttacatttctgtcatataaacctcaagcatccacaccagaatacctgctcatctcccaaaccacacattaaaactggcactggcatatgctatacacaggagttcaaagaaggaaagggtgggattacaggagtagtcttgatttcttaaatgtaagtatttgcttcagaggcttcttccccattttcttttctggtctttggaacactccctttcacttgctaatttatggctttatttctagagactaggaaggcttgggtttgctttgttttgttcttagccaatgcaagctagcattgtgatttttgtctatttagttatgaaaaattatactgcaataaaaaatttttggatgccagattattattaagggatttgatctgaaactcattttagcaaaagtaaattaaaaagaggagagcctgcctttctgtataccgggaacattttgaaagaacacgagaaatgattggaatagttttttgaaagatagctgctatataagttcaagattattattttatttattttatttatttatttatttatttttttgagacagtctcactctgtcgcccaagctggagtgcagtggcatgatctcggctcactgcaaactctgcctcccgggttcaagtaattttcctgcctcagcctcctgagtatctgggattacaggcgtgtgccaccacacctggctaatttttgtatttttagtagagacagcgtttcaccatgttggtcaggctggtcttgaactcctgacctcatgatcctcccgcctcagcctcccaaagtgctaagattacaggtgtgagccactgcgcccggccgaagattattattttaatgaccaaaatgaaatcacatctttaggatagatctcttctgggtgttttatgcctgagaggcagatacacagtgaggcagttatggtctctagagccctgccttgctacttactagagttgtgaccttggatagaatattcagagtgtgctttaatctcattcgtgaagtagggatgatagtagcacctatctgagttgttgtgagacttaagtgagttaatgtatgtaaggcatatagaaagactcatggaacatattaagtactgtatgcttgttagctataatttatatcattattggaaacgttaaagaatttttatcacataatttaatattggcagttatatagatagttatagactgtaatgtccaagtatacttggattaaaaagttatagctttatactttcgttctgggtatattaactattacctttttctcattattttgtttacatttttgaaggtttcccaatgagtggatcatgatgaccgtattgtagggacttgccatagtatggctgcttcccgatctactcgtgttacaagatcaacagtggggttaaacggcttggatgaatctttttgtggtagaactttaaggaatcgtagcattgcgcatcctgaagaaatctcttctaattctcaagtacgatcaagatcaccaaagaagagaccagagcctgtgccaattcagaaaggaaataataatgggagaaccactgatttaaaacagcagagtacccgagaatcatgggtaagccctaggaaaagaggactttcttcttcagaaaaggataacatagaaaggcaggctatagaaaattgtgagagaaggcaaacagaacctgtttcaccagttttaaaaagaattaagcgttgtcttagatctgaagcaccaaacagttcagaagaagattctcctataaaatcagacaaggagtcagtagaacagaggagtacagtagtggacaatgatgcagattttcaagggactaaacgagcttgtcgatgtcttatactggatgattgtgagaaaagggaaattaaaaaggtgaatgtcagtgaggaagggccacttaattctgcagtagttgaagaaatcacaggctatttggctgtcaatggtgttgatgacagtgattcagctgttataaactgtgatgactgtcagcctgatgggaacactaaacaa

SEQ ID NO: 1811 - DNA, 2300 bp, Homo sapien
atgataatatattagcaaacgataattaaatgtcagctgttcttttaatgaatcccccaaacaatgaaagtttactactgtaagaaatgtgtttctaagttctgatttgtgtcttgtacttattgttcacttggttgctatgaaattctgtagaacatataaccatgctttaattccagggctagttttgtgattcttataagatttaaaaaaattgttaattaaaaatttaaaagtatgccatactttgagacaacactaaactcaggcaacttaaatattttacagggtactttctcacttaattcacttgtcagcaggcaggaacagggagattatttcctgtagtgtttcttttttatatgtggtagcatgttgctgtgtcttctataattcttccaaactttccactgttagatagttctagttgaagcaaggagaaattgtgtttgatttttaggggtaggagtcagaatggcatttggaggtttacatgagaagggagactgttgatgaccaaaggcaggaggaagggactgtgaaactttgcactattgccaccactggcctctttctctaactaatcatcctgcatctcattcaaagttaggaaataaaatgacagggtaccttgtgaaaactaaacagaagaggagtcggggaatagagacttcaaatattaacagctcctttattctgcttgatgggagagcctctggaaaatatcaccaaatcactagtttacccaaatggatcaatcaaggcatttttctatatcccttacatttctgtcatataaacctcaagcatccacaccagaatacctgctcatctcccaaaccacacattaaaactggcactggcatatgctatacacaggagttcaaagaaggaaagggtgggattacaggagtagtcttgatttcttaaatgtaagtatttgcttcagaggcttcttccccattttcttttctggtctttggaacactccctttcacttgctaatttatggctttatttctagagactaggaaggcttgggtttgctttgttttgttcttagccaatgcaagctagcattgtgatttttgtctatttagttatgaaaaattatactgcaataaaaaatttttggatgccagattattattaagggatttgatctgaaactcattttagcaaaagtaaattaaaaagaggagagcctgcctttctgtataccgggaacattttgaaagaacacgagaaatgattggaatagttttttgaaagatagctgctatataagttcaagattattattttatttattttatttatttatttatttatttttttgagacagtctcactctgtcgcccaagctggagtgcagtggcatgatctcggctcactgcaaactctgcctcccgggttcaagtaattttcctgcctcagcctcctgagtatctgggattacaggcgtgtgccaccacacctggctaatttttgtatttttagtagagacagcgtttcaccatgttggtcaggctggtcttgaactcctgacctcatgatcctcccgcctcagcctcccaaagtgctaagattacaggtgtgagccactgcgcccggccgaagattattattttaatgaccaaaatgaaatcacatctttaggatagatctcttctgggtgttttatgcctgagaggcagatacacagtgaggcagttatggtctctagagccctgccttgctacttactagagttgtgaccttggatagaatattcagagtgtgctttaatctcattcgtgaagtagggatgatagtagcacctatctgagttgttgtgagacttaagtgagttaatgtatgtaaggcatatagaaagactcatggaacatattaagtactgtatgcttgttagctataatttatatcattattggaaacgttaaagaatttttatcacataatttaatattggcagttatatagatagttatagactgtaatgtccaagtatacttggattaaaaagttatagctttatactttcgttctgggtatattaactattacctttttctcattattttgtttacatttttgaaggtttcccaatgagtggatcatgatgaccgtattgtagggacttgccatagtatggctgcttcccgatctactcgtgttacaagatcaacagtggggttaaacggcttggatgaatctttttgtggtagaactttaaggaatcgtagcattgcgcatcctgaagaaatctcttctaattctcaagtacgatcaagatcacc

SEQ ID NO: 1812 - DNA, 2300 bp, Homo sapien
taactcctgacacctcaggtgatctgcctgtcaaggcctcccaaagtggtgggattacaggcttgagacaccgcgcccggcctcccccacccccgtttttttttgacatactgccacccagaaacactagtatgttcaataaatacttgatgtgttaaaaacatgtaaccctttttcttgaagtagatgttactttgagttgaactcaaagctaaaatacaaaacaccatttaaaacatttaataacttttattagcaacataaaagaaggcacaacacgtatccacttgcccgaaaaaaaaaatagtgttgcaaaggaaaacaaaagtaatgaaacagcactggacaattgtcaaagaagagccccagttaacggcttctaccactggattttatatttttggaacataatctttatagccacggaaggaggtttagctgtttttccacagctcataaatgatgaagttatttatcttcattaatgtgtgttgggctttattttcctacatgctcaatatagttggtagatctgttttgatattactgagcactgctttgtgccagacacaattctggggatacagcaatgagcaaaacagtttactaagtccctgcttttaaaaattttacatttctggtggtgaggatactgacaaataaggtctggaagttgtaactgttatgaagaaataaaagcaggtgaagagttaaagcaatggtgcaggtgtactttttttggatacagtggtctgggcagccctctgagaagggacctgaaatatgcatcgaacatcgaggagttaaaaaaaatctggaggaaatgttctgccagagaaatcggcaagcacaaaggcccgaagtggttcgagcctgcgtgctgtggtacaagccagaggtgaacgaggcgaggcagaagcacgatcataaatacatgtatggatgttctcctggcttgagaccacagtgctaagggaggtggggtttacaaatctctcaggaggccacaaagggcaggatgaagccgatttccaatggcggagctacgaggacgcctttcctctgctagggccaggttggacggttgcaagggatggactgcaacccgccctcggaagaccaaacttcgcccaggggcagggactggccggggagggcctcggcggcgcccgacccgcgggcgctgcacgggccgcggttaccagcaggcggtgtagtgagcgcgcctgcagcagcagcaacagcagcagcagcggtcgccgccgccgccgccgcccgccagtcccaacgaggagaaaggaggggaccggaaggagccgctggtgctgcgggaagtggcaggagcgggaggcggggacccacctggaagcgccgcggcgccgctatcgagcttcctgcagcggtggccacccgagcaagtgccgtggcgggggcggagagcggccacggcggcggcgcctccccaagtggcccgttgcgtccgaccccgcgtgaaaggtgagcaagagctcgggacacgtggtgagggccagacacgggggagggagaatgaagggggagggaatgggggtgggaaacgatcggcttgggacccggatttggagccaagtaccgggagggggtgggctggaggcgacgactgcgacggctgcgacggctgcgacggcgaagcccccacgtggggcgggggtgcgcgcgcacgtgtgcgcgggcgaaagggggggcggggagggcttttgggagggcgtcgggagcgcgctcgctcagtagcggcccacgtgacgggcacgccgaaaatgtttccacgtgacagggaggctgcctggggcagcgcactgcgctctgtttatgtagtataatcgtggtaatcggaggtttttaagatttctgcttttctgtacaaggggaaaggaggagacgtataaagcggaaagacttcctactgtctcagtgttttaaatgttcactactccgttagtgaagtgctttttaagttccgaaatactgatttttttctgtaccgccatgttgggtctagtggaagctcgcgagatgcgagtgggtttgtatcgcgagatctctcgattctcgcgggacctcgttggcagagcagttgtcctggatggcggagccttgggttccgggggcctgggacctgcaactctttctacaaggcaagtcgttagggaggggcccggggcgagtgcctcttggtgccgggatacgtgctgcatcagcttcccatagtcttgaagggaatacagtaaccccattgaggcaacactgccctccccatcccc

SEQ ID NO: 1813 - DNA, 2300 bp, Homo sapien
ggagggaagaaaagctgaactgggcagaagttggacttcagtgaagtctcaatggaatgccttagctgatcctgcaagttgttctgcaggaggagaaaatccatcagaattgtaccaaatggaggtgagagggctgagccttttatccctgcattgatcagtcactggatgtggcctctctgagaacattatgactctgtgacactggcatgcctgaaaggggctgacaaccgatggctggctgtgggtatgactcttggcagcagcagctcagttctttattcctgaagtggggtctgaaaagtgcatctcaaggcctaccacaaatagtatatatctcataggattgtcagaagcctaaaatagggtaacatagaaaagtacacagcatttggcctggcacataggaatcaaaagcatgctaagtatggttattataataggatttggctctataagtagaaagagcaaggtagggaaacgtgtttatttttgtatctctagtcttagcatagggcactagtatgttttatctttccttttttatttttgagacagtcttgctctgtcgcccaggctggagtgcagtggcacgatctcggctcactgcaacctccacctcccgggttcaagcaattctcctgcctcagcctcccaagtagctgggattacatgggataacaggcgtgtgccaccacacctggctaatttttctatttttagtagagacgaagtttcgccatgttggccagactggtctttaactcctgacacctcaggtgatctgcctgtcaaggcctcccaaagtggtgggattacaggcttgagacaccgcgcccggcctcccccacccccgtttttttttgacatactgccacccagaaacactagtatgttcaataaatacttgatgtgttaaaaacatgtaaccctttttcttgaagtagatgttactttgagttgaactcaaagctaaaatacaaaacaccatttaaaacatttaataacttttattagcaacataaaagaaggcacaacacgtatccacttgcccgaaaaaaaaaatagtgttgcaaaggaaaacaaaagtaatgaaacagcactggacaattgtcaaagaagagccccagttaacggcttctaccactggattttatatttttggaacataatctttatagccacggaaggaggtttagctgtttttccacagctcataaatgatgaagttatttatcttcattaatgtgtgttgggctttattttcctacatgctcaatatagttggtagatctgttttgatattactgagcactgctttgtgccagacacaattctggggatacagcaatgagcaaaacagtttactaagtccctgcttttaaaaattttacatttctggtggtgaggatactgacaaataaggtctggaagttgtaactgttatgaagaaataaaagcaggtgaagagttaaagcaatggtgcaggtgtactttttttggatacagtggtctgggcagccctctgagaagggacctgaaatatgcatcgaacatcgaggagttaaaaaaaatctggaggaaatgttctgccagagaaatcggcaagcacaaaggcccgaagtggttcgagcctgcgtgctgtggtacaagccagaggtgaacgaggcgaggcagaagcacgatcataaatacatgtatggatgttctcctggcttgagaccacagtgctaagggaggtggggtttacaaatctctcaggaggccacaaagggcaggatgaagccgatttccaatggcggagctacgaggacgcctttcctctgctagggccaggttggacggttgcaagggatggactgcaacccgccctcggaagaccaaacttcgcccaggggcagggactggccggggagggcctcggcggcgcccgacccgcgggcgctgcacgggccgcggttaccagcaggcggtgtagtgagcgcgcctgcagcagcagcaacagcagcagcagcggtcgccgccgccgccgccgcccgccagtcccaacgaggagaaaggaggggaccggaaggagccgctggtgctgcgggaagtggcaggagcgggaggcggggacccacctggaagcgccgcggcgccgctatcgagcttcctgcagcggtggccacccgagcaagtgccgtggcgggggcggagagcggccacggcggcggcgcctccccaagtggcccgttgcgtccgaccccgcgtgaaaggtgagcaagagctcgggacacgtggtgagggccagacacggg

SEQ ID NO: 1814 - DNA, 2300 bp, Homo sapien
cagatgaaggtgtcatagaagtctacaagtatttggatatagtatatagtgttggaatgttaaagctgctattactggaactttagagttttgcattcaggagcagccattctcacaatgataaaatcagaccctaaatactatatgaatattttcctgcttatgtttatttgttctaaagtttagcattaggatcatagtttgctgtaatatgttaataattttgttttagaactattcaggaaacttgcatttttgaaaagtcatggggtgaagcataatcatttaattgagggaggatagcagtaaaatatcacttaaaatatcaaggataaggtgttctgatgtgcctgtgaaacataatattaggcagttttgaatgatttttttgaaacatacttttcaatttatttaacactttgaattattggtagttaatttttaaaatgaaaattaaaaataacaaaaattgctctttaaaaatgttttcttgctcaggccaggatctgttgtgcctactactctgtttcaaggaattaaaactgtaaatccaacatttcgggggtattctcagcaggttagtttattgcttttcatttgtaattttaatctaaataaatttggaaaatgccattatgttttttttgggtctacttatcttttggggtcatcactccttgtgtctttcttttgccaagaatagtaaccctttttcatgtttattgtttatattttttcaactttcctttatctttatcttttttttgaggcagagtcttgctctatcgcccaggctggagtgcagtggtgcaatcttggctcactgcaacctccacctcccgaattcaagcgattctcctgcctcagccttctgagtaactgggattgcagatgtgtgccaccacgcccagctaatttttgtgttttcagtagagatagggtttcgtcatgttggccaagccagacttgaactcctgacctcaggtaatccaccctcctcggcctcccacagtgttggattacaggcatgaggcactgtactcagccttttttttttttttttttttaagagagataatgtctcattatgttgccctggctggtcttgaactcctgactcaaacgatcctccctccttgatctcccgaagtgttaggattacaagcataagcccctgcatccagcggaagttgatcttcagatcatctttagttttttaaaatttttatctggctgggcgtgatggctcatgcctgtaatcccagcacttcagaaggccgaggtaggcggattgcttaagcccaggagcttgagaccagcctgggtaacatagggagacctcatttctaaaaataatttagaaatatgtatcaaccaggtgtggtggcacgtgcatctggtcccagctacttaggagactgaggtgggagaattgcttgagcctgggggatcgaggctacagtgagctgtggtcatgccacaacactccagcttggacaacagaatgagaccccatctcaaaaaaagaaaacttttatttacataactttttggaagttaatgcatctcatttatctagtgccttatgctctccaaactggtatttgctcaatatagtgctgtaccttcatatataagtttgtaatgacattttgtatattttcccttacgtttctatatacacatgtaatgaagtggttaacattatgttgctgatatattaggatgctcaagaattccttcgatgtttaatggatttgcttcatgaagaattgaaagagcaagtcatggaagtagaagaagatccgcaaaccataaccactgaggagacaatggaagaagacaagagccagtcggatgtagattttcagtcttgtgaatcttgtagcaacagtgatagagcagaaaatgaaaatggctctagatgcttttctgaagataataatgaaacaacaatgttaattcaggatgatgaaaacaattcagaaatgtcaaaggattggcaaaaagagaagatgtgcaataagattaataaagtaaattctgaaggcgaatttgataaagatagagactctatatctgaaacagtcgacttaaacaaccaggaaactgtcaaagtgcaaatacacagcagagcttcaggtgacaatttagtagtttgttcatgaaaatgatagtatttcatttgtagacatgggtgtttaaataattgttactttgggtatttctaattagaattatagtttagcagtatttgcatgtgagtattagtcataaaattatagaacccgaggataaaa

SEQ ID NO: 1815 - DNA, 2300 bp, Homo sapien
tcagagtgagtttgttttgtgagaacttgtccactgcaaggacttcacttggtgtccacctgagaagtacttgcctactattatctacgcactagtctcaaactcccgatctcaggtgatctgccctgctgggcctcccaaagtgctgggattacaggcatgagccaccgcacctggtgatcttgaacagccttgtcagttgtcttccttgcattgacactgccctagaactcctccaggacaggtaagcccagagagaaccttggttactaagcaggatggtggtgggacttggaggctgaattgaatttgctaggacactgtaagaacagaatacccctgatacattttcaatagaagaatttctggggaagtgacttttgtctatttttctatttggtcgcctgtttttttaaaaattgatttctggaaatacatatggagttgagccccttttcaattatatgtatttcaaataaattctatttgctggcctaacttttcttctctctctgtctctcttctttttttttcttctgtagatctcctctgtggacagctttttttttttttttttttttttttgagacagggtcctcctctgttgcccaggctggagttcagtggctctatcttggctcactgcaacctctgcctcctgggttcaagtaattctcctgcctcagcctcctgagtggctgggattacaggcacgcgccaccacacctggctaatttttgtatttttcgtagagatgggggtttcaccatgttggtcaggctggtcttgaactcctgacctcaggtaatccacccgccttggcctcccaaaatgctgggattacaggtgtgaggctctgtgcccggctggagacaacttttcatctcctaacggcatctttttttttttttcccagagaatatctcactttgtcacccaggctgaagtgcagtggcacaatcatggctcactgcaacctcaaactcctggtctcaagtgatcctccactcttagcctcttgagtagctgggactacaggtgcctgtcaccatgcctggcgaatttttgtatttttagtagaaatggggtttcgccatgttgcccaggctagtctcgaactcaagtgattcacccgcctcggcctcccaaagtgctgggattacaggcatgaaccatggcgcctgcctgtgaaacttctattctgtgaaatttctattctcctcagtgaaccgaggataggcaatcatttgtggtgcaaattgaggcctgagtgtcaatccctacctagaattttgtatcatggttaatttatttcatttttaccataaaaataagtagaagcttttatattttctacctattccaatggagactgagcatcttgcatgatactttggtacatgctcccattttggagaccaaaaagtcagatgtcatgagacagattgaaactggcaattttaacaattttttattaatataaccttttttattcatagatttgaacctcaatcgagtgcattttaacagttacataattagaaggcaggactccttccatgctccaggcattaagcagatactaaggtttcaataaatatttgatttgatcctcttgattttagcctaaggagaaaatggtgagataaatttcttctttgcataggtggaaaagggaaacataattgctttcagagaatctaggtcctaagaagttgggggaagaaagatgaaaggaggaaatacaatgttgaattgggataagttaagtctaatatttctttgctcaagtttggaaacctgaggcccttcagtggccagccttaatgcagtttttgtaatgcatcgagacaagaccttataatggtcgtagtgtgtgactgtgaaagagaaggagaaaacatgtgaaaaacgaaaaaaaaaaagctcacagcctcaaactgctgcacataccctgtacagttagtttgcagtcagagtagggagccggcctgggtccccgcacctgggcctggctcccgtggccccgcccctggggcgggctcccatcgaggctccgcccccacctcccctatcgccggagacgcctgcggcggccccggagacaccggaaggagccgcggctgctgcgggaagtggccagttcaggaggcggaccccccgagggcagcgctgcggggccgttttccggccctcctgacgcgacactgcccctctccgagagctgagaaggaaaagaggagcttgcggaggtgcggctgcaggccgttgttggtcgagctggcgggtcccgcgggcca

SEQ ID NO: 1816 - DNA, 2300 bp, Homo sapien
aaaaacctccacacatttggagtcagaagtgttgaaactacagaaaaatagctttgtgtttcttttcctttaacaatgcatctagtaagtggccaagaaaggattcaaacccaggcagtctgacttcacagttttgttttgatattatgcagataggatcccctaaattcattaatggttgctgtagcatgtattgcagtacttgtacagaagaaacaactggtagtactccatgaactccattctctggtttagtgagcattacacgatggcttggttatctgggggaggtactggccttcagaattaatccaggctccaatttttttttccttgtctccaatatcagaagacattgagtcccctgtccttctggtttaaaccactacttgtttggttttcttttacttgtagcgaatatgttaactaatatatccaataatggctaagattgagtgcagtactctgccaaaccagaagaagggaggcttacagcaaattacatttggtttataaacataaattaaatgtgatatttctattttatatattttattattattttgtagaaatgagggtcttgctattgcccaggctaatctcgaacttcttacctcaagggatcctccctcatcggccccacaaagtgttgggattacagatgtgagccacctcacttggcctaaatgtgacatatcttattctcatgctaaagaataaactctgtacccaccgtgtaatactatttttctcataatgtttattgtggaattaaggagataatatggtctcaggaaagttgtgttgagtggtagtcatcatcattactgctattctcattacgttgaatgtttggaagctgtgggaaatgggaaagaggaggaaattgggaaaataaatgaaaatagccttacaaatttcaggttcttcaagtctcaagagctccatttaccctataagtgcaaaatattttcacataaaacccagtctgtggatcgttagttattattaatctaataatatcataaattggtactactattctattttccatttggttaaatgggaattttgaaaacagaattattttggcttttcaccacaaatatgctcagcaactggaattcttaaatctgcagtttttttgttttgttttgttttgttttgttttttgttttgagacagagtctcactctagtcacccaggttggggtgcagtagcactatctgggctcacacaacctccgcctcccgggttcaagcgattttcctgcctcagcctcccgagtagctgggattacaggcaggtgcctggctaatttttgtacttttagtagagatggggtttcgccatgttggccaggctggtcttgaactcctgacctcaagtgatctgcccgccttggcccgccaaagtgctgggattacaggcttcagccaccgtgccccgcctaaatctgcagttctgatggaatgttttgactgaagactgaacgtagaaacagtaccttgggttttgttgttgttattttttcctaacccggccccctattagtttactatgtattagaacctgagagaggtgactactctgccaataaattgccacattcaatattcttcggttgcctaattcagtgggaaacacagaaaaaaaggtaaagaggacatgaaatcaataataaatgcatcatctataccggattggaatgcctcttaacactcattcatctgagggctgagggcctgtggtagaagttcttaatcttgttttcagggttttgaaattgtgtaacttttttttctttaatgtaatgagcatgtgtatacacatttttttttttccaggggaaaccctccataatttttaccagattgacaaccgttctagatcccccgacaggttacgaactacaatactagttttttttttttttttttaccggtttgtaaaaggatgcaattcttcgaatatagtttttgcatccacttgacgaggaaggagcctctaccctaaacaaaaatggcgggagctgcttcacacgtagtccctcacgcagaaagcctggaaggccccctccactttctctccaccttcgcactcctgaccccggaaggactccgccttctccatgtcagactgctgctcagcgccaggcatcagctgggaagctggcgtgggcaggccagctgtacctggcctggagctccaggtacagggccaggggcggggtggggtggagaggcgggcgggaggaagcggagagttgagcggccacgcagttggggcagaggcctcg

SEQ ID NO: 1817 - DNA, 2300 bp, Homo sapien
gggatgcaaggaagccttctccgaggaagcagcatttaagaagagatcgggaggatatgttgaagttaggtgaaggggaaagtgggagaaaggatttcatgcagggaacaacttatacaaaggccctgcagccagactgcccatagaaagtttcatgaactgaagaaggccaaggtgatggcatcaaagagagcaagggcacaagcaagactaccaagaccacctatcactatccgtagttcggtacatttaaataattttaattaccaattttgaacttttctgtaatcgaggaatgaatggcttaccctccttagaaaagtttccatcctgagtaaatactgtggggatgggactggggaacagagttatatttgagtagaaggccttttgtgtgtacgggtgtgagagagagagaaacagagagagagagggagtttcactcttgttgctcacgctggagtgcaatggcgccatctcagctcacagcaacctcagcctcccgggttcaagcgaagtgggttcttcaacctcagcctcccaggtagctgggatcacaggcgcacgtcaccacgcccggctaattttttgcatttttagtagagatagagtttcaccatgttggccaggctggtcgcaaactcctgacctcaggtgatccacccgccttggcctcccaaagtgctgggattacaggcaggagccaccgcgcccggcctttttttttttttttggagacagagtctcattttgtcacccagactggagtgcagtgggatgatctctgctcactgcaacctccgcctcctggcttcaagtgattctcctgcctcagcctcctgagtaactcagattacaggtgtgtgcctccacactaggctaattttttgtatttttagtaaagacggccttttgccatgttggtcaggctggtcttgaattcctgacctcaagtgatccacccgcctcggcctcccaaagtgcggggatcacaggcatgagccaccgcgcccagcccagaaggccttttcaacatccctgaaatataacctgagcaccgctgtctgcttagggcctgaaggtggaagtggttacctttattctttatctggatgtcatttcgatttttttttcaagtgcagtgaagaattaaagatctcgtccaccaaaaatactccgagtgtgcatttcgggttttaatatggtattgtctgatgggtttgacaggctggcggtccaagttgaaaaaggtctgtgggtgtctaatagtcaaagatgcctttatgaagctttagaaagaccagatatggtttgccttcaattaagaaaaaggtggaatataaagatatttgtacttatataaatatattccttcttttcttctcctcctcctcctctgccttcaactttcttcttcttcttcttcttcttcttcttcttcttcttcttcttcttcttcttcttcttcttcttcttcttcttcttcttcttcttcttcttcttcttttttaactctccttttagagttaaagactggagctaagaacaggggagcaatagacagatgaagtgttcccggattgctgccccacgctctttgtaataaaggaaaacttggccaaaggtcaatgcttagggtagtagaagatatgtagtggcttggcttcttgactggaaactaggacgggtagagtagctgagagaagtgggccccagagcaaactggttgcgggtagggggagccagcttcagcccggtaatgaagcccatttcagcctcattcctttcccatggcggaggcagccttccttccccaggcctggctggaggtggaggcaggcccaaagttagggggtcagctcgcgcacctagggccgggagacagacaaattctggcggaaagttggcagccacggtccccctcccctgcttttctcctcaactctccacccccactccgggtgataacggcggaggtggggggttgggggaactggccttgtgttttggaacagctgcagccggcgctgggcccgcctggaatgcgggaacaggctgcacaccaggacttttatggaaacttgctgctggagacggcggcggcggcggcggcagcggcagccagaggactcccagcggctggagcagaagtgttagcggccagagctcccagacccctacccacagccaggcgggacgcgcacagtccctccacgcggaaagaagtaccttcgccggtcaccggctcctgcagggtgagaagagttgggggaacgtgggctggggggagtggagacgga

SEQ ID NO: 1818 - DNA, 2300 bp, Homo sapien
gaaagggtcaaaggggaggcctattttggccagaaagagtgaaggggaagaaaagacagggaagaggcccaggatggacggtgagaagtgaatttcaccaaccttgaaacctcatatagggagccccaatctgcttgtcttctaatctaagagtaaaaaggaagagatgtcaagaaggaaataaaggaggaagaaaaagaatcacctgttgagcacttactggatggcagacactgcatgggatgctttcacatgttgttttattgagatatgtcaatgcaaaaagaaagagttctatgcatgggaaaaagacttaaaggaaatacatcaaaatcctaacagtaagagtgtcagattacaagagcccctttttccattctccataatttttaaccataaatataacatggtgtattaacattataatacaaattaaactaaaatttaaggtggatttctgggtacaaatccacccaccctggagtatagaaagtaaactactataaattaagccaaactatacactgaatatttaaataataaaggaaaatgtagccatttcaaatgtatataatatgtaactatgcaattataaacccagaaagagaacatgaaagaaactacacaggtgatatggaccgcagattgattaaataagaacagaaatatgtgaaattgttaagaatgttataaatcattttctctccaaattataaactaccaagatgttctgtgtgtgtgtggcctacataactataaaataacagtcctctcttctataaaaacgtttagacttttacctgtctgttacatacttttccacattcactgcattattttctttcttttaggtgtgcacaactctcatatttaaataatcccccttttttttgtcttttagggtatttcaaagataacaggtattttttttaataaatgaagtatgtcattataggccgctcagattctaagcaatctgaatccccaattaatgtcttccaaatatgcatatttagtttttattctgctcaaaaatgaaaccctaacctaaatacttcaagtgaaatttcaggggaaaaagactgttcaaaaacctagataatgcattcctttgttgatgctaaatatagtcatctcaagatgacatacattttgacaatgatcagccttacatgtcaaattttcaaaaatagcacaaattccattttaaggtgagcaggaacaattgctattcattacatttcaattgaaaatggattttaaaatatgaatcttttattaaaactggattacattgtaactatgatgaggaaaactggatttaaaataattttgttgtggttttagcttagaattctttaagggaattgcagataaactacataattgcatgcatttttctttaaattgttcctcagaagcattagtcaaaatataaaatatctgcaaaaatacggtgttaattgtaaggaagaagaaacttaaacagctacattggttaatcaaagtttacttatacaaattatacctccccccaaaaaacctttctctcatttgattaattatgcattttttcttaacaataccccaaactcaaaagaatttgagacaaagttttctaactgcagcagtttaacctgtaaaggataatgtttagcgggggaaattatgtggtccactcaataacgtgtgactaagatataaataacgtgtgactaagatatgaacttaagtataaatacttaagtttatttaatcacattacctaagacatagttatgttgtgactcgaaggccaatgggccgctgctacatgaattcattaacaaaatttaacgatgaatgatattcccgttgttttggtcagggaactaatttctttattatggcttcttttctctacctgtgtcttcaccaaggacattttgttaggacatatccttatgctatttttaccttgttatctctctgccaacttggttcacgttgtgctttaataactataaaatgagcatctctaagtcactgcagtaaccaactataacctctcaacttcgtcattttctttataaatgccaatgctaatgcatttgtagaacgtttcacaatttacaaacagctggaatggtttggcgttttcaaaagcatataggcaaagggagttctcaagaggtgactacattcttcactcacttaaactacgtaaacttcgtaaacttccagccctagttgctcaacccccagcatcccacctcgggcagaatcacgaaaaaaaaaaaaaaaagggttggagacaggag

SEQ ID NO: 1819 - DNA, 2300 bp, Homo sapien
aaaatttattatacaatataaatttttttcaggtgcaaatatatacagagcttcataatcagcccaagaccacatagagcaaacatgaatgatatttcccaaaaggctgaggtaagtctcaaaagtaaaaataaaaataaaagagggaaatgtagagttgactgtagaattgctgaaaggacagtcatttggtggaaaggtcatatttaggagttcataattaataacataatggcaagatgtaaaacaagaagagatacaattcaccagctggtcttgggctagtattttcatttgggttctaggaaattctacaaagcatgagtagtaaatttgtgaatgatagtgaagtggatgtgatagctagcattctgagtagaattttaaatattttgttcttgataactcttagaaattattattttagtattaaaacaaagtttgacctatactcataggagaaaacataattccctcttaggtaaggaacctttttagtgccttatatatatattttaatttttagctttcttctggttcttgactgtagatactgagagttgtaagaagagctcagttgctgacacctcagaattataaagttaacccttaaatggccaatgacacataatagattataaaatacaagttggatgtgccacaaattaattaagtaattgtcattatcactaggaaaaaggatttggtgttctgaggcacacattttatttactgaaatttcatttagaaatcagcttaattttcaaagtggtgaaaataatttgctcttctggttttagagtggaggaaaatcatttcttcagtcttctaccagattcccattctttgtgaagctgttgccatatggaattcctcttacagcccgcccccatatagaatgatatagccttcttacacatttttaatgtggcttaaagaagttatagatgggaagtaatagtaacaacataaatcacagcttgtgcacacagaccacggtgtacctcagccacaaataaggactaaaggactggcctttggttttgcttatattggatatagaaaccaggaagggggtaaaatgtgaattaggctcaaactttaaagcctaaacttttgctttgttttcaacttcaccaaatttactgaaattagtttgggtacttttttagcaagtgatatcaaatctgaatctttaataatggagttagacaataaaagacagttgtttttaattagaattcagaatttgatttttatattttactggctttcagcttcagtggaatgctacccacaaaatgagatttcattactatataacagtgaaatttctactctcatattttctgtaatgtcatttttcatagttaggttttagaaagtatctaatcaggttgtgatggtcaaataaagggttcaaacacatttctattttctgtttcaataaatattttttatattgcttattcttatctatctttacctaatttcttcctatctttttcgttaactttcttttttttattttcttctaatgaagattctgctttcttcatctaaacctgtcccaaaaacctatgtaccaaaacttggcaagggtgatgtaaaggataagtttgaagccatgcagagagccagggaagaaagaaatcaaaggagatctagagacgaaaaacaaagaagaaaagaacaatatattagagagagagaatggaacaggagaaagcaggaggttattttattttactttattctcgtgaaaatatttgtttgcattttttcatttaaattgtatttattcacattaaccacatttcacattaactataactaaaatacttttctgtatttgtaacctaatttaaactctgcatataatgtgatttagtctaatttttggacatgtgctcacattaatttatttaaccatctagattaaagaaatgcttgcttctgatgatgaggaagatgtatcttctaaagtagaaaaggcttatgttccaaaattaacaggtaagaagcttgaggggtaaatagtaaattaaattgcaaaatagaaacataaccaagtatcaaacttttttttcatatatttttaggaactgtgaagggtagatttgctgaaatggagaaacaaagacaagaggaacaaaggaagagaacggaggaggaacgaaaacgcagaattgagcaggatatgttagaaaagaggaaaatacagcgtgaattagcaaaaagggctgaacaggtatcactgaagattaagttcgtatttgtttctgaaactaactgtgcaa

SEQ ID NO: 1820 - DNA, 2300 bp, Homo sapien
tagaatcattagactttagagaataccctattatttctggaaactgtgccaagagtagaaatggcaaatatgttttaaagtctcccatggaataacaccagttggttgaaggtatttgcttcaatttagtgttcagaagattctgctttaaattgccatgcttggcacaaaggatggaatattatctcccttctctgggaaggcatgttttccagaactaagtatccaaggaagaagaagaagtagggagtttcctccctcaacttttctttcttcctctccattctttcgccacctccttcccatactccctttctccctccttcattcctttatttccttcctttccttctttcagttttcatcccacctactatatattaaatgacctgagtcatttaatcagaattatttctctcttcaaaatgctcactcatcactcctggaaattgatacctaacttaactgtcacaaggttatgactgtacttcctataccagttttatgtttgtacaatgtacagttatctgacaaacaattttgaagcaatttgagactagagcactgcatctccttcttgaaacactgtaattagctttggtgatatcgtaacctggttttcttcctctgtatgggtgagcatcacacacatatgtccaagtgtttatttggctttattgcccacacagatactcaaatcagaaacgtggaagcctgaaacacttccatcttcttattcatgcctgatgtccaaccagtcactaagtctcgtttattctacctcctaaatcactatgaaatctgtcagttttccccccattttcaccgccactactataatccaagttactgttacaacttgcctggggccaactcctcattaacttgctttcttacctgtaacctattctttcctgtaaggccaggagtgatctttaaaaagaaagaaattttgattgtgttttgttactgttttgcttaatatttccccacttttcttaagcaaaaatccaaaaacttctaaaacaaatttctttatagtcttgctcttgtatattgctctcgtttcatttcttgattcttcctgaatctgctctttgttccaaatatgctgaatttgtttgtatttcttcaaagtgagactcagccttcacactgtctgaaagatgtccctcactcctttccctatgctctgctaactccaattcataactttccatttcctctggaaagcctttcctgataataaacaccttccatgaattcttacagcatttagtactcttctatcatagcgctaatcctgtattgttaccacttatggctgtcttttccactccatgaggccaagactgttcatcaaacatgtggcacaatgcttagcgtagcagacctccaataaatgttgatggaacaagtgatattgaaatcttacgtgcagtaggtaatccctgattcataaatggtttctacatagaagtcctacagacgttgtgaatgcacttaatttttggagaataagcaggtttagaagcggtagaagaagccgggcgcggtggctcacgcctgtaatcccagcactttgggaggccgaggcgggcggatcacgaggtcaggagatcgagaccatcctggctaacatgttgaaaccccgtctctactaaaaatacaaaaaaaaaaaaaaaaaaaaaaaaaaaaaaaaattagccgggcgtgttggcgggcacctgtagtcccagctactcagaggctgaggcaggagaatcgcatgaacctgggaggcggagcttgcagtgagccaagatctcgccactgcactccagcctgggggacagagtgagactccgtctcaaaaaaaaaaaaaaaaaaaaaaaaaaaaagaagcggtagaagagaagtaactgtgaagattactagacctagtccttggggcagatttgtaggccaatactgcctttttaccatgattcactagcggaaaaaatgcaggcgagaaaactgcattaaaacaaaaccaagtttcctaaagacatttctaaagagaagagagaaaaccttcctcttacatttatattgttttcttatccacaaataagtattgtaatttatccaggaataagtattgtaatttcataccatagcttagttcatgcatatgtaaaatttaaaaatttcaggcaatctttgaattgtaaaccacttaaacattgtttctgagttgaaatagttctgtggtaaagcctggattaccttgataaaacttggagcaaatgaataataccccttgcctctctcattcc

SEQ ID NO: 1821 - DNA, 2300 bp, Homo sapien
agcgagtatgtaaaaaaaaaaaaaaaaaaaattgaggtccttacatattttcaatattcagtgataactaaaataaattgagatatacataaatttgttttgagggtaaattatagcactgtggtaaattacattgatcaaaagatctgattgtattgcctaattaataaaatatgaaaaaatcaagacattttcaaaatacaactggaaaatttctacctagccgcacacccaacactgcttttactgtttttctatacattatgattaaatctgtagtcccatacgtgcactgatttttcaaatgcaaattccaccaaaatttatagggatggccatgaacactgaaaaagatcatcagagctataaatggatactactgccttaaaagctgattaaagggaaatgatggctcacctgtatctacattcatattaactgctattttggtgcttaagcaaatgaacacattacttttaggttttcagaaagaatgcagcatatatatatttctcacaattactcttaagagctgctgaaaaagtatttttttagacctaaccaagtaagacaaaatgccacaaagtcgagaaagttcattttacctcattgtttgttatttaaacaaataattttggaaaaaaaaagtcactgtgatatactcaataataaagagtaagacttctaaagtatcctcacgattcctggagcttactactattaacacagtaaattacatgccacgatatgttggagaaggtctgaagaaatgtctggcattacttggtaactgaagtacataacataaaataccaatttacacacacacacacacacacacacacacacacacatatatatatatatatacctagtcctgtgatgacaattcagaatatgatcttacatttgagtacccacaggatggggtgggagaaactacgcctaagaagctacaaaatctattttggtcaagaaacaatgctgttcttaacttaagagaccttaacaggccgggcgcagtgcctcgcgcctataatcctagcattctgggaggccgaggcgggtggatcacgaggtcacgagatcgagaccatcctggctaacacggtgaaaccccgtctctactacaaacgcaaaaaattagcccagacgtggtggcaggcgcctgttgtcccagctactcgggaggctgaggcaggagaatcgcttgaacccaggaggcggaggatgcagtgagccgagaccgcgccactgcactccagcctgggtaacagagcgagactctcaaaacaaacaaacaaacaaaaaaaaacccttaataaaaatggccatggacacatacatatactaggttattaaatctggctaacactgaactttaagaacaatcacgtttttggataaagaaaagggcagtcatacttttagagcctcatccacattattttaaacaaaaaacttaaaatatggtcgagaactaacaggcttccagcctgaattcaacacccaccctcgtgataaaactaaaaaatcggacagtctgtaagtaaaatacagggacactttactaccctgaaaatcatgctgggttcccgctacgccgggcagacgttttcaggagcatcaccgcgcggcgtctcggacgcacttctcctggcgccctccgggcggcagcgctctcgagacactgttgcttcgccgtcacgcccgtcgttgtcacgcccttccccgcggacaccgagaatgacccatagcggaaaattctaccgcactacctccctgaggcagcgaccggtaagaaacaaccttttcttcaggcttcccaccacccaaacacagtcgcagtcaactggccactatcacccaccaccctgcaggaacaattacccagcctcaccccaagaacgcgcggagaggaggtgccaaaagaaattctgttctcgcgaagtcttaaacttaatcctcgcgacgtctctgttcctgtcgttctttctcagccctaacccacaccagcgcgttgcctcggaaacatcgcgagattttgttccttcagtctccgcccctttacggcacgatggtcgcgcaagaatgtaatagagcttcgacggccgccattttctttctttcttagctgttagctgagaggaagtctctgaacaggcggcagcggctcttatagtgcaaccatggcagactattcaacagtgcctcccccctcttctggctcagctggtggcggtggtggcggcggtggtggtggaggagttaacgacgctttcaaagatgcactgcagaga

SEQ ID NO: 1822 - DNA, 2300 bp, Homo sapien
ttaaagaaatgtgaaaatcccttttcacccttttcagtgtctagggagccagatttctttccgtctgttaatatataatacaatttctcacaaatatgaaagacccggtcttcaggttctctaaaataatttactgtgtcaagttttgataatattcctagctctctgaaaatgattgaatcaaataagtgtctattttttttttctgcaaacactacccgccagaacaatttccggttgttaaatagtaaagtcaccgttcctttggtaaggaatatttaaaggaactcccttggaaatgaattttgtaataggtgatttttattctgtttttactctatgtgatactgatccttgcactggatttcagtttggcaatatgctttttaaaactgggagtcttaaggtgactggatattagcatttttcactaagttttttggatttgaaagtaccttttgatattatttcttggtgaggctaaaaaaattgataaatagctgacaaacctctgtaacctacaggtaggctagatcaatgttatacatttctaatgtcatggtgttgttaaagtagagaattttgaagagtagaaaatcgtagctgtcaaaatgcacaaagatgaacattcagaaagaattgctgaatcatcattgcttggcatatagagtaggcgttctcatttctttaaaggttaacacatgattattaccctttattatattctaaacatatatgtacattttcttttcctcataaaggttttctaacattttatttggactgtgtgcaattcttctgacttttcttatttatctctctaatagaaatgggaacatttttgaaaagatgagaaaaccatacaggagataaaagatgagttatatacatagaaaatgtctcataaatacctgaaatatgttatactttcaaaagcaggcatcaaaagggtatataaatgctatgatctaactttgttaacaaaaaattataaaactacagcaaataaccatgaagatttatagaaaacagaattagaagtaaatacagtaatatttaacagggattacctaaaatgatattatagggagatttttaaaaacttttttctgcgttttccaaaatctccaacaatgaatatatatttataattagggaaatgtgtttttgaaagaaaaaatatttctcatattactgccccttaagtggcatatccaaattttacattgatgcagttgcagttaagtcttgtaaggaacatgagtatgtactgtctgtaacctgatactttgttctagctttcctgcagcaccacagttctttaaatagggatcctgtggggcggctgcaggggacgggggttgaggggtggcagggacctcattcagttttagtttagttgaagtaactaagttcagatactaaaatttcaaaaataagtatttgtttgccagaactatgaactcatgtatactagaaataactagttagctaaaatcatgtttaagtcctttacttattttaaaataacgcatttgaattttattatagatactcccttaacaatgtgaaactagtacacaaactttctggcgtttctgattgatagaccccaggaattttgaagacgacataaattacttggaaatcctaatttaaacaacctgcgttttggtattatatacttaacagacaaatagcttaaaattaaaaaatccctaaagtagaattgtcgttccttttatctgtatattaactttaacttcttttaacatagggtgtttaatgactgtgatgattttcacctagtatggagtacataaatatatagttgtgacattctgtgttgaaatattggcatgttaacccatttgtcctgtttaattaggaaataaagacggtagagctagtcggaaaatgaatagttaatcgtggaggaggagaaaacatagctcagtactttgactagaggcagctgggaaagtgacgtcctgtagcatttgctgttctagaaagtacagagacacgtagtgaaaatgggaggatctagaaggaggctgtctcctgtgtagtgtatatttatctgtaagtgagccgttggggaaggattgaatacagagacgctgtctgcttgctgccttaagacagctagctgaattgctgattaacttttaaaatacccagcttggtttatttttcttagaatctgttgctaagactggggacgctgttttcttttacaaagggaaatctaagttaatttcaaggcattcgaaatggggaaagactattattgcatt

SEQ ID NO: 1823 - DNA, 2300 bp, Homo sapien
tgaaacgtcatttttccaggaacaccagtgttaagcagatggacctttctgtgctttactagtaaagttccatgaggtgcaaacacagcataggtgttatctaatttcccagcatcctcttcagggatggaacctctagtgaggttgtattcctttgctacttcagaaagcttctgtgtggatttaccaggaattttcgctgcatattcaggaaaatattttgtgccatatggagaattaaagcattccaacaaagaaaccattttggctccttgcgttgctgtctcccggacaaggctacaagctcgagtgttgttatctgatttgatgaagaaacttgaagctggatgagggccaagtggaaagttgccctggctctcctgggaagcaacagcagcagcactggctgagtgcaggtgtccctgtattacttttctaagtcacagaaacataaaacaaaaatgttaaagttatcctaaagtttttttttttttttcatctcgctctgttgcccaggctggagtgcagtggcacaatcttggctcactgcaacctccgcctcccgggttcaagcgattctcctgcctcagcctcccgagtagctggaactaccggcatgcgccaccacgcccgggtaatttttgtattttcagtagagacggggtttcaccatgttggccaggctaatctcgaactcctgacctcaggtgatccgcccgcctccacctcccaaagtgctgggattacaggcgtgagccaccgcgccggcctcctaaagaattcttaagactctcctcccccagtacatctgctaaccttaagttgagaaatatggattttcgggactgaattgatgtgagaggtgagggaagaggaaaaatcctgatacgacgactccacaatgtctggtctgggagtgcttggtgatcctattaactgaaatcaggagtaaaaaaaagaaaagatagatgcaggagaaatgatgaggtcagttttgttcagtctcaatttgggtttcctacagtacattccctttctggtagaataagctggagttggagacatttggtagacaacaacgtctgtgaaaccgagaatgttgatgtgaccatacaggaagaacatgcaaagctaagtaagaagggaagtttgtcgaggaaaaactgtcggtgaatgcaactcctggagactagcagttagcaaggagcagggtggggacggggagaggagaggtaaggaagccaaaagaggacaaaatttaagaagaatgaaatgggcaacgcagaccaagtaagataaaaacctaaaagaattacttgtatttggtaattaagatatgatagtgatttcactccactgaaattgcatagtaagtgaaatttcagtagtgtgggggcaaagtctgatcacagtgcttctaagagcagagaagtgaggaaatttcgtagctaataattcaagactgttttgctttgttgtaaaaagcgtagttggaggggactggacttgaaaacaatgcaataaacgcgaggtagggaattgagggaactcacacttcacaccgaatggcctcaattttctttgtactatatgaggcaaggtcctctgtagagactaagaagggcagagctggggcaaatggctttggaggcgtgctgaatgttgggagaggaagcagcccaggaaataggcaaaagggaaactcagaggtgccaaggacccggctgagggggtttatgaatacaacgtagcaccaagctcaaggttatgtgactttctcttccaattctgccctgcagagcgtaagacgcagaaaatgcagacgaaggttgacttctacttaaatccctatccccgaaagtccagacgtacggacccgaaggcctgtggccaaatcatgcgtgggtgcctactacagatttatgaaaagcagagaagggccagcgtgtttgccttctaaggcgtattgttctgtagcgtcggcatcctcaggcgttcacgtaaatagagccattttttacaaggagtagggataaacctggtgataggatgagggactacgtaactttctttctctccagatccatcccgggggaggctgggcgggcgggcggctgctccggtccaggggtggaggtcggggccctgacccgacgcagccaggcggaagcgcggctgccattggaggctgcttttacctgcgcggggcccggggcgcaaagtccgaggcgccggggggaggaggcggcggacggcagcgcaggtgggcccgcgctctcggccctgcaagatgcccctga

SEQ ID NO: 1824 - DNA, 2300 bp, Homo sapien
gttcttctacctgcaggaaatctaatgtttgctttgtagtgaagcatgcgaaaagttgaaagaaaggaagcaaaggaagaggcttggtcattagaagttcagtttgtgtgagatttcctttttttcctttttgtttttctctatcctgttataccatcatggtattttaattttttttttcctagctaatgggtaaattgcttttatattggtgtttgggacccactgtgaataccatggacagattcaccggaaaaaaaaaaaaaaaaaacaacaaaccaaggaggagaaaaatgttgtttcttctacttacttcccatcattttgtgaaggagagtcagaaaagctgttttctacacatactcccttctccctcaacccattcacagtgatttttgtcagcaaactaatatgccattgattttacagttaggatcagaaatatgcaccattcttgacttaaccgatttttttccccctgagaacaatatcatttttacactagagaatatgtgcaaaaacttattatctacaaagctgaatgtattttgcccttgccgggaacataaagggttaaattgaaggctcaacaaagactgggatgaaaagaggacaagttggggggccatagttgtttcctgtaggcattcactgttttgtagccagtggcatttttttttgtcctcatcactagctcctttaacacacctctgggatttgctctgagcttggctgaacactcttgacctttgattgtatagcagggacagctttattttatgaagctcttctgattcagacacattttgacatggcctaaaaagccattcagtaagtagtaaatgcaccctatttctgagtgggatgcaggttatggatgtgttaaggctcaatcaaggttctgttaggaattaggactggtgtgaaactccaggatactgggagagggttgagagtgaggcctgaggtaaggatccgggatggaggaagaggcttgcaatgcctgtggtggacattatctgataaatttcatttagtgatttcggcatgaaacagccatattaaaatgccctttctggcttattaaatagaagctactcagtacatgtttgttgaacttagcttcttaaccgatgataccttttcaaccctgcttctcttcttctataatttgggccccacaagttacccagattatggttgacaaacttgagtagcactgcacattttagtcaagtgagtcatatttttgaaggaaaatgaggtcaaataaagacttggtaaacataaaaagcccctttgaaatctccacacaacttttcaccatttggtttcttttttgctctctttttactgtcacatgaattggtacaagttgttttaaaatctccagaccccaattccatggcccccctcccccctttttaaattgggttaatagtctttaaagtccattttagttctaaaacatactgattttaacacctcattcactaaataaattgctttttttcaggcactataatgcaagataaataaaattgtctatatttaaaaatgtatttaccaactttcaaatataggcttgcctatattttaattgtagtgtatgcatgatgcagacctttgggactataacctttgatttcagcattataaaatgtcaggtcccttggcagaaaccactttaaaatgggtgagacctgaactcaaatccttggctctgacaagtactggctgtgtgaccttaggcaaattacttatttttaccaggcttcagtttcctcatttgtaatatggtgataccaatgtcctttataaagttactgtaaagatgaagtgagataatgggatgtaaattgtctagcgtgaagcctggcctacaggaaaccctcaatacatgttacctaatgctactgtctgaaaatgtgtcccagaatctctctagccaacataaaaacacattttatgatgtaactctttacatcataaattgaggagtatttcagtcaataaatgtttataaataaattaacggtcagatgtattccaagtggaaatggacctgacattttatttttctttgcagatcttatattgcactttaaacacacctaaaattgacatggaaagactcttaggaggacaactaggactagaagatttcatatttgcccatgtgaaaggaatcgaaaaagaagtgaatgtgtataaatctgaggattcacttggtctcaccattacagataatggtgttggctatgcttttataaaggtaagttttaaaaaataacagtgta

SEQ ID NO: 1825 - DNA, 2300 bp, Homo sapien
atatctcccttggctctggggcatgggaatttcagacattgtgctgtgccactcagggacttggaggaaactcagggctctatacactcctgttctgtagtctacctttcttgtctgtagctgacagaactgcagggctgaaggccctctcactaaggtccatctcatatcctcaggcttacaggagaaccacctccttttaatcccacaagtctgtgggtggggtgggcaaagaataggactcatcttttgctttatctccaaactcttgctacctcctctaattcataaaggttttatttactcttcccactgggggatggggagagacagaaggcatggctagttaaatagtctttgaaatgtattgcttatgccaagtcttcatgtctgaaagcttaaaagctaaaaattaacttcttttgcctcaatttgcatttcaactatggtctagcttttctgggggcagcagaggccaggattagtttaaagtgggggtgggagctacagggtaaacaaagggattgcaaggctatctcatgtctctctctcccctgttgtttgtgggttaatacttcataaacaacctgtcacaatagtttcgaaaacagtctaggttttctaaatcattttgagaactggattagttccatgtaaatatttatgcctcatctactatattctttatctatgaacattttttccctttctcagagcgagtggaaaccccagagaagggcaaattgaaacaattctagaaattaacaaaatgttaattaagttttcccttgctgaggggagagtaaagtttggcagtgtttcagagacgataaaggacttgtgcttgtactaattaagaatattactcaagtgaaataattggaagtcaatagaaaccccaaagcttagtaaatgtagagaacggtgttgggttggaatcaaaagggtaaaaggatatgtccaaaaagcagttggtatttttcaccggaatagttacgttagggcaattttgcacttagctactaaccagtacttctctccatccctaccctcattatccaggcttgattgtcacataaacaacctgctaatctatagccatgatggaagtcatggaaaaatctcaaaggagcacactttaaactcagttggcttgttttctcaaagccacataggaacattttcaggctgttaattcaccaggcagagcttccacggcatttctctttttcctttcccatttttctgccctcctgactaccttcttcatgttcttgcatccaatttctaaaagtataggtttatcctgggaaaagtctatctcatttctacatggctcattttagaaccctcatagctttctgatttttaaactatatatttttttcccttctgaatttttctttgctttacctggatagtattaccttactgttgaggagtaaatttttatctttgtatctccaacattgatatgaacatctggaaaatagtagttgctaaaatatttgtttaatatgaactcatcaatgaaagacatatctacttacttgtctgactgtctccccactaaacataagcactttgaaggtaaggacctgttttattcatttttggatccctagtgtctaacataatgcttggtatatcatagattctcaagcaaagtttactgaaaaaatgagtaataatcaggagtttatacatgtatctcagtatactataaagcaataattagctctgatgttataatttcagaatatactactgtagaagtaggtaaggaaaggtgactgcattggtcttcaaacagttgctgtgaagttaggcagaaaagggatgcaaagagaaataatttttttaaagagattacaagtaagtgttctctctctatgcaatctttacaaaatcaagcacatttccgatccaaggcagagaacgagtatttcctttactttccttgagatgaaatacaaactttaaatgcttccttgaaaattatgaaatcctttcaaccaaatggctgcagggagttgaaatctgagctgacgtctgagtcagacagttggaatagttttcatgagtagtactacttgtgccattgctgatttggtaaccacctcagagcctaccctatttattcccagcatggacctaaatccacttcagccaaaaatgaacaaagaaatgatgaagaacagagcctgtttctttctcagtggtgtactcaggtttgaaaataagacaaaatgattgtctgcttgttttctgtttccctcaagtttctgaaaggtcttaac

SEQ ID NO: 1826 - DNA, 2300 bp, Homo sapien
ttttggctggaagtgaaggttccccacacgttgatttctgattgagggctaaaagtaatatgtttctccacaagtattcttagaatttattgtttcttaaacatataaactctatgccatgaaaataacttgttttctacctctttccagatctaaacctcccacagtggaataatttttctccttattataagtgatttttttttaaatgaggtagttttcaggaagatctgcaggaaagtagattgaaagagtaagaattcagttatgataacccttggcttcttgaaagaaatatctctaactagttttcactgcagagtagttttttcctgcaagatctacattggtcataaaatgagttgatgaacaaatgcaggcctttcatatgtcgcttagtttatcctgatattgccctcccatgttattgtaatctattaaacacagacaactcatccagccaaatgtggaatcattttcattttatgtgttcactgactatgaaagtactgaaacacactgtatattacaaaccagcagctttctaatcaccattgtaccactgtcactgttatttgtacaagtgattctgcttctggttaactttagggtaagaagcaacagaatgagagattttaaagcagtaatctctgtccaactgcaaacactgcagatgtgtgttttgaaactggaataaacatctctaaagtttgaaatctaaagaattatccatgtaaaacttaaaaaaaatcgaaccattttagaaacatatttaatggaattcaaaccttctgctctggctatttttatacagaaatttcagagtaaaaaatttactaataatatagttttgaaaaaatctaaggcaagaaagagattggaatttcactgaggaatcatgacaaagaaatcttatattgtccagacacaaaaccgtccttcatttatttgtcaaatgcgtattgagggtccactatgtgttaggcacagtggtaagactgggaaaccaaaaccaaccaaccaaccaatcaaccaaccaaccaaccaaccaaccaaccaaccaaccaaccttactttctcaaagagaagtgactgtttttaattttattgtattttgaggtatttatttaatgctaaacagtataccttattttttccttgatttatagaaccatgtaggtgctacagttggaatgtcacctccaaaaatcatgctgaaatttagttgccagtgtaatagtattgagaggtggagtctttaagaggtgatgagattatgaggattctgctctcatgaatggtttaatgccattgctgggggaatgggttatttattttgggagtggtcttgataaaaggctgaagtttggccccatttctttctctctgtctcctgtgttctcttgccatgagatgacttccttcatgagatcatgcagcataaggcctttgccaggtggccttgctattggcaccatgcttttgcacttcccagcctctagaaccatgagccaaacaaacttctattctttataaattacccagtctatcgtattctgttatagcaaaagaaaatggactaagacagtgggacagagggtaatttatcatatgacaaatattgatcttcaaggttctgttttcatctaccactaccatactaaacttgactcctttttgactccctaaaaagacacattttttttccattagccatgcttgttaaaaatttagggctacttttagggttcaaataaaagatggattatataacaactttttttttaagatactaggtttccttgcctattgtttggcatggttctgctgggaaatacggtttctctactggccttagctttcttgtatcctgatatcatctctgatcacccagttttgacctacaatccgtttttccaactttttgtctgcttttccagtttgagccctagctcagttaaattcttttggctcttggatctcctgcatcacttcccagtcaatgatttcctcactcctggcacagaattttccttggatgactgttctgttagtgtgaatcattcccccaccccagccaccaccagtctttggcacaaccatgaggaaatgtagctgtatgcctggagggatctacagccagaccaggtaaatgcctatagcctctttcttccaaaaggagtttggtacttacttttatattgttcatgctcttattttgcaatactacttataaaaagctttgggttatgtatctattagatttatccaagtcctcacaactaggctctgaagagtgc

SEQ ID NO: 1827 - DNA, 2300 bp, Homo sapien
aactgatttgtttagtaaaaaatgaagataaaaaacatcatgtatacaaaacctaccccctttattgagccagctttttattctgactgtattgcttgtacacatacaaccgacgaattacgtggcagaggtgcctggtgagaaatttgagactagatttaaaaaatcacttattaggctgggcatggtggcttatgcctataatcctagcactttgggaggctgaggcaggtggatgacctgaggtcaggagttcgaaaccagcttgaccaacatggtgaaaccccatttctactaaaaatacaaaattagccaggtgtggtggcgcatgcctgtaatcccagctgcttcgaaggctgaggcaggagaatggtttgaacctgggaggcggaggttgcagtgagccgagatcgtgtcattgcactccagcctgggcaacaagagcaaaactctgtcttaaaaacattacctgtttatcaatattgatttttcttaaagggcagtttggtatagttatacaatagcataaacatgggatttagtttagctagacttggcttagagttctagctttagcacttagccttaggaacctaacaacttcaggagagttttcttatctacatgataatacaacatgccttacctagtttttgagagattaagtaatatactgatgtaaaagtatttggtgaaatattatagaaagttagtattatttctctgatatttttcagatagatacccatcctgataagacaatatactactttgttagccatattatctacttccagcagcttctggcttctgtattttttggtagaaaattactggctactatgacccgttacttccatcttggaatgttgaaggattgtttcccctattccttatttgtgaggtctgcttcatgtttcatgtagaacttagttcctgcctcttatttggaaggtcttgattaatattccatgggaaacattttactcatttaattattctaatactacagagtttctttacttcttttaacttggcacaaaaattttcactcacctgcaccttggttttgacttttgaatcttatctgtctcctcaaactttctgtcttttggcttttttttcctgattgatttccttcattctaaggacaattcaagatgcgtatggaacgggagagagaaatcatccaagtagagctatgaaacactttattatagaaataaaaacatcagtgggagttgtttatagtaattcatgtaagaaaataattggtaagaaggtattcataaaatagtcagctacataagtatgttgacattatactgcatagtaataaaaaggagaaaatggtacccagtgggttagaacctaaaattaagaatctatgttagaaaagacacagatttgctaaagatgaaagatgagttatcctatatgtaaagtacctatgtgaaaatctgctgtaaggttgacgctgttaaaaattataattcggataaaaatgagagaaccttagaactaccattttgagatcatattaagaggctatgtgaacagagagaaaaaagtgattaacgtgctaattcaaaatataagattgacatgaggttggattttaacagtcatgagtacttcaactgtcaagacatatgctgcaagtcttcttaggctaaatcaagagcttctaacaaagaatgtttaacttgtgttgctgacaggtttcatttcccagtaggtatgagaattgacctggttaatgaaacggtaataataagaaatgcatgacaaagtgactgtgtcatcttagcagatcttcgtgaaccagaattcttggctcagaatataaattttagccatagaagaagtgaatgtttgaagacacattaaataaggtaatgcacataaaacacttagtataaggttttatttcttagagctcaatttatagcagtgtataggagaatgtcagttttccttggtcttggactttcaacaaagtattgtgcatttaacaaaacaaaacactttcctagtttgttaaatataaaatatttttattaaatttaaatttcttttatagttaataaagatagaccttttttttttttttttttttttttgagacggagtcttgctctgtcgcccaggctggagtgcagtggtgcaatctcggctcactgcaagctctgcctcccgggttcatgccattctcctgcctcagcctccggagtagctgggactacaggcgcccgccactacgcccagctaattttttgtatttttagtagagacggggt

SEQ ID NO: 1828 - DNA, 2300 bp, Homo sapien
cacaaaaaaatgacaacaaaggccaaaattgacacatgggatctaattaaactaaagaacttctgtacagcaaaagaaactatcatcggagtgaacaggcaacctagagaatgggagaaatacctaatgtagatgatgggttgaccaccatggcacatgtatacctatgcacatgtatctcagaacttaaagtataataatttaaaaaaagttaaaataaaatattaatgactttcaaagaaaaaaaaagtcaagaaacaatagatgctggcgaggctatggagaaataggaatgcttttacactgttggtaggaatgtaaattagttcaaccaatatggaagacagcatggtgattcctcaaggatctagaaccagaaatatcatttgatccagcaatcccattactgggtatatacccaaaggaatacaaatcattctattatgaagacacatgcacacatgtgtttactgaagcactatttacaatagcaaagtcatagaaccaacccaaatgcccatcaataacagactggataaagaaaatgtggtacatatacaccacggaatactacacagccataaaaaggaatgagatcatgtcctttgcagggacatggatgaacctggatgctatcatcctcagcaaactagcacaggaacagaaaaccaaacactgcatgttttcacttataaatgggagttcagcaatgagaacacatggacacagggagaggaacaacatgcaccagggcctgttagggggtggggggcagggggagggaacttagaggacaggtcaataggtgcaaaaatttcatgttttttaaaaaagaaaaaaattatatatgcactcacatattttaaaaaataaaggaaagaatagtactctgtgtcattcatattttcagtatagcttatcacataattgccttttggatactggccattcatgtataatatttctctagtaaccaggttatctaaccaaaatgtttaattccctcaccataattaagtaacagtttagtttaccagttatgatcatatcatttaaaaaaatctcaatatctaccacaagggaaaactgcaatcattcctttctacagttaatggctaatttattttatcccgctttttcattttttgatcccttccaatttccaggaatttagaggtcccttctggttttagaacggagaaacagggttcgtttccatgtggtactgatttttcacataggtagtggcaacattttactacaataaaaagagcaaaagtcaataatagattcacataagtgtttagctacaaaaatgagacacagctaatgggtgtgtgtcgaagcaatattagataaaagcaattacagaataaaatggctcaaatcgtaattcctaatgaaaaatagattacttcatcataaatttatctccacgaaatttattagacgcatatctcttggggtatacatatcactagaaattctctctccagtggacttctaaaatcactgaaatattactaatcccttatctgcaggtgtacttcaagaagtcatctcatcccttttccttttcatattccttagaaagctggaaacagtcccagtcctctgtgtgacagtgaaccctgaggctgcgagtgttttcatttacaatactgggcttgaatacctgtttttaattccctggagatatttgccacaaaattctccctcaagcacacaacctctttctacctggtttctttatgcgtttcgagctggacttggaatgaattgtctgcaagctaccatccgacagtctaacacaccatcttaggctttcctcggctctccagactgctgtcttgcatccccagagatggcttggggataaaaatgagtttaaaaccaaactttctttagctggtccagcggctaagtgcagctctgatgcatccgagcacggtgccctcttctctcccagtactgctctgtgcccatggaaaagggggcggaggcgagagagaagaggaagaggcggaggtcactcgcgcgccccatccctcccaggctgccagcgcagctaggtgcagagggatcccaggagccgcgcgcgccccgcagtttccgcgctaagggaacgagtgcgcggaggggacgagcggctggaccacagccggcgcccgatcaggatctccgcgctgggatcggtggaacttgaggcagcggcggcgcggggcgccatggcacaccgagcggctccgtcttctgctcctcagagagcccggctggcggcctgggatgacaaggtacca

SEQ ID NO: 1829 - DNA, 2300 bp, Homo sapien
tagtgtcctttgtctgtcccaagatccatttaagatctcacaatgtatttagttgtttctttagtctcctccagtctgtgacagttccttagtctttccttgtctttcaggatcttgacacttgaagaattctgggaagttattttataatatgtccttcagtttgagtctgtctgatgttttctcatgattagatgaaagttatgcaaaaataccacacaagcgatgcactcttctctgtgaatgataactggggtacctggcatcaatatgcccatcctggcaatgttaactttgatcgtttatttgaggtggtatctgtaggatttatctactttaaagttactgtttttttcttttgaaattaataaatataccaggggagagtctttgaggctatataaatattctatttctctccaaatttatactcattaattttagcatacattgctggatgatgcctataaacatttattactatagagtttacctaatactgattttctacttcactaatttttcctacatttattaattggaatttagaattgtgaattctcactcatttatttacttactcagttatttatttatatcagtatagatatttactttattctatggtgataatccaatactcttattgtttttttctctcaaattgttcggcttttggtcatttctctgccttctgatacgccccatttgtttttgagcatcttcttactttctggcatgagaagatattctacgttcattttgtagttttgtgatcccagacctgtagtcaaacatttctccaagtagccttgtttccttttattggagactgatatgacacgatagctggctaacaccttgagtgacagaccctgagcagagaatccagctgagtcatgctaatctcctaatccatggaaactgtgcaataatatatttgaattgttttaaagcctgtggatagtgataacttgttacaaagtaagataaaactgatacaccctttttttctaagacattcaattttgatatgccattcctctgcttttagagccttaataacttctcattgtcttaatgataaaatccaacttaattaaaaacttgcaaggccctcttgcaccctcgtcacctccctagccccaccgcttatgaatccaatgctgtcactccattccagacagaccgaaatacttggatggccctgatgacaccgtgttctcctgacttccttgctttcatttcatgtctcagtttaaactttgatttgctagcaagccttttacaagtgccccaagactggatgaggctactgttctcctggctttcagagaatcttgtttagtccttagcccagtaattcagttgtctgtgtctgactgtcttcttgagtatacagcactctctttgagggcatttttttcattttaatttttatgttttaaatcttacccaccgttatccttccccagggtctatgccagtgtggactgagtgaaggagtaaatgagcaaatgaacagtgtaatgccttatgaattcagcaaaagccgaatcatcatctgtttgttccagtgcagacaggcttggctttgaacagcatccagctccacgattctatcagctaaattttttttttgtactttaagaaatagggatagtcatagtgtttactgtacgcagttgttctgaggagaaattaggaaaaggtatgcagttacacaatgccacgtacaactctaaattccaattaataaatgtaggacaaacgagggaagtagaaaaatgcacaagaaatgttaactattagctttactgcagtttcttcttggtagttatcatttcatgcctgcctacatacatacaaggggaccagtgatagtttttatgtgctcagcaagattttttttttctttctttctcttcctagtgaggaaaaagaaagttagtggcagttggcatgctgccagctgagtttttttgctgctttgagtttcaggtttctttctttctcttcctagtgaggaaaaagaaagttagtggcagttggcatgctgccagctgagtttttttgctgctttgagtctcagttttctttctttcctagagtctctgaagccacagatctcttaagaactttctgtctccaaaccgtggctgctcgataaatcagacagaacagttaatcctcaatttaagcctgatctaacccctagaaacaggtaagcgactttttaattgaaacatagtatttgtacgtatttatggggttatgtgtgatattttgatacaagcata

SEQ ID NO: 1830 - DNA, 2300 bp, Homo sapien
gcctgtgatagaagggcccgccataagatctctgacatgcccttgagacattttccccattgtcttggtgattaacattcaatttcttgttatgtatgcaaacttctgctgctagcttgaatttctccccagaaaatagggttttcttttctatcccattgccagcctgtgaatttttgaactttcatgctctgctttctcttgaatgctttgctgcttagaaatttcttctgccagatacataaaatcatctctctcaggtttaaagttccacaaatctctagggcaggggcaaaatgctgccagtctctgctaaagcacagcaagagtcacttttgctccagttcccaacaagtttctcatctccatctgagacctcctcagcctaaactttattgtccatattactatcagcattttgttcaaagccactcaacaagtctctaggaagttccaaactttcccacaattttgtcttcttctgagtcctctaaactgttccagcctctgttggttacgttccaaagttgcttccacatttttgggtatccttatagcagtgccccactccctctgtaccgatttactgtattagtctgttctcacactgctataaagaactgcctgagactgggtaatgtataaaggaaagaggtttaattgactcacagttccacagggctgaggaggcctcaggaagcttacaatcatgtcagaaagggaagcaaacatgtccttcttcacgtggcagcaggagagggaaatgagtgcccagagaaaggggaagccctttataaaaccatcacatcttataagaactaactcactatgatgcgaactgccccatgattcaattatctccacctggtccctccattctactgttcactgctatcctcctccaaactttactctgcactaaccatactgaactccttacttcaaaaagctgccacaggggtgattatccttgccattctctctgcttataaagcacttttcctagatatttccatggtactccctctcactccattcaggacacttctccaatgacatctcattagatagacctttcctgattatgctgtctaaagtaggagatttcttcccacatcactcctattcctcctctttttctcacttaatactccaaaactctgtttatttacttgaaaagtggcaataatattggtgtcctcatcataaagttattaaaataaacacacgagatacatgtaaattgtcttgcaaataatgtctataataatataatttttaaagccaagtatataatacctcataagctgcttaaaatatttttatttgatgatgctattgtttttaatagggccagcaaattaaaaaaacctttttagggcaggcaggtaatttaaattttttagaaccagtcaggtataaagcaagaggggacaaaggaggactggagagtggatgcccaatgatataaaagcattcacgttcaacaattaaaaactataaagacattacattggccctacagaacaaatgtgcggattgaattctgcctataggacacgaatttatgatccttagcaatgtgaagttagagaaggggttttattgtgaaattgacacaggttgttttatatcttataaatgaagtctcctcattttcctgtggtcagaagagagggggcaagcagaaaagcagaggaacaaatttggaggctaaaataacattctacataaggaactatactacagtagaattaattgatagcagggattaagagatgtaaatgaatttgagatacatattctagaggtagaatgtgcaatactttttgtatgtccatatacagaaattggttgcattttccttaaataaaaagattttttaaaagttagtgagctgttatgttttcttccctctgacttcaattccttgattctttcaatttttttaatataaatttactgtctaaaagctggatcagcttatgctcctttgttgagagaagttggcatgctgtcaagtgggctgggcacactgagtttcagtttcctttctctgagtctttgaagcttcaaggctgctgaataatttccttctcccattttgtgcctgcctagctatccagacagagcagctaccctcagctctagctgatactacagacagtacaacaggtaaatgtctttctgcttttcatttttcctagctagcattagtctctctctgtctctctcaggtgacagtgtcacttgccaatctcagtttttgttttaatttaaaaaacaataatttatagtaa

SEQ ID NO: 1831 - DNA, 2300 bp, Homo sapien
tcatcctccacctcccatatttacataattcactgtctcaccttcaagtttcagtttggaattagcaaccgtcttcctttatggcatttctgatacctctccctcccccaactgtactctcttcttgtttcatggaatttgtcatcttcaaacacacttacaaatatactttaatattacagttattgcttgcttgctttcttcccccaagatccccacctaaagtgaattacacaaaagcaaagatctttgatgtatgccaagcctctagaattgtgcttggcatatagtaagcacacaataattcagtaatttaattcatccaaccgagatttgaatggtactatgtgccaggtagttaagcacacagatcaagtccctgttctcatggaacttacatactagtgtagaatacagacaaccaccaataaatatataatagaatcataatagaataccaagtagtgataaatgcttagaagaaaacagaacctagaaaatggatagaatgccaggggtattattttacataggatgatcagttctttcaagtggcggtattttagcagagtctcgaagaaaatgagaaaatgaagtgtaaagacataaccaagttgttagggttctaatctggctatgctattgatctccttctgtagaagaggacacattttacatgatgatagaagctgggatgagagaccagcagaaataattttgatgtttgaattgctgggatccccaaagatgttttggtttcttcccttctcaagaattcctcatcctctttctatgttgagaaccaccccagacacttccaataagtccatctcttctattttagtgggattagagggtggtttaagctgttctgagttaagtgtctattatctgcaaccagtcagtgtcggtacacctcacgctgaccatatgaaataggtactactattcatagatttattttaaaacaagaaagaagaagttcaaaaagaataaaaattatccgaatttgtacatctattaagtggattaacagaaatttgaactcagaatggccttattattttgcatttctctcagatattaatctgcattgggcttaggagtgttgactctgtgctggacaacctggtttttaccttagctttcatttaaaatttttctttgtcacaaataatttccttatttatgaacgtaagttaataatagtacatatcttagcgatttgttgtaatgttgaaaaatatgaacacatgtaaagcccttacaatattacccagtacatggtaatctgttaataaagtattggttattattattattatcattactgagcttgctgggtcagagttccacacctgtatgttctgttttccttaggtttttatttttgtgattggtctatagatcaagttcgccactccttccagaatgagtagcaccaagaccacagcagatctatgcctagcccaatcctagctctcctcttacaaagttgccccctaactctctcaccattgcctgtgccctgttcctttgccttgttcttgaagacaatttataattgtcctgtgctcgctctttagcccttcccatttcactttacttttcctcactggacaatctcaccagccctccagcatcaattatcaaatctctttaaatgaattcccaaatctattatggctgtattagtttcctatcactgctataataaagtacctcaaatttaatggcttaaaacaataaagatttattatcttataagtcttaaggtcagaagtcaaaaatcagttgactgtgctgtgttccttctgcagattgtggggtagaatttgttttcttgccttttcagcttctagaggctacttgctttccttggctcttggccccttcctcatcttcaaagccagcagtgtagaatcttcaaatttcttcttgtttctcaaacctctgcttacttccaccatcacatttccttctttctttcccttatagggactcttgtgattactttgagcacactcagaaaatccaatataatctcccatctcaagattttaggggaggagccaagatggccgaataggaacagctacggtctacagctcccagcgtgagcgacgcagaagacgggtgatttctgcatttccatctgaggtactgggttcatctcactagggagtgccagacagtgggtgcaggccagtgggtgcgcgcaccatgcacaagacgaagcagggcgaggcattgcctcacctgggaagcgcaaggggtcagggagttccttttccgagtca

SEQ ID NO: 1832 - DNA, 2300 bp, Homo sapien
tgcatttccaactgtttggaaccctctgttcccaagtctgttggacaccccccttcacgtcatcgaagtgcctgcttagacataatctaggagacgtcccttggacaaccctccatatcactttctttcttcttacccagggttacttttctcattgaataatttttcatctctaactagaatttaatgtcaacaatgcaaacaactttttctgttttgttcactgttgtatttttagtacctggattaatgataaacatctagaaaatactcaacaaacttgtattgaataaagatacatatgataattatgcactgtggtaaatgacatgagtaatttactgtaatgaaaattaccacacgtttgtgagacaaaattgataaaatacagcattgttgcaatataaatttccattctgccacatagcagcctttgttataatttgttttgtgtttcactgttaaggcattgtttcaatcacattagtggtattttaaatatgacaaaacaatactatgtatgtaactttttctcttttttcatcagtaaagtatctttttttcaggtcacagataggtataggagtctatgtgcattttggaattactcacctgataccatgaatggcagctggtcttcagagggctgtgagctgacatactcaaatgagacccacacctcatgccgctgtaatcacctgacacattttgcaattttgatgtcctctggtccttccattgtaagataattttccccttcatatttataaatgttgctttttctgttttttttccgcatcattcgagacaatatttaattttttatatatttttcttgggtttagatagcacatttagtataagagataaaaccccaacaggatctttctttctgtctgttttcctacctaccttctgaaacatatctagtatgcatttaagattatttctagtctaagacttatctagtctgtaatatctggtagattacatattaaattagcttgtaatgctgctttcaagagccatttgcccattttaatgtatcacggaatttaaaggcacttttttgtgatgacagtttatttttactcatgacaaagctcctgaaaatatttgacagttgggcaataagtattagcacacttataactaacatcatgtttttagcaatgtagaacgccacaagatttttaaacatgaagaatctctctaaggtgaatagtttcatgacatttatcttacttttgtaatatcttacttacattgtatatttatcacataatttcttattttatagctctgtgctatcatctccattttaatatatttatttataatctatcattaaatatataaagtaaccaaataaatctacctgaacataatgtcagtcctaacaatgattttttcctgaacttaagcaaataaacatctattccgtatataaacataagtattcatctagttaggataaaaccagcattttctatttcaaagtttctgaacaatattacttgataatccttatattctgcattgctaacacctttgtttcacatgttttagatgaatcactgcatagacataagacttagtcttaccactgataaatctgttttaattaaccatgttcacattataataatcgattgcctttctaatgtagtgaaattaatgacgataacattgttaaaccatgtactaatactaatactatgcctagaaaaaaaatcaccaattacagaactgttaaagtgctacatgatttacatcagatttatgtggatattgaggattttcaaaagtacaaaatttttctcatctaaatgcacatttatatttttacattttatgaacattttgattaatgtttcaccaaaaaaggaagttcattatatgttgtagttcctttgacaacttagtgagttattcttttaactgctttattattattttcccttagggtattaaagattataatattcttacaaggatcactcaactaggaataattatttcactgatttgtcttgccatatgcatttttaccttctggttcttcagtgaaattcaaagcaccaggacaacaattcacaaaaatctttgctgtagcctatttcttgctgaacttgtttttcttgttgggatcaatacaaatactaataaggtatgtaggcatcctaatctctatttttgtcctatgatatgtgtactttcttaaatgtatatgtcctagaaacattatttgtaatttagggtttaatggggcagacgttctctataatttgttcttcagc

SEQ ID NO: 1833 - DNA, 2300 bp, Homo sapien
gtcctatatagctttctcacttcattgatttcatgacaagtgataaccctagtctgcactaccatctgagtgcttctgtctttagcccagcctagaatgctttccttgatggttctccatatcccaaggtcacttgtcattacttctcccctactttattttctgttaattcatttctgtggagtggtagttcctgaatacacttagaaatagaggatgaggggtgagggtgctacaggagcatttgtgtttctttggaagtggtgtgctcatatttctgggtagtacagattttgaatatatatacttgtcagaagaacaagaactgttctaaccttttaggcctgggctattagctgacctcttaaatctagtaccatcacctttctagtgaatggagctttctttaagaatgtagcaagaggctcactttccattttcagttttggtggtgtgaatttggatgtgttttctaggtctttttgttggatttttgagtgagaaattacgaacacctgcatttaagataactagctagatgacattttaaattagactttggttacacaccctttttctacagcaaacagtattatgccaccctattagttttaaataaattacattataaatttaaggttagatgttcatttattaatttaatataaagtatctttaagacgtcaaacctggggtagaaacataaaaatttttgcattaattcaaggtaatgatctagactcctcagttccttagaatcttttctctagtggcagattatttatactgtacttataatgtgaagcatatttcactgtagtaagtaaagttttaaattaagaatatatactatgtaagcttaaaacccagcacctttattacagcctcaatacatggcttttgagaatgtaagacttaattctatataatgtattactttatttatgatgattgtgtatgaagaaccatagtaaaatataaccttgaacaaaagtaataagttgtggtaaaattttaagggaattcaatcacacgttctgctatatcttagttttttaggttaacttaaatgcaaaaatgaagctttggaaagaaatcaggtcgctcttttatcctccagattacactgagttgttgaaatcagtttagtttaatactagaaaacaaataagtttaaatgtgtttcttaaattgggtctttgttaaattagaactaaatgttacatcatcaatgatggaaatttctgtaatgactttgttgattaatcacgcaattcagaaagcaatttgagaatttggcccatgaataatattttcaatactctgtcaaaattgattggaggaattaaagttaaaaagtatatgcatctaagtttgttctgccattgtctaaatgatagtatttctcttgctttcttgtaaaatttgacatgaaactgctaatcataagtaacactattttcaacaaggtagcaggcatatgagcactaaaacattttttcaaatattagtatttccagatatagatgagtgcagtgagtcagttgcctgtgatgatcattccatatgtgaaaatgtgaatggtgggtataactgctcctgcaaagaaggttatcagacatccacaggaaaatcacagttcacacataatgatggcgcttactgccaatgtaaattacattattaaattttatgtatgatcaaagaactatataaaatatgtagtacacagttgtgaagtatcacagagctacatcttccaagaaatgtgcctgcattcctttatcttctatggaacaaagaaatgaaagcctattttttttaatttaatcaaaattgtagataatattttatggaactaacatttcttggcccttaaaacccttttatttcattttctgtaaaatattgcacattctaaaactgaagaggaaattcaagtgttagagaatgtctttttaatatttaaataagtgagaaagatcattgggattgatatgatcagcttaggaaaaatactttttaaaactgactgtataatctattttctttttttacagaaaatgtgaatgcaaactgccatttagataatgtctgtatagctgcaaatattaataaaactttaacaaaagtaagtagaacagttaacaatttattttattttgacattttggtttcaattaaaatgctttcaatgtcacacatttcaagaagagtaaacagtagtcaaactttagggagagtcgaaaacgtttacatatagagatctaagcatcatgtttgcatcaaagatagggtta

SEQ ID NO: 1834 - DNA, 2300 bp, Homo sapien
gcatttaggacttttaaatcactttttcaaactccccgaataacaatatctgatgactcctcattcttgcaacagcctcctgagtgtgatgtctgttaatggttcttaatctcctagaactcgaaggtcaggaataaagttttgttttttggctttttgttttgttttgttttgttttgctccatgacacttcattcagtgcccgagtgtgatagatatggaatttgaaaatgtgctgattgattggataaattaagagtttctagaatagtgcataatgaaattcgtcaaaaatgcccatttgtggccaggagcggtggctcaagcctgtaagcccaccactttgggggaccaaggtgggcggatcatgaggtcaagagatcgagaccatcctggacaacatggtgaaaccccgtttctactaaaaatacaaaaattagctggctatggtacatgtgcctgtagtcccagctactcgggaggctgaggcaggagaatcgcttgaacctgggaggcggaggttgcagtgaacagagattgtgccactgcactccagcctggcaacagagtgagattccgtctcaaaaaaagccactcaaaaaaagcgtctcaaaaaaagtccaatatagagaacatggactgtgagtttatagtccgggttccaatcaaggccagtcacttagaccagctgtctaagagctgctgtggactctgagcaagtcacgcaacacctttgttcctcatttgcctcacctattatggtgccactctcaggaacttttgcccacattcacctagaaggagtctgggaaaatgctatggagagccagataaacgtgtcaatacataagcacttgtgactgctgttaatatataagtcactttgtggtgtgtgattgtgactagttttagttgttttcccagtagttcataatccccctggagtccgggggctgtggctgttcatctttctgaggctgctctttatataaagtaaatttgcactagtcactttttaaacagaatagaaatggtatgtgacaaaggtgatctgactattgaaaggtaaaatggcttgtgttgatggcaaaaatattagtcatttcctttctttaaatcaactttatttaaacttacatataatacaattcatctaacttatatacaataaaatgcaccagttttaagaatacagttggataagttatgacaaatgcatgcactcatgcaaccatcacctcaatcaaaatatagaatattatcatcacctcaatttctccttgtgcctttctgcagtcagtccctcttctgcatcccaaccctgggcaaccattgatctattttctgtcatgatacattagttttgtctgccagttatttttaattttttaagctagaattgtttccatgttccaatgtggacgatctctttctacgtaatcgacttgtatattaacatgcaaaggatatgatgcaccaatttttctgcagatgtaaggaagggctacaggtgaattttacctgaaattgagttgataatggaaaacacaatctaacctagacacaatagactatatccttattttacacgatgcaaccctgagtcccagcaaggtggggcctgagcactggcatgcccctttgcatggattcaggtctcctgactacttcttgacccattgttctttaggaaaatttattggcgagtatattaaaaaaaaggctatgtcttgaaatttaggtgtcagagagaacccctgaaacctactgagttttggatgctccctctggaggggctctccgtggatctcagagacctttgctttttaagtactcacttttagggtgtcactctgggagctgcgcctggggataaactgattcctcagtggggctgtaacattgctcagggtcagtggtcactaggcagggaatggagcccaggaggcgtggggaaaggggatggaggccggacgtggccagcggattcagggcttgactcacacactcacacaaaagaggccggaaagtgtccggaggaagccggcgcgtcacggaggacggatccgggaccctgccgcgcccgcccagcggcgcccggtcccgggtccacagccgcactcactccgccgcgctctccgccaccgccaccactgcggccaccgccaatgaaacgcctcccgctcctaggtgagtgctcagcgcccctggtcgccgaggtcgtcggagggaccaatcccttgtaggggactggattttttaagaggtggagctcacatggcaagtgtatttggcaaaat

SEQ ID NO: 1835 - DNA, 2300 bp, Homo sapien
tcatacaatgaccagaaaaagccaataacaaactcatcttttttctacattcagtagacaccatagtaacacttcccagtttacagataggcaatgaagttcaatggaaacagatttttaataattataattataccttacactgattaagtgtttacccaggtgctatgctaatccttttcctttatttcttacaccaaccataaaagtaaggttattttattatccacattttataagaaagttagctaacttgcccatggtcagacagataaatgtctgagtcacaaaactggtgtccagaaagttatgactcagacccctaaatatgccatctggaaggcatccctggtttcaataaggggcacctaattgtggttacatgtcaatatacaatctagcactactggtactattatcactcttctttatatgacaagacatttatatttacctttccttttctattcatgagagtacagaatacatcataatttctgcatccaatttttatattaaatgactggtaaaggaaatataaacactttgctgtgattttcaatattttttctgcaaaaatttatgaaacatctacaatatgtaaaagacattttcaaaatatttggggagatattttagaggaaatcgtatggtccctgattcaaaagagtttacaacctgaaaagtaatattaacacctcagtaacattacaagtccaacctgtgtacaagctgtgtccaaatagaaaaaaacctgagaagtcacccaaccacttagagagcaatcagactattggatgtcagagacataaaataactattgtcttcacccttttactttcaggcaattgtctcctaaacactgttatagtcactaagtctgcatactttagaaactccagatcgtcactaaatctcatggaaatgtgtattggcattttccttgagatttcttttaaagtatcacttctgtccatcaagtcagagtccttataagtgtagtgtgtttaaattctttatctttcctgacagtctatagagtcccaatagcagcaaaaatctaactgaactccctactactccctgcaaatatgctcatatgtttatgttgagagttttaatgccatttgttgaaatatatttaacctatatcacttggttcacaccaagttaatgctagctcctacaaggctatgatcaattcagtcaactagttggtttgactgatttttcctttgaattcacctaattgctgggctgtttaagtatctgcagatacctttacacaaaagaaggcaggcttcacattagcttgctaaaagagggttattattttcttctgagatctgctatggacttattgagtggctgttggcaagagtaatgatcatatttgccctctcctctttctcatttttaaaacaagaatatgaatataaaacaacccagaaaaactccaaagatgctaaatgaataagttaataatcattgtttatttaaagatacaactgtattgtacaaagagagggatttcttttaccctgaaatgccaataagaagccatatgaaaaacaaaaataacaatttaaagagatttttaaaaagctcccattcagtagtacaattgggttcttttcagataattaatcattaagaaatatttaagtactattttctatttacattgcagtatatatcactggctctttgaaagttaacagggattaattttctttcaaaataaatattccacttaactaattgtctgtgttctttcactgctgtctacgccattcaagccaaaacaccgatctcattcaaaactcagaatttcatccaaatttgtgtacctggccactaataaaagatttttggtatgctgtctaaaatcctaatgacaaaatagggagaatcataaaatgttcataaaaatcggatgggatcaaacatcagctaatctgagtatatttttctctatgattaaccagttcttaatgacaacatttcttatcttacaactgtgacatgaagagggagctgtagctcttctgagacacagttctgcaagaaccagcttatccacgctctccgatctcgtgtctgtttctctttctctctccctctcttgcgctgtccctcattcatgcactcttccatctttttgccattgtgccagctcaatttaaatgtatctgctctgtatctgttcaagtggagataatccatgcaaatcaggagccgtggctctcaatgcctggttcacagagaggactcagcttgaggaggtcactcgttcacag

SEQ ID NO: 1836 - DNA, 2300 bp, Homo sapien
cagcttaatcttgaatctagcaatataattaaacactatttcaattcttctttgtggatatacaaagaaggttgaagtattacctctaaagaataaagaaataattaaaaatctttaatatttaaaacattgtcttacacaagcagtattcttaaatgtaattttaaaacatagcaagtctattatatttttaggagaaaagtgtggaactctttgaactctatagaatacacatcctattgaaataagatttgaaacttctatggggcatttttctagtttgtataattttaattcacttttgataaattcttcccccttccaagcatcctccttttttgtgatattgtctctttaagaatacagtgaagagtgattcacttatgtcctgagcatcaaagaatgtcaaatatatcatgcagatagataatgggtttttccagagattatttctgagagagttaaataaataagtaaatgagccaacatatggccagcttaattcaggcaaaaatgtctattgattacttactaagctcactaaataaaaacttcagcctaagttttgcttcccaaaagaaaataggattagactgatgcatgcactcattggggcttttgtgaatggtgcccagatgagtgaaaaccttcaaagatgaacaaagaagggctaaaatattttggtaaatgcaagttactatcagtttgacttattctcttttgcaatcctgaatgaaataattttatattcctaagaagatcataaaattacctctgaggtctgagaattagataattctgccttcttttcaacgacttgaagtagcctgatttaattttgctaggtagatctgttgtatgtatgtattttgacatatgtaaaaacttaggtacgttataaggttttgcaccagctctgcataagtgtactttatccagactagtttatatcctgcgtggttaatatttgaattatgttatgtaagaaattccagatgtaagtgtgtatgtagtttaaagcaccaatgctctaagttgctccttttatcttttgaaatagtgagaatattaaaacatcaatacatcaggtagaagaaattagattatcaaaggttcttttttaatctgagaattacaatgaaaccaccaaaagaacatgttctagttatttggacacacgtacatttaacctatgatttcctacaagtcaagaacaaacttgaccagtagttggattggatttactttagtactacacctatctggctttctgacaaaatactgataggtatttaggatcttcatgtattttgaacaatctgctgttgacatattaataacattgtttggaatgattcctgaagtatgatgcttgcaacattcctgcagcaccaaaaagtacctattgtttctgaaagcaaagcagcttaagttttatcctactttctaggttttaaatattggagaatcatttttttcttgaaaaaaaggtaaatatgcttatttaattgatggctgcattcattagtagaatcagtggtttacaaatacatctgaaaacatagctgcttccagctcagaaattttgcaataaaaaaaaaatccatgtttgaattttgtggcatgcacaggacacttaactggcttttaaacgtttttccagcgtgattcgccctgtcctgctctgttcctttcagcttaggtccatcgtaggctctgcctggctgtttgctgacattgccaaccgagaggggcaaggaagtgtgttcagaggacaagagcaaaggcagtttcaatgtaaggaaatgagggaaacagacctaacagctctgtgactatacttgagagtaaagagccttgtagtctcctttccttcctttgcttatcctggtgagtttaatcaaaaacaaacaaaacgctcttgtgaaatatagtcaataaagtcaaagtttagctggctctacgtaactacaaagaaaaaaatcatcgcaatttaaaaaaatgtaactttcattaacgagcgcgccggaaatctcaggtatcaaagacgcattaaccctggagcgtcccccgcgcgccgcagccggacggaggcagccgcggcgaacagacgttctttctcctccatgcagttacacaaaaggagggctacggaaactaaaagtttcggggcctctggctcggtgcgtggagaaaagagaaaacctggagacggggtgggtgaaagacgcatcccgggcgcctctccgaagtccaggccgggagcaagctcctgggcctagaggggagggggccccgag

SEQ ID NO: 1837 - DNA, 2300 bp, Homo sapien
ccaaccccagaagaaagtgaagtccgagggaactgacagctatgtctcccaactgacagcagaggctgaagatcacctacagtcccccaacagagactctctttatacaagcatgcccaatcttagagactctccctatccggagagcagccctgacatggaagaagacctctctccctccaggaggagtgagaatgaggacatttactataaaagcatgccaaatcttggagctggccatcagcttcagatgtgctaccagatcagcaggggcaatagtgatggttatataatccccattaacaaagaagggtgtattccagaaggagatgttagagaaggacaaatgcagctggttacaagtctttaatcatacagctaaggaattccaagggccacatgcgagtattaataaataaagacaccattggcctgacgcagctccctcaaactctgcttgaagagatgactcttgacctgtggttctctggtgtaaaaaagatgactgaaccttgcagttctgtgaatttttataaaacatacaaaaactttgtatatacacagagtatactaaagtgaattatttgttacaaagaaaagagatgccagccaggtattttaagattctgctgctgtttagagaaattgtgaaacaagcaaaacaaaactttccagccattttactgcagcagtctgtgaactaaatttgtaaatatggctgcaccatttttgtaggcctgcattgtattatatacaagacgtaggctttaaaatcctgtgggacaaatttactgtaccttactattcctgacaagacttggaaaagcaggagagatattctgcatcagtttgcagttcactgcaaatcttttacattaaggcaaagattgaaaacatgcttaaccactagcaatcaagccacaggccttatttcatatgtttcctcaactgtacaatgaactattctcatgaaaaatggctaaagaaattatattttgttctattgctagggtaaaataaatacatttgtgtccaactgaaatataattgtcattaaaataattttaaagagtgaagaaaatattgtgaaaagctcttggttgcacatgttatgaaatgttttttcttacactttgtcatggtaagttctactcattttcacttcttttccactgtatacagtgttctgctttgacaaagttggtctttattacttacatttaaatttcttattgccaaaagaacgtgttttatggggagaaacaaactctttgaagccagttatgtcatgccttgcacaaaagtgatgaaatctagaaaagattgtgtgtcacccctgtttattcttgaacagagggcaaagagggcactgggcacttctcacaaactttctagtgaacaaaaggtgcctattcttttttaaaaaaataaaataaaacataaatattactcttccatattccttctgcctatatttagtaattaatttattttatgataaagttctaatgaaatgtaaattgtttcagcaaaattctgcttttttttcatccctttgtgtaaacctgttaataatgagcccatcactaatatccagtgtaaagtttaacacggtttgacagtaaataaatgtgaattttttcaagtagttaacatgtgaacttttatgtatgatacataattggctttaacatgttggtccattcccaccttggtttaagtaacgtcataccaaagtccatggatatatgaaaggatacaattaagttgcctgtttgttctttatgctgaaaggaatatatgtcttccaattgcccactacatatgcacaaaatctgctggataagttttaagagggatatattctgaaagcatttttgtttgttgcattgtaccaggactaaaaaaagaaggattggaagttctgccatcaaatttgggtatcataaaaagtttttaactgatttttcagcagtattgggaagtttcttaaacatactttaaggattataaatatccctatagacagctgtgaataccaatatacattaccctggaaaagttttactccaagttcaaaaatcatataattgaatatcaagaaatagatgttttctgtttgtatcataagcatttatagaaaattattctaaagcttaatggtttgctataattctcaaatactaccactagcttataaatcacttttatgtggacacacacatgcctattgaatttaaaaaggaatgagatttaaaaattaagtgcatatatataatatacatatatatatatatata

SEQ ID NO: 1838 - DNA, 2300 bp, Homo sapien
cttataatatagcagaaattgtattctatgcaaccaatgaaatgtgatgaaaagtcttttagccattatgtaagcaaaattttttaagacctaccaacactatgctctctcttctctgatctataattatacttattctgtttacatgcatctatctgagcacatgaatgcatcccatcttgcattaattaattgcttccctttcctgagttttatctccatctggatcagctatagtgtccagctctatgctgaactcgtagcataataatgcacttcaatatattttaatatgttgagtcatctaaaaaacaaataataaactcatatatagaaatatcttctgacttctctttatccttcataccttttgagaatgccttattcttggccattttccccttatttttgctgctgagttgaatttccatagccctcatatccctttttacaatctcttaatccctcctcattcaaagcattcgaatttagctttactattgggtgactaccaagtgaatcatttggattgtgaaaaataaccctagatcaatttcttttatttcctcactacactgtttcaggcctgttttacttctttctttatgagggtattactctggcacacatcccgattgatggaggatctccagaaaagagtgttaaattaaaaatatcagttactggcttacctcttaatgaagcagctggcttaagaagctttagatttaaattatctgccccggcactattattcagtcttaagtgaggcagtgcaccaactttcttataagtaattggctgaaactaaaagtctgaggcgcctacattaacagaccgattagacacattatggggactggagggggcagttcttttaggtgaagtcaagttcagtactctgaatagtactacaattgaagcgagtgttaaattaatttacagtggagctcatattagcaataagagaatcagtggccaaactgatttgatggatggtctcattatgatacaccatagatcaaaaagatttctattatgtgacaaaatctctatggttcccatttattttcattagttgtactagtaccactaacatttattttttaaataggtatttcttattttgtatacataaattattgtaggtctatatagtgtcagttgatttttttgtgactcagggaaatgatatagtttgaatgtttgtcccctcaaaactcatattgaggccgggtgcggtgactcatgcttgtaatcccagcactctgagaggccaaggtgggcggattacctgaggtcaggagtttgagaccagcctgaccaacatggagaaaccccatctctactaaaaatacaaaattacctgggcatggtggcacatgcctgtaatcccagctactggggaggttgaggcagagattcacttgaaccaggaaagcagagatactgtgagccgagatcgctccattgcactccagcctgggcaacaagagcgaaactccatctcaaaacaacaataacaacaacaacaagaagaaaaaacaacaacaaaaaaccctcacattgaaatttaattgctattgtaacagtattaaaaggtggaacctttcagaggtgattaagacatgagagttctgccctcataagtggaataatgacatgttcatgggagtggatttgtcatggagggagaaggtgccttataaaaagataagtttggctgttttggtctctctcactctcttgtccttctgccttctgccataggatgatgcaggatgattgccctcatcggatgtggacctcttgatcttagacttcccagcctctaaaattgtaagaaataaatctctgttccttataaatcacccagtctcaggtattctgttatagcagaagaaaacagactaagacaggaacacagaatctatcattggggttactagtcttggccctctttcactttcaagtaactgaaataatgctttttatcagccagctattgtgtgtcttgtaaggttgactcaacgtttatgaaatcacagggccagagaatgctagaatgttagaattctcaaagaccttagagatcgtctactcaaccactcttgctttgcatttgagaatttaagtcacttgaccaaagtcagacaacagtgattatattactacagtgattctggagtgttctcaacaaataataacctcagaaacaagtaggcacttggagacattgggctgtggattcaggttgcctaggtttgaatcctagtcccaacatttactaaggctctctg

SEQ ID NO: 1839 - DNA, 2300 bp, Homo sapien
gccttaagtgagagcggaatcagccctcagtttctccatttgtccctaattattgtagtttctcagggtaattaaatttgaaatattttagtttgttcatcgaacctacagtatattaaaggtaaaatatgtaggacagcatctaaacaatacccaattgaacgggatacaattctcattcaattaataaaagattgtttgagtgcctggtgtctgtaaaaaagacagtatgaaagatgtttcctggcctcacacttgccagtagaccaggaaaataaatgaaatgagattgaccatcacgccacaatgcacttagaaggcatttcactgcctgtgaagaatttgtttttgcctctcctggcagccatatcagttgtgagatggaagtttggaagatagctagaatgcttcgacgaaaaactttgaatgatctaacctgggcaatggtggatccctgccaatttgagggcataggaatatcatgtgcatcacaatgttcataatggttactccagcagtgtgaaaacccatgaaggaaactccaagactcagggaatccaattagaaagctttcacaaaagatcgacatgaagtgacaagttcttggattatggtggtgaattttttttttaattggaaaagcatgttctatttggaagaaacattgaagtctcctttcctcctggtttgctgtagttgcagctttgtgtggcaagtaacacttagtaaatcttccttacttttttactgtactataaatgaactttcttacatagcttgtttctcagccctttttaattagaatcagaataggagaatgggtatctcaggctgtgagtaatttgatatagaacttttcacctccaggtcagtggtaagtgaaacatatttatatattttaagtgaatttattgctcttgaagggatcccagttgtaatccttgacaccagaacacttattgccagaaagcccacgggcgttgaaaacattgatcagaaagtaacagagagaaggggttcaatttcaaccgtttttcactgtttggcttcccttacaagaccttcttaaattgttttaattaatcctagttatgattctatttttaaaggctgatatctatctgatgacaaattggatatgaatcaataagatgggcttatttcaatttagagtatgagctatcctgttgcttaaaaataattacccatatctgaaaaagcaaggaatttactacggtattcactttgcactagggggaaaaaggaatgagtgataaaaattgtattacaaatttcagtaataggaatatggcttttacaattagaaaataatagcactgattacattgatcttggcatcaagggaattagaagttactttttctggatgtgtgtgcccatttaacacccctagaaatgaccagaatggattcaaccctgtccaattcctcagcttccaaggcaacacatccatggcaacaactaagcatcattacagtttctcaaatgtgaaaaaaataacaatttcttaactccctttaccccaagcacattttaggcaatgtaaaaatataagaaaaaatttcagttttatcatcattgattatatatatactctgtcagatacattactagaagatgggcatataataattaataaaacaaattacctgtgtcttagcttgaagtactctgaatgcataacctagaaaaagagcttgcatgcagaccattagggacaggaacccaagggacaggaatgagagagaatgaaacgcaggagggaaagccaaaccaaaaatgaatgcatcggccaccactataggcaaatggtgttccatcctgccagactttctaaggaggcttatgaaatgtatttcagaattgttcacctggaagataaaatggaaatgattttttttttttccgtgggctccggctctcctattgtcaagcgtgacctaatggacgtgaacttccccacactaccaagttgtgtgactggcacagacgtgccatgcagcagcatcagggagtccctgtggaacctaagaaggacactgtcaggttcacctgtgtgagcttggccagaacctacgacagactatatggtgcagctgactggtggaagagatgaggctgagaagacacgaaaggcttatggtacactcttcccttagggtactcaatattcaatgcataccacaaaggcataccttctctgaaagaaagaagttaaagacttgcatccttttagaattattctataaagtagataggcacagattaaatagatgagc

SEQ ID NO: 1840 - DNA, 2300 bp, Homo sapien
ctttgttttttaataaagtggggaaacataaaagccttttaaaaatattggtggccgggcgcggtggctcacacctgtaatcccagcactttgggaggccaaggtgggcggattacaaggtcaggagatggacaccatcctaccatcctggctaacacagtgaaaccccgactctactaaaaaaatacaaaaaactagcctggagtggtggtgggcgcctgtagtcccagctactgaggaggctgaggcaggagaatggcgtgaacccaagaggcagagcttacagtgagccaagattgcaccactgcactccagcctgggccacaggagagactctgtctcaaaaaaaaaataaataaataaattaaataaataaataaataaatataaaaataaaaaaagtaaataaaataaaatattggtgatattgttgcttatattacttggcttcaagtccttggagttctatgaagccacatttggaaacctctgtcacagtggcaaaatgttgtatttattcttacatcaacttgtaaggtagctaatggctacaggtgttattaattacaaaagaattcggacttgctcagttacttcgataggagcatggtcgcaaaatcagatctaatcaattccagagacaatgctttgaaggtttagcacttcttgttttgatcattgagatatttaatcctatattcttattttcttagaatgctaaagaagcatatagatagatttaagtggtaaacaattttaatgctgttgatatctccctagaaattttttatctttaattacaatagaagggggataagaaggcaccaacatttacttagctccagttatgtgccaggtactctgcataacttaattgacatttattcattccttaaccaatatttttcaacagctggcacattacaaaaaagtgcactcttgtgataagcaaaaatagacatgctccctacattcatgaaaggtacatattccagtgttagacactaaccaaattcataattgtaaacaatgctaggaagaaataatacataattttatcctcaacaatcctttaaagaagtacactgtcccctattcataaattaggaggttaaagagcttgtccaaatctacaaggctagtaaaggtcagcatggctgccaggtatggctcagcaagtgttgcctgaaacccttctgagggcagggggcattattcacatccactataatgtagctgaggcttctagagttttgaagtgtatcacccgcacaatcataagtgtggccttaagtgagagcggaatcagccctcagtttctccatttgtccctaattattgtagtttctcagggtaattaaatttgaaatattttagtttgttcatcgaacctacagtatattaaaggtaaaatatgtaggacagcatctaaacaatacccaattgaacgggatacaattctcattcaattaataaaagattgtttgagtgcctggtgtctgtaaaaaagacagtatgaaagatgtttcctggcctcacacttgccagtagaccaggaaaataaatgaaatgagattgaccatcacgccacaatgcacttagaaggcatttcactgcctgtgaagaatttgtttttgcctctcctggcagccatatcagttgtgagatggaagtttggaagatagctagaatgcttcgacgaaaaactttgaatgatctaacctgggcaatggtggatccctgccaatttgagggcataggaatatcatgtgcatcacaatgttcataatggttactccagcagtgtgaaaacccatgaaggaaactccaagactcagggaatccaattagaaagctttcacaaaagatcgacatgaagtgacaagttcttggattatggtggtgaattttttttttaattggaaaagcatgttctatttggaagaaacattgaagtctcctttcctcctggtttgctgtagttgcagctttgtgtggcaagtaacacttagtaaatcttccttacttttttactgtactataaatgaactttcttacatagcttgtttctcagccctttttaattagaatcagaataggagaatgggtatctcaggctgtgagtaatttgatatagaacttttcacctccaggtcagtggtaagtgaaacatatttatatattttaagtgaatttattgctcttgaagggatcccagttgtaatccttgacaccagaacacttattgccagaaagcccacgggcgttgaaaacattgatcagaaagtaacagagagaag

SEQ ID NO: 1841 - DNA, 2300 bp, Homo sapien
attaaatataataaatattactattatactatatttacaatattatatactattatatttatatttataaatatgttatataatagttatatttatattatatatttatatttatataataatatataaatataaatataataactatattataaatataatagttataaagacaatatgacaaataaatattaaccatttaatttatatcagtcactaccctaaggattgttcttttatctaatacattttattctaataactctgttaattaggaattcatgttcccatctaacagattaagacattgaaggacaagaaggtcaaataaagggctgaaaaaaatctcgtaacttctaagtgaaccaggcagtttccaaaacctgccttttagctattaagctataaatatttgaaaaaagtatttacattgacaaataactatgaagtttttagaacttatgaagatcatgatgaagaaaaaactatttgtaatattatcaaattgcttattcctttctgaagtcatttattcaatatcatttatttgcagataataggtaccaggcattgagaaattcagaataaataagaaaatggaataaacaaagggttataaaaaaatctaggatgggttattcattttaaaagagaatggggcttaggtgaaaaaaagcaaaaatatacacaaggacttgaacattctaacataatgagcaagtcataccctgccagatgcacgagagtggatgacaggatgtgctggaaaggaacatgggaagtacctaaaatgaaaaggacctgaaatgcaattctaaagatttcgtctaaaagaaatggcaagttggcagataatttttaaattcaagtgtaaataatctgataagtattttagaaagctgactggatggtataaagagggtgcattagagaaggaaaatatgggtggcagggagatctatgagggttttgtgatgggttgaatggtgtcctcccaggagatatgttgaagccctatttttggtacctgtgaatatgacttcatttggaaataggatctttgcagatgaaatctagttaagatgggttcattaaggtgggccctaattcaatatgactgttttccttataaaaaaaggaaaagacggagaaacggggagaagaatgccacataacaatgaaggtagagaatggggttacacagctacagaccagagaacatgaaggactgtcaccaacaccactgctaagagaagggcacagaacaggttctcccgcagagcctttagaggaagcaagaccctgtcaacagcttttctgagttctagccttcagaactgtgagagaataaatttcagcttatggtactttttatatgacagcccaaggaaactaacacaagtattggtggaacacttcttcaacaaatagcacttgaattaaggcagtggcagtaaaaatggagaggaggaggtatgtggtagaccagggatatatttgctaaaggacaaacgaagtaatgagacttagaaacagaacgatggagccacaaagaatgcctgaaatggtaataggatacatgctggaatgttgatgggccccatttccacaagcctccaaatctgcttctagatcccattcaagcaagggaggatttgttaagaagaaaggccctttgagagcaccagtccctccaccagccagtctagtcctaagagctctgaaggccaaccttggaggtggttcaggagggaaaatgcaggacccaggatttcagttgccaagccagagagcaggggacccaggaaagaatattggcattcatttgatttttccatcttctgatataaccttcaaatgttaatagtgtgtcgaagaatttattggaaatgagaaacaagaaaacagtgagtctaacctagtcattctagaattgggaggtaatagaaaagagagaaatgggaaagttgctcaaatgcaagtccagtgaatcagagagaaaaggctcaaagcagcagaacaaagcttcaataaagagatattgtgacttggagagatggccttttgtcctttgttctattaccagtcagaggatggggagcacacccgagcctgagacaacagctctgctaagtgcccttgagagggcacggtggggtcagcaccaaagtcagaccactaaagagaaaaagagagaaagacaggattgcagaggagaaatgagaatggcagaaaaaataattttttaagccaaaaggaatcagagaagagcagaagtgcctctaggataaagcgtagca

SEQ ID NO: 1842 - DNA, 2300 bp, Homo sapien
tgtatgtgaaaaatctaggtatataaaccttaatacaatctaagaaaataccatttcagcatattgcctcattttcattaaaacgatgaaaatgtgaattcagaaaaccacttagtccttaggctaaaaataggtagatcatcaaaacctaatatcattttagtccaaattgatatttgtttagtaaatcttctacatcataatgggagaagtacaaagggaaactcaaatttgggggagaaattgaggggagttttaaaaataagcaaatttagctaattccattctgtttgactctccccaaactggagtcagacttgtcttgaaacaaagaataagtagatacctcagaaattagcttgatttcatattttagcctcaggtttttcagtcaaataatacttctatttgctttttgaattcttgttttttcctgaccatttctcagtttctaaatttcatctcattcagcttcactttttcccagtgaagcactgccacgttactttcattctaaaggtgctgggtaaatcttgtctattttttggttattttaatgaaaatattttcttatatttataagaaaaagcaaaggcagattgtgcttctacattatttacatttatttacatattatttaaatttttttcttagcaaattggcccacagacagtgtcctgtttttctgagcagtaggtaaataatgacaacttctgtaagttctgtggctactcagaatctcttgagaatatatgtcctgctaaactgcaagagggccacttccggacctgaaatggtctaagaaatgttgatcatgcttcttcccacacgtgctagaaatttccacgcagtttgcagatccagcctaggtacttgttagatgggtgattacaaatttcttacgggctgtgtagcaccatcacactttgccaagtaatctccaagctttgggaaaataaaacaaagctccttacaaacactggattctctcctttccttacttctttagcgtcctacttatcctctactttattgtctctttttcatatgtaatagaacatacactgcaataggaagctgaagatgtgggttcccatcatagttccatcctggttcttttatcgactagctgagtggaatagggttgccaactttgtctatctgagagttttgttgtgaggaaaataacaagcactagtttttggagtaaagtataatttcctcattgcatattaaacccaactcacccgattgtcagaaagattctatctagtttgtgattctaagtcggggggggggggtggttagcgttgagtttcaggttctataagaacgggactaaggaaactcattaccaggtggtaatcatcttcatctattcaataacaccgtttggtgtacacactaaattgtggcactggagactcacatagaactgaagtaactcaccagttcctagaggcaggtgggcacgtagggagagagaggcagcggcgccttccaggcgctctccctggtacagaggcggcgggggccagggctgtcaggacacccaggcccacgtgccaggctccggctcacctgcccgagggcagagcgggaagctccgcccctcgcggaaccccggcctgtgcgcagttcccgtgccctaggagttggcggcggggcccagccgaggtataagttccacagcttcacccttgtcggtgtgatatgggcgtgaaagaagacataaaacaggcttcccgagtagaacctgccaccccgggctggtggggacgcggcaccaggccgggccgggggaagccgctcggacagtggtccttgggtgagcgccttcttcggggcccatgggccaggccagtgcggcccgggacgccccggaccacctggggaagaaccgcccgggccggcctttggctgtcccaggcagcggctggagcccgagtgggccctggcgggatctgggacggggagggtctgcggcgcagccaggaggcctgggaagtcccgaggtgggtagagaagggccgcgagggggcgctgagacggcgagtggccgggcctgggagtgacagttgtcaggagagcagtcaggacaccgttgctcagagtccaggccggttaggaccagagcctaccccgggtggcatggtgatgatccagattcaggagacatgtctgagaaaggatcgttcagactttttgacctattttacatgaggaataaaggatagaggtcaggaaagttgtccaaaaatttttttcattgttgttaaaaagttcatttagtgtaaaac

SEQ ID NO: 1843 - DNA, 2300 bp, Homo sapien
ctaaattgtgctattttatacggttatcaaaaatactaagattttttagactgagtagtgttttgactattgcacagcaatggactctcattgtttttgaaatgttttattaaggcagccttcaatctttgatattgtaatagaaacatacggtgagaatatgcaaattcaaactcttgtcctctctaagaatgggtgcaaacatacaaaaaccctttaagtattaactagacactgcagtgagaaaaattatcaaggataataaaactctatattaatatatttagtcaagttctgtcctgttatagctatgctgctgttagtgttagaataacttgtaaaaggtcaagaaacaataatttttttaaacctacagcatgctgttagcagtaaaaacgttacctgtgtgttcataatatattggatttagaggaaaagtatatgacacagtgtatgtgaaaaatctaggtatataaaccttaatacaatctaagaaaataccatttcagcatattgcctcattttcattaaaacgatgaaaatgtgaattcagaaaaccacttagtccttaggctaaaaataggtagatcatcaaaacctaatatcattttagtccaaattgatatttgtttagtaaatcttctacatcataatgggagaagtacaaagggaaactcaaatttgggggagaaattgaggggagttttaaaaataagcaaatttagctaattccattctgtttgactctccccaaactggagtcagacttgtcttgaaacaaagaataagtagatacctcagaaattagcttgatttcatattttagcctcaggtttttcagtcaaataatacttctatttgctttttgaattcttgttttttcctgaccatttctcagtttctaaatttcatctcattcagcttcactttttcccagtgaagcactgccacgttactttcattctaaaggtgctgggtaaatcttgtctattttttggttattttaatgaaaatattttcttatatttataagaaaaagcaaaggcagattgtgcttctacattatttacatttatttacatattatttaaatttttttcttagcaaattggcccacagacagtgtcctgtttttctgagcagtaggtaaataatgacaacttctgtaagttctgtggctactcagaatctcttgagaatatatgtcctgctaaactgcaagagggccacttccggacctgaaatggtctaagaaatgttgatcatgcttcttcccacacgtgctagaaatttccacgcagtttgcagatccagcctaggtacttgttagatgggtgattacaaatttcttacgggctgtgtagcaccatcacactttgccaagtaatctccaagctttgggaaaataaaacaaagctccttacaaacactggattctctcctttccttacttctttagcgtcctacttatcctctactttattgtctctttttcatatgtaatagaacatacactgcaataggaagctgaagatgtgggttcccatcatagttccatcctggttcttttatcgactagctgagtggaatagggttgccaactttgtctatctgagagttttgttgtgaggaaaataacaagcactagtttttggagtaaagtataatttcctcattgcatattaaacccaactcacccgattgtcagaaagattctatctagtttgtgattctaagtcggggggggggggtggttagcgttgagtttcaggttctataagaacgggactaaggaaactcattaccaggtggtaatcatcttcatctattcaataacaccgtttggtgtacacactaaattgtggcactggagactcacatagaactgaagtaactcaccagttcctagaggcaggtgggcacgtagggagagagaggcagcggcgccttccaggcgctctccctggtacagaggcggcgggggccagggctgtcaggacacccaggcccacgtgccaggctccggctcacctgcccgagggcagagcgggaagctccgcccctcgcggaaccccggcctgtgcgcagttcccgtgccctaggagttggcggcggggcccagccgaggtataagttccacagcttcacccttgtcggtgtgatatgggcgtgaaagaagacataaaacaggcttcccgagtagaacctgccaccccgggctggtggggacgcggcaccaggccgggccgggggaagccgctcggacagtggtccttgggtgagcgccttcttcggggccc

SEQ ID NO: 1844 - DNA, 2300 bp, Homo sapien
aaatacaaattttgctctggtacaaaagttgcaaagcacacactccagcaaattaagtaattatttgtgatttaagataatgcaaatgagtggccgagaaactgggctgttatcatatatcagacacttatatatatatttttgtggccaaatcatgaatttaaaagaaaaatgaactccatgaaaagacttattacttgttgatcatctttatggtgattctgtaatatcccaatttttgcattattttttctaaaaaaaaatccatagcatatttaagaattcacaaaatggagtcataaacagtgtagtcactgtaatttccttcattctgatacccttattctcttcttccacaaatagcaaattcttctttgggatgcatgcagagaggaaaagtatctaccaaatgtggatgttaggtagccataaaaaatcaagtagctagcaataatttgggaaataaacaaatcatttcagcctaaaaaaggctcagaagatggcttgaaaagcaaaatacatctaacttataactttaggttgccaattcttcaggctgtgaattaaaccaggccaatttgcccctctcagttctcctgctttggggccacttcttgaaataactttcagaatagtaaaaggaggtaaaacattcatgaatttcgaaaataattagcagctaaaagaaaataaaactgttgggagaagaagtttaaataaattctaagaagtgatggctgcactgatgatttcaatgtcaaagtagtacggcttatatttttatggaaaactgaaagctcactcttggttttaaaaactgtattcaagaaaaggaagtaaactgctatgaaacttatgcataacaactttggacaagaacacttcgttctctgttttgattttttaaaaaccctcaagggtacactgatgacttgtaatatgtgataattgaaatcttctattcacaatcctttaactgtttctgtggtgcaatgagaaactactgtattagaatttgcaatataagttgatttcaaccttgagagatttataaaaataagtttgtctcattatcctgtaacactaaaatgagtgaaatgtgtcaactcttctacttctgcgaaacaggagaaattgtatttaaccacatgttaaacccatcaaagatatactttccaaataaaaatgagtggtataagacataaaagccatatagaaagattttgttaccatcattttctgttcctttatgtgattatgaaaagtaaaaatgaaagctagtttacattttatttttaacccattggattgtcttccattttatttatttatttttatcttctttttatttatttatttattttattttattattattttttttttttgagacagagtttcactcttgtcacccaggctagaatgcaatggcacaatctcggctcactgcaacctccgcctcccaggttcaagtgattctcctgtctcagccgcccaagtagctgggattacaagcacttaccatcacgcccagctaatttttgtatttttagtagagatggggtttcaccatgttggccaggctagtctcaaactcctgaccagcggtgatccactcacctcggcctcccaaagtgctggaattacaggcgtgagccaccgcgcccagcctgtctttcatgttagatcataatatgatctcaccagatccttactgaaaatgtaccttattacaagtagctaaatttccacatagaggaataaaaagattggagaatcaggttatgacttttctagcactttacagtgtgctatagtaatgataaacccgttttaaacttcttaatcttatcatcaagcaacaccaggcttctaaatctttttgtttcatttaaaatggctactatatatgagaatttttaaggtattatactaaaccctttttcaggtcaaaaggcatgttatctagaaaataatttaacactgtaattggatcttcaagatcaatttgttttatatactctgcagcaaaaataacatttctagtaggaaggaattaattataaacctagcagattctagacattcacatatttgtgtaaacaattttaacatggtttattacgtttccagaaaggttaagtcttatattccattttctgctaattcttctttcatatatcatttaatataataaatatatgttattagggtgcatatgtgcatatattttcacacatatatatgtcttatatacataaaacagcacttaatggtcatgttctttgcatgttcaactt

SEQ ID NO: 1845 - DNA, 2300 bp, Homo sapien
tcttattaatttgatactttttaatggtagatatatttcgaataatatgtaaagtaactctgtagatgactacattctcaacccttttaagggaagtgtgccattccatttaattgggatattatctaaataatcatgagattgttcatctatgtagtttaaactttaaaactttctttagtctttgagtgtctttttttcctctgaaacttcgcagttctaggatgtcataggtggtaacaactttggttcttacttgttacagacccagttatacatgcatctgacaaactactccgtgaacaagcataatgagcattttgaacgggatgaaactgagaacaaaggcagcaaacgttccatcaaatggtttacagaattccttcaagcaaatcaacatgatgttgctaagttttggagtgatatttcagtaagattatgccattccacaattataacagtctttcctcagcaataatttgaagcattgtcaggccatgaaagttcattaagagttgattgaacttggttccctataattgagaggaccagagagaaaaaaatcagatcattacacagccacacgctgcctaacaacagcgatgcattctgagaaatgcatccttgggtgattttgtcattgtgcagacatcacagattgtacttacacaagcctagaacaggaatagcccactacacacctaggctatcatatagcctgtatatggtatagcctgtggctcctagtctacaaacctgtacaaaacattactgtactaggccgggcacagtggctcacgcctgtaattccaccactttgggaggctgaggcaggtggatcacttgaggtcaggagttcgagaccagcctggccaacatggtgaaaccctgtctttaccaaaaatataaaaaattagccggatgtggtggcgcgctcctgtaatcccagctactcggggctgaggcagaagaattgcttgaacccaggaggtgtaggttgcagtgagccaagattgtgccactacactccagcctgggcaacagagcaagattttggtctcaaaaaaaaaaaaaaattaccgtactgaatagtgtaggcgattgtaatacaatggtaaagattgtatatctaaacatagaaaaggtacactaaaatacagtattataatcttatgtgacctctgttgaatatgctatgcattgtacaccaaaatgctgttatgtggcacatgactctatcctttgtttattctgtttgttgacatttttatcttactttctatatatcacaggccataaatccaaaggtccttaggtgtcagacaagtaagaaggagtgaagtggtctctggatagaagaaactaggatgttctgggaactgtgataatttgaaagtcaggagaggtctgaaggaggtagccaccactcagcagcagcttattggtgccagtgatattttaggcccagtggggctcattcttctaatttgttgataaattatatgtaaatgacataaatgattttaaatgttggcaatggactcaaaaattttaaaaatgttgggactctaacaaaaatgtcatctggatttggtcagatatccaccaatttgttaactttcagttagagcttcctgagagatggaatgcatgtaaatgagaaattggatcataacaatgctgcatttatttgtttatgcaattattttctcaaggctaattttgtggacattccaaaaaccattctaatgacagtttactatcatagtgagtcagaagcatcaaaatggtaaaattcattaattttggaccatagttcattgatggaagatcatactatcttccatctgatgataattccaatgcattggtctattgctcagtgggaccaagaaagttttatataccctctggcattcttttttttctgtacacatttgtaaccctcatttggatttggctctttggggacatgtctgtgaaaacctgttgggctgctttggtgaggcatgtatagagagaatcagggagaataatgagggtcattagctttacgtgtattggttttaagtggtgttttttcctacacaattgaattaagagaaggtaaacgagcaagactaatactaatgagaggatatggaaattaactttctgttagaacgttaagtataatttttagatatgacccaaacatagccaatgtgggcctattaatctctgacacatttcatggtcttgtctataggtgggtaaattttgcatcattcttggctatgttagttagaatgcatattaat

SEQ ID NO: 1846 - DNA, 2300 bp, Homo sapien
tgagatatgaaaatattaaaaagtgaaatacagaagtgtctgtaaagtgagaccacggttatgtaaaaggtaagtttagaaaaaagactggaagaattaaaccaaagtgctctcattgggtgtttctggacggcagcttactacatattttttccttcttcctatttcaaatttttaaaatagtgagcatgtattttatattgagctgtattatttctataagaattaaatgttcataaactacatataaggagattataagacagaatttcaaacattgaaatataataaacatttgtttttgctaccaatgtagtggttggccaatccttgaaaaattttgtgtacaccaatttattatatcaagcctacacgctgaaaaacagggtgggctatggttatattattttcactccttgcagattgctatatggttcatagctgctttcgcttctatttcttgcaaatgactaactggcagtgaactgcttagatgtctatttttgtcaaggtaaatgtgaagttgtggaatttccaatccatttacaaagatactgtttaagaaaaatgcaaagttcccttacttaatttttcactagaatactagtgtttttattagtgttattaattttaagaaagtcatgccaagtaaagacttccttacaaaattattttccaaacctcttttttaaaagttaaagaaaatttgtattttggaaaccaggaaatgcttcagcttgattaatttcctttttctttaaattaagcacttaaaattaggtaagcataagatttatgctttttcttttaagtatcatttaatttaaaacttttcctgtttcataaggatagagactgttgtttattttgttgactttgtatccgcagtgcccagcggagattgctgcagataggtgttccttaaatattgtttaatgaatgaaaaaaataaattcttaatcagtggtaggcacatggattaataaacaacatgtacctcaaattatcatttctgccttcttgcttcaaaaatttcaataccataggcctaaggaactgcagcaaaaataaaatatgacatgaatatagttggctattaacaaatcaaaataataataatgtgaatgaagtatattttaattgtgatgtaacattgctctctcaagtaatctttaggatcatgaggagggtaggaattaaagatagatttttatgaatgcttgtgctagcttgataaaaagccattagatatatattaattgacaattatgaggagttttaaattttggattctttttcaagtttatttaaggaaaatagtatcaacaaatgtaagatcataaagagacaaaaacatagaactccagtatggaggacgatacggtactgtacacctgcacagtattatgtggtgcattctgtctgctgactctaagtgcactgtggtaccgagctaaaggggcctctcagtcagtatgggtgtgcagaggttgtgtttggtagtcctgcctctcggcttatgttacttacgtgagttttcattttttatttttctttgaaaagccatagaatgctctctcagaaaattcctttcccaaaacagatttgagtgaaaactctcagagccaaaaacattgaaaacaaacaaattaacaagaacaaactcagatcatttttcttgcttagcaatatgtagtttcacattttaattactctatattcttattaatttgatactttttaatggtagatatatttcgaataatatgtaaagtaactctgtagatgactacattctcaacccttttaagggaagtgtgccattccatttaattgggatattatctaaataatcatgagattgttcatctatgtagtttaaactttaaaactttctttagtctttgagtgtctttttttcctctgaaacttcgcagttctaggatgtcataggtggtaacaactttggttcttacttgttacagacccagttatacatgcatctgacaaactactccgtgaacaagcataatgagcattttgaacgggatgaaactgagaacaaaggcagcaaacgttccatcaaatggtttacagaattccttcaagcaaatcaacatgatgttgctaagttttggagtgatatttcagtaagattatgccattccacaattataacagtctttcctcagcaataatttgaagcattgtcaggccatgaaagttcattaagagttgattgaacttggttccctataattgagaggaccagagagaaaaaaatcagatcattacacagc

SEQ ID NO: 1847 - DNA, 2300 bp, Homo sapien
ccagttgtattggctctttgcatgaagcctgcatcttttgcagacttaagttttaacctctttctatctttagggaagaatcaatagaaaaaacctcttctggttgggcgtggtggctgacacctgtaatcccagcattttgggaggccaaggcgggtggatcacgaggtcaagagattgagaccttccctggccaacatagtgaaaccccatctctactaaaaatacaaaaattagctgggtatggtggcacacgcctgtagtcccagctactcaggaggctgaggcaggagaattgcttaaacccgggaggtggaggctacagtgagctgagattgggccactgcactacagcttggtgacagcgagactccatctcaaaaaacaaacaacaaccaccaaaaaaaaaaacaaaacaaaaaaaacacctcttcctaagatggtgctttaaagatgtagagtagattgcatagggagaccaggatgcagaaatacttgtgatgtcagctatatgtaatctggtttcattcttttatttttagaacataatacaaacttatattcagaagaaaatagacctcaaactaaaaagccaaatataaggaattctagagagttgacagtttgtatagaccttattcatttattagtttagaaggtaatataaaattgactgtagtgaacaaataagtcatttttgccagtgcttatgtctgtgaatatagtgaatctagaataacaaaagtaatttggatattgaattatcactattcaacctagaaaattataactttactatctatgtagatattcttttgtgttttctttaaaattttgcagttttattctctgattaccatactctttaattctacaaattcactgtaggtcatttaacattaaatcttttagattaataattggcagtttattaaaacataaaactcaaaggatggatagaattgtattgtcgtatacatgaatataattaattcgctgagaatattaatatttacctttttattttccagaggatcaaccattttccaggaatgggggagatctgtaggaaggatttcttagcaagaaatatgaccaagtaatctttattttcttgtaatggagaagacctgttcaaaatttataccataactactgtagtgctatctttcacaaggttacattgatttgaaatgatatttagatgagagtgatagaattttggagctagagaggtcttagaaggtctctggttccagtcttccattttgcagaggaggtaaatgagggtcagagaaatgaatatcttgcacaagctcaagcaaattgttaatagcagaggtggatcagaatcagtctccagaatctcaggcctctttactgcaacttgttgcctctttagtaacagagtttttcatttaaatgtaagaggttatctgtatatgtcatttaagagatacttgtttattttcagtcaaattttgcaggaactaatttgttgcattataagctgtgtgtgtgtgtgtgtgtgtgtgtgtgtgtttgtgtgtgtcttcatattggtgattgagcatttaatatgtgccagggattgtactaggtacatgtatgcacacacttactcaaagacacatgtatatatgctcacccagggatacacatgcacagatatttatctctgcaaccaatatttagagtaacaatctactttcatggaaaagctgataataagtaccccggtcttttacttaataaactgaaaaatttttaggcagtttatattcctgttgactagggttttttgcctttttcttaacttaagaaagttgagtgataaactgataattttttaaaaaaagaagacaattcacagagatttagtaaactttctgactctaaaaaatggtagtataaaaggtaatcaaaaactgttccctatgtgtgataatttgtaaagaagcaacataaatagtatttgcctgaataattccctactccctactcccatccctgaggcagagttattgactcctacatgttaccttgccttatatgcctttagtgtacctatcacactgtttaatattaatagcctatgtatatattccttgggagcagagatgatactaatttatcttactatctccagtacctagcacagagtgtgtactctaaaaaaaatgtttttgatgtactaatatgtaaattagtacatattagggcaaggttgtttttttttttcactgatgaatccatagtccagaatagtgtctaacacttaataggtgctcagtagacat

SEQ ID NO: 1848 - DNA, 2300 bp, Homo sapien
tccatttatctcactaaagtcttcccaggtatctttgagatgctgcaggcagtgtctctcatatactcaggaacagttgtgctcctgacatgctcttctgaatttgttattgttttctgcttgtgagccaggtaaggaatagtctgtgttgctattgcccttgctctctacatgagctgtaggtggcacagcagctgctgagtcctcaggatgccaaagctgcatggtggtctgtgacagatgagagaggaatattcctttccccaactcttgggattgtacactgtcacctgggactacaccattctgttaagactcaggattctgttggaagccaaaaattacctgaagtcttctgcttatctttattccacacttgaaattcagtggaagaaaaatgccaatatgttaattgtaaaatctagattggagaggaacacatgaatagtttgtactaaaaaggaaacgttcctctgagcataaacgttttcagtaggattagagggttgggagcagtggagaaccaaaaccaaatctctcctgtgaatattgcttcattatttcacgtcctaagtaaacatagatgagttgactttaagtactaaaaataatttgaactagggaggtggaaagtatggcataggtgtgatgatcaggggatatttttacttttggtcttttgtacctaaccgaaggtcataaaaaaagctataaaaagtacattttcctgagtagacgtattgtctcagctgtgtgtgttttccttgtgccataaataatcactaaaccctttggcagttttgtgtacctgttaaacctgagaagatcgaaaggaaggatttttgggtgcaaccgaaaaacagttctcagttactactgagaataatttggccctagataaaactgttgtaactaaaaataaggttaggctgtaactaatatttttcaaatgaaatactatgaactaaagtttagatagaaaaatgtttctgcaatgaatatatttcagaagtattttaattttggtttaacttaactgtttacttgcagttcgtttagtaatagatgaaatgggatttatgaaaactccagatgaggatgaaacaagtaatcttatatggtgtgattctgctgttcagcaggagaaaatttcagagctgcaaaattatcaggtaggaaattaatcatgaccagttagtggtatgaggaaagttatatggattccacataacttttttagataggttcttaatatgttgccttattacatttcagctcttactcacctgaatagcctgttttgttgctatccagttgtattggctctttgcatgaagcctgcatcttttgcagacttaagttttaacctctttctatctttagggaagaatcaatagaaaaaacctcttctggttgggcgtggtggctgacacctgtaatcccagcattttgggaggccaaggcgggtggatcacgaggtcaagagattgagaccttccctggccaacatagtgaaaccccatctctactaaaaatacaaaaattagctgggtatggtggcacacgcctgtagtcccagctactcaggaggctgaggcaggagaattgcttaaacccgggaggtggaggctacagtgagctgagattgggccactgcactacagcttggtgacagcgagactccatctcaaaaaacaaacaacaaccaccaaaaaaaaaaacaaaacaaaaaaaacacctcttcctaagatggtgctttaaagatgtagagtagattgcatagggagaccaggatgcagaaatacttgtgatgtcagctatatgtaatctggtttcattcttttatttttagaacataatacaaacttatattcagaagaaaatagacctcaaactaaaaagccaaatataaggaattctagagagttgacagtttgtatagaccttattcatttattagtttagaaggtaatataaaattgactgtagtgaacaaataagtcatttttgccagtgcttatgtctgtgaatatagtgaatctagaataacaaaagtaatttggatattgaattatcactattcaacctagaaaattataactttactatctatgtagatattcttttgtgttttctttaaaattttgcagttttattctctgattaccatactctttaattctacaaattcactgtaggtcatttaacattaaatcttttagattaataattggcagtttattaaaacataaaactcaaaggatggatagaattgtattgtcgtatacatgaatataatt

SEQ ID NO: 1849 - DNA, 2300 bp, Homo sapien
actttttttagtatcaattgatatggatgtatgatttttctttcttagcttattgatatggtaggttacattgatttatttttgaatattgaatcagccttgcatacatgaaataaatctcactttgtcatgacagcacatacttatacatatattatacatacacacacattatacatatacacacattaggtacacacacaatatatccacaaatattgttagattcagtttgcaaaattttaaggatttttgcatctaagtgaatgaaatatattggtctgtagtttctttttctggtgcttctttggttttggttgtcagagtactattgatctcataaaatgagttggaaagtgtttcttcttctattttctgaaagagtttgtttaaaaatggtgttaattcttcattgagtgtttggcaaaatcccataataaaaccaccttggtctggacatttctttttcaggatatttaatgacaaaatcagaattatttctttagtagttatagaactatttaggtgatctgttttatcttgcctgagattgggcagtttgtgtttttttaagaaattgattagttttgctaagttgttgaattcataacagtaaagttattcataattttcccttattatccttttattgtctttagattctgttgagataggttttttaaaatttttgtttatttatttatttatttatttttaagagacaggccttgctatgttgcccaggttggtctcgaactcctgggctcaagcaatcgtcccccgtctttgtttcatttttgatgttggtgacttgagtcttatcttttaaaaaatctgtgatggttaatattaggtgtcaacttggttggattgaaggatgcctagatagctggtaaagtattatttctaggggtgtctgtgagggtactgccagaggagattgacatttgagtcagtggactggtagaggaagacccaccctcattgtgccagtgtggctagaacaaagcagccagaagaaggtgggataagctttgcttgctgagccttctggctgccttctttctccagccttggatgcttccttctgcttctcctgccctttggacctcaaactgcaggttctttggcctttggactctgggacttgcaccagggaattgccaggggtttttgggcctctggccacagactgaaggctatactgtcggcttccctggtttgaagctttcggactcagactgagccactaccagcttctgtcttccccagcttacaggcggcctattgtgggactttgtcttgtaatcctgtgagccaattctccctaataaactcccttatatatgtagtcatatatcctactagttctgttcctctggagaaccatgactaatacaaaatccttgtcagttttgctagatgtttatcaattttatacattcttttagaagactttattttattttattttattttggatacaaggggtacatatgcagttttgttacctgggtatattgcatgatgctgaggtttggaatatggatagtcccataacccatttagtgagcatagtacccaatcagtagtttttcagcccacgtccccctccctctctcccctctctagtagtccccagagtctactgttgccatctttatgtctgtgagtaccccatgtttagctgccacttataagtgagaacatgcagtatttggtttcctgttcctgtgttaatttgcttaggataatggcctccagctgcatccatgttgctgcaaaagatataatctcattctttttatggctgcatagcattccatgtgtatatgtaccacattgtatttatccagtccactgttgatgggcacctcggttgatttcatgtctttgctattgtgaatagtgctgcagtgaacatattatacaagtgcatgtatctttttggtagaacaacttattttcttttggatatatatccagtaatgggattgctgggatgaatggtagttctgttttaagttattttgagaaatctccaaactgccttccacagtgactgaactaattcacattcccaccagcagtgtataagtgttctcttttctctgcagccttgctggcatctgttggtttttgactttttgttagttgccattctgactgatgcgagatggtatctcattgtggttttgatttgcatttctctgatgattagtgatgttgagcattttttcatgtttgttggccacttgtccatcttcttttgagaagtgtctgttcatgtcttttgccca

SEQ ID NO: 1850 - DNA, 2300 bp, Homo sapien
ctgacataaagcactaactcagaagacgcctcatctacatgtgttctgttcctgttgttgcctttgaaagtgaaacaactgcacatggagagaagaatcacacatttctgagcctgaggccagtctggccactggggacccaatgctcctgctcctcggcaacatgcaactttggggatttctgttttgctgctgctgacgtgtgaatctttacaacaaccattaacatagtaacaatatcatatcatacagaaacaatttaattttattcctgatttctcaaaaagctttcttgaggtgacgttaagtgttgctaatacctctgttacttaacattttttttgataaggtatatgaggacccatgataataggtttattgaaaaattcttgccccttcctaggaatggaagaatgataacatgtaatgtagtaatagtgcatgcatagtgtaaagtgtaatacagtgaaaataatgatgtaaagatgattaacaagaaggcagtggagaattcctcttcaacctcatgtgaccttgacagtgtattgtgacgctgatgttcggctagttctgggtgaagtccagcttcttctttctgatcactcttcttgcctcagggtgatgcctaccctggacacctaactgccccctctccattctaaaaccccttctcacaaaggaaggataaacagactcacattcaagttgcaatcacagatgtgacacggtttaatgtatatcgttctcagaggcattctaggggaaaggaacaagtcaaaaactccaggtggcaatgtctgctctgccgcttatgatcgtgagactaacccagcacgacaaaccctgagcccagtttctcaccagtgtcctttatgagaagatgccctcactgaccagatcagttcccaatgctggcaaggctgtatggaggtctattgcaggttaccaatctcacaggagtttttagaagaataaatgaagaaatgaaaatgagactattctcagcacagtggtctatagaaagtgctgaatttatgttgatttactcaacgaaggacaaaactttaaattgtgaaattttatattttttgggatgcacttggagggcctttttttttcctacctttaatcacattttataggtagttgccaattctgttctatcttttctttttttctacagggaaaactgtacacttgtcctgatcttcaccatgctctgaaatgaacctgtgtgaacccagcgtgacagaagcagggaccacaaaagtctaaggaattcatgtgttaggacttcttccagttctatacaattcattttatgagaagacatgattgccttcccgttttcaagacacgcaactctaaaatggtgaacaatgaacctcgaatattctttaatttctgcaacaatcttctgtaaatctttatctcgaaatggcttcctaaatctacatttttttacaactgccgtggttcaacatttgcttagcaggaactctaggtcagagctgtccctcagcatctacgggatggggccccacctgattttatttcctaactttcgagctggcctcagatacccgtttattctttgcttcacaaagatgcttagataaaagatctgaagactctcttcaaagattcaaaaagctccactgttttgtgggaagatgtctgtggtcagataggcaggtggatcgggcgcctagggcccggaggtagaaggaggtggccggaggcgctcaggccagcgcctctcgcatctctgaggaggggcgccgcccaggcgctcgcgttgctaagtcctctgtttgccgcgttctaaaggagccccgagcgggaccaaggcaaacggggggggggtgtgtgtggcccgggaaagctcgagcagtgtcttcagtaaacccccagaagaggcagcggcccctccgttgatccctcctgtccccaggacctcctgactccgagggggcagaggattccccgagtcctttgttcctcccaaccgtcgccgcccccggcgcccgcgcctctcggcacgtcgtgcacccccggccgcagcaggcgaatggtctggcccgtcggtagccgccacccgcttgggcagcgacagctgttccaggcactccgcgtcgagcaccggagtcccgagccgtggctgccacgggcggtgggcgggcggaggagagcaccggaccaccagtgcaggctgccgagtcggggcggccgcccacggggaagctgcgaggcgcgggagcacctgggggaccgcttgcagcggggacgcgaggacccgg

SEQ ID NO: 1851 - DNA, 2300 bp, Homo sapien
acaatgaattcctatagaaaactcttctaataatgaaaaacaacttgtttgtaattacaaataaatgattgtgcatgttaactaattaaaaactatttaccaaactatacttttaaagtataatcttccttaaagcagagcaaaagcaagctaatataagaagcagaaaaaagtggtatacagaaaaaagaaaaatagcaagaaatttaaattgctgatcactttttctctatcattaacaacttatttccttaaccaataataaagttaaattgagaaagaaggggagacaatttgtaaagctgattttttgctttacttattagtttttcaggtatagttatattgtatccattttcgtaatagctctcaattgtctcctttgtaaattaatgatttactaagtagatggctgccctcttattagagacctagaattcaaaattatgttaaagtgccaaattatgcacacaaccacttttattattaaagaggatttatttaaaaaggtatacatttaaaactcatcccaatgacagtagtatgaatattctgataccagaaagattccctctagaatacataatatcaaaagttgtctttaatttggtatatatgtggttcagtgctattcattgaactttctatgtatgtggggcaaaatattacatccacaacacagaaccaaacgtggtgatgacactgttgtgacactgttgcatgctgacacaaaacctcacagcatctagtccaaatctttgcttcactatttttattttatttgaattaactgaaacccagaaaacaatataatacatttccttgggacgtatactcactatgcgtctatctcttcaactcaatgggatttcaaatggagagaaagcaatttaccacaacatccacaagtttttgtcaacattatagacaaaggatcagactttggagcccaattgccagggttcaaatcctgcttccaccagataatagctgtgtaaccttgggtaagtcacttctttgtgccttaatttgctcctaaaatgatgacagtaaaaccacatctctcatagggttcttatgaggagcaaatgagttactgcttgtatagaagttgtaatgcagtatacattactaatagaattggcaataataggaagtgtactaagaatctttttatcgctccatcttttgtcagtaatgaaaaattttttaaaagtctgagaaatttcaagtcaacaggtattcataaaacacctactatgcctggtgccttgggaacatagaataaattgggaagttacagtctattttgaatttggaataaatggaaaacacagagcaaagttcaatggaacatgcaacaacaaaaatgctagagtgccacataatttacctaagtaaagctaacagcaaaatcaagtactctaagatttatattaataaaaacgcaactaacaattggtaatgtatttattttcagatctacacagaagttgctaaatacaatgctgtacatcaacagaagttctgcagaaatagtaaaattttcctttatctccacctgggaagtctgaaaacatcatagggcttgtgactggggcctaataaccccgaggacaacgtggtgggctgagcgaatacctcaatgtgcgagagaacgaaaagctcgaaccacgaccgtgcctagggaccaggcttttcctgtggccgatgcggggcagatgcagacccagaggccacccttgcgcgcgatctccaacccgacggtgcggctcctctcggacctggagctgtggggagaaggcagccttttagtgaggagccgccgcgtggcgggacgcaaggaaaaccacccgagccgctgaacagtattccgcgactgcactccagggcaccgggaccgccagggtgaggagggactctgcgttctgcaaagctagcggttcccactccacctcccactatctcagcgatgggcacgcgagcgccagcccgggcgaccgcgggggaagaagcggtccacgccacctcaggcccccgccccaggctctgccagctgggggtccaccgcccgcccccggggtcccgggcctgcgcgtcacttccggcgcgcgcgcccgcctgcgaagatacagtcgggccagggcctggcctgggcgcgcggctgcccgggggcgcgcagagagggcggaccgcgcgaagggggagtgtctgcccgccgccgccactgctgctgccaccgccgtcgccgccgccgccgccgccgccgctgctgctgccggtgctaaggagttcgctgg

SEQ ID NO: 1852 - DNA, 2300 bp, Homo sapien
tttcatttatgaattcaagtaactcacaatttagggtcatataaattcataaacagtaccttttaacataatattatgaggtcagtgaaaacaaagcagcaaagtttgttttcctaggaagtatgtggcagacttcactgaagaggtgacatttgaactaagccttgaagatgattagaatttccttcagtagagcaaatcaagggaattcagtaattttatccacttcttcccttacagaatcagtccatgctctgtagatatttgttgaagactacagacatttaataagtgtctgttttgtgtaaggcactaccagatgttaagaaacaaattattgttatgcacacataatatttatacataaagctacaaatttaagaattttgtcatatagatgctgttgcatatttgtttagattgataaaaattttattacacaaaacaaagtatacagaaatgagctgttacatggcaaaattcattggtcagtgttttgttaactgttattcacacataatatttatacataaagctataaatttaagtttatcttatagatactgttacatacttgtttagattgatatgaattccattacacaaagtatacacaaatgaactgttaaatggcaaaattcactaatcagtgttttcttattggccttttatgtagtcctaatttgattacattattgttcctatttattttacttatcagtattgtttctattttttatgtttgtcaaacagttggcagtaaatctgaagtaagatttttttagatagattgttttagatagacctttttctttctttcctttccttcccttccctcccctcccctctgcttccaaagagaaccacggaaatttcttatcctttagtgtcaaaaaaacaagtactcaaaatttttgttaaatgccacaggttactttctttcctgaaaattgacaaggcaagttttacttacttttaatcaaaagagatgttttggccaggcgcggtggctcacacttgtaatcccagcactttgggaggccaaggcgggcgtatcgcttgaggccaggagtttgagacaactcctgacctggccaacatggagaaaccccatctctactgaaaatacaaaaattagccgggcatggtggtgcgcgcctataatcccagctactcggatgtctgaggggcgagaatcgcttgaacctaggagcggaggtcgcagtgagcagaggtcgcaccactgcactccaatctgggagacagagtgaaacaacgtttaaaaaaaaatagagaggtgtttctaagtgagatcactaaatcaggggtttaggtaagtagtagtcttcagtggtaaggttttaaaattaacatgtctcagccaactagaaggaacttttttctctcaattgaaatttcttgctatggtggattttatataatttaaatcttgtattttgttcttttcaaattttagaatgttttaaaatgtacccctggtaatagacatatgtcagcagattataagtttgataagcaatactgacatactaagtgtatgtagttcctgtatgtattaggcctaaatcaatgaattagaaacattcaattttttaaagtgctatttcacattgttttatttatacgtgttataaatttgttttgcaagagttttttcatacccatttcatactagtttttttttatgaaaagttagctgcttataaggattcataaaatctgtatattagttgatttcctagaaaaaatacaacctgtctttagcatgttgtgtttggaggacagcttggccttcagttgtttgcatagacttgtcatacatgtttaactagttttctttttaaagaatgtttagcctactatatatataaagctttatatttaatgctctcattagcctatatattaatattaaaacacccaaacataaagccttttaggcagatattgcaagtttttaaaatcctcaactctagctgaaaagtgttttgctaagaaaagctcagtaatgtgctgttttatattaacaggaaacagaacagcagtagtggtttgaataccctgcaaacaggaagtttgacacatgcatagctcttagcttctgtgtaagaagttgtgagctccttctggaaacatttgcagttacattaagtaaagtgtaaatgcacatgaatggcagcttatagagaaccaccttgtaaccagtatacaggtacaactacagctcttcagaaattggaaggttttgctagccggttatttcatagacactctaaagg

SEQ ID NO: 1853 - DNA, 2300 bp, Homo sapien
tttcaacaatttgactatgatatgtctcagtgtggatcttttgggttttattctagttggcattggctgagcttcttggatccataggttactgttttccatcaaattgggacattttcagccattattccttcaaatgttttttcatcaccctttgtctctctcctttttttctaattcccatgagatatatgttggttcccttgatatcccataagtttctcaggctctgtccacttttctcctgtctttttctgtgttcttccgactggatgatttccattgatctatcttccagttcactgatttgatcttttgctcttttaaatctgctgttgggcttactatactgagttttaaaattttggttattatacttttcaaatctgcactttttatttttaaatagtttttctttctatattgaaagtttctatatgttgttcattactgtcgtgttttcctttaggtatttaacacaattttcttttaattattttcatatatgtataatagctattttaaagtctttaaagcctttgtctgctaaattctacacctgggcccattcagggacattttttattgactgctttttttcctcattgtggatcacacaagtttttgtcaaaaatgtgttttttaaaataacatgtggtagtagctctgggttttgattattttttccctgagggttggttttgtttatttttttattaaaaacttcctttgtcttaatctatggaatctgtatccctcatgatatgtgactactgatttctctgcttagttttttcttcttattctaatttttattttttaacctggtttcctagggattgccctgtgtctctgtagcttaattgttatttaatgattgatcagaggttgtactcaaacactgggaccagccagtgctgatggaactgtgtgcaaattgaggagcacatgcagtatttaggcagttcggaagtctgtaccagctttaactttccactgggccctctttcgtgtcctttgtgcttgtcattacctcctagtcagattgcatagcaaggtgggcagactgggtggcctggtgaacttacgtagcctctgtctgtctcatcttcatttaccccatgctatgtttcttgctataccaccaatgtgttgcttagccctaccaaggccatagccttagactgttaatttctttcagcttgcttttttcgttgacaatatcactaatgagttttttggcctccacttcaaatcaaatcagccccctctcatgtcagccccttccagaagtgaagctgctagttttcatgaccagccctaccctggtagaagtactctcctgactgagctataaaggagtgggagcagccccaggcaagaacatctctgactcccactgtttttaggcagagttcagtggttcgtcacaaataaatgtttcttaatttgttgtttatgactgctcgatttccagagccatgaaatcattgtttttgataattctgttcagcttcatagttgtttcttaggaagatttcctgacttacttccacatcaccaaaagtcctgcctcacatggcaactgttaaaatggcaagttcacgtgctgaagttctacttaacaaggaaccattctatagattctttgtaccattttggtacaaattttggatctctggtaatcaaaacaatctgttcaccatgctacccagtcagcccaccttgctatacaatctgtcatcttagtcctgtttcatgtgaggaattttacatttctgcaataattgccagtaacttttttgtgtattattttcttttgaataccacatggatggcatctgacactgtttgtaatgctgaatttaatggaagtttacaaataagttattctatgattctcctttaaaaatgcagatatacatatatgtatataatattattctcttccataacacagaatgtttaaatggttaacatttgtgctgcagtatagctttctggctcatgaaaaatgaaagctatcagcgatctcggcaataagattcatcgccaatagtcactagcaacagcacacagcattttaatatcagtgaggtccacagctagcagtaagagctggtgtaattgaaagacgtttaggtgcaatcattctgctgtttgctccttgccaggttcaacatgggattgtgtgagtatttgaagaaaacagcaattttttcatatctttgaaagatgtaaaaagcgtagattagtgcttaaatttaagaaatctggtaatttataatcatgtggctcta

SEQ ID NO: 1854 - DNA, 2300 bp, Homo sapien
tttggttattatacttttcaaatctgcactttttatttttaaatagtttttctttctatattgaaagtttctatatgttgttcattactgtcgtgttttcctttaggtatttaacacaattttcttttaattattttcatatatgtataatagctattttaaagtctttaaagcctttgtctgctaaattctacacctgggcccattcagggacattttttattgactgctttttttcctcattgtggatcacacaagtttttgtcaaaaatgtgttttttaaaataacatgtggtagtagctctgggttttgattattttttccctgagggttggttttgtttatttttttattaaaaacttcctttgtcttaatctatggaatctgtatccctcatgatatgtgactactgatttctctgcttagttttttcttcttattctaatttttattttttaacctggtttcctagggattgccctgtgtctctgtagcttaattgttatttaatgattgatcagaggttgtactcaaacactgggaccagccagtgctgatggaactgtgtgcaaattgaggagcacatgcagtatttaggcagttcggaagtctgtaccagctttaactttccactgggccctctttcgtgtcctttgtgcttgtcattacctcctagtcagattgcatagcaaggtgggcagactgggtggcctggtgaacttacgtagcctctgtctgtctcatcttcatttaccccatgctatgtttcttgctataccaccaatgtgttgcttagccctaccaaggccatagccttagactgttaatttctttcagcttgcttttttcgttgacaatatcactaatgagttttttggcctccacttcaaatcaaatcagccccctctcatgtcagccccttccagaagtgaagctgctagttttcatgaccagccctaccctggtagaagtactctcctgactgagctataaaggagtgggagcagccccaggcaagaacatctctgactcccactgtttttaggcagagttcagtggttcgtcacaaataaatgtttcttaatttgttgtttatgactgctcgatttccagagccatgaaatcattgtttttgataattctgttcagcttcatagttgtttcttaggaagatttcctgacttacttccacatcaccaaaagtcctgcctcacatggcaactgttaaaatggcaagttcacgtgctgaagttctacttaacaaggaaccattctatagattctttgtaccattttggtacaaattttggatctctggtaatcaaaacaatctgttcaccatgctacccagtcagcccaccttgctatacaatctgtcatcttagtcctgtttcatgtgaggaattttacatttctgcaataattgccagtaacttttttgtgtattattttcttttgaataccacatggatggcatctgacactgtttgtaatgctgaatttaatggaagtttacaaataagttattctatgattctcctttaaaaatgcagatatacatatatgtatataatattattctcttccataacacagaatgtttaaatggttaacatttgtgctgcagtatagctttctggctcatgaaaaatgaaagctatcagcgatctcggcaataagattcatcgccaatagtcactagcaacagcacacagcattttaatatcagtgaggtccacagctagcagtaagagctggtgtaattgaaagacgtttaggtgcaatcattctgctgtttgctccttgccaggttcaacatgggattgtgtgagtatttgaagaaaacagcaattttttcatatctttgaaagatgtaaaaagcgtagattagtgcttaaatttaagaaatctggtaatttataatcatgtggctctaaaataaaaaggtattttatttgtctggtggattaaagctttagaaaagctacgccttggatacaagtgaaccgataattctggtctaatgttgccgtggtaacaactcatgctgatataattgagaacatcttatacatcctggttcgaacattttctccctgccattttgagttgttctagtggtatatgaaggaggctgggataactagcttgaaagaaattcagtctagttatagacatctttggcattaatctgatgtttactagtgatatctcatgctaggcagttatgctttgcttctaggggcttctctttttaaaacaaaagaaagctcttttcgttttctgtgtgctgcatgct

SEQ ID NO: 1855 - DNA, 2300 bp, Homo sapien
tcctctatgcagaccgctaaaactttctccatatcaggaataagactgtttcactttcttatcattcaggtatgcgttagaacagcatttttaatttccttcaagaactttttgtttgcattcacaatttggctaactgtttggcaccggacgtctaacttttgcttatctggatttctgacatgccttcctcactaagtttatcatttctagcttttgatttgaagtgagagaagtatgactcttcctttcacttgaacacttagaggccatggtaaggatattaattggccgaatttcaatattgttgtgtctcagggaatagggaggagcaggagagggagagaggaggggaacagctggtaagtggagcagtcagaacacacacaacatttatagattaatgggcatggtctgtggcaccctaaaacaattacaatcgtaacatcaaagatcagtgatcacagatcaccacaacagatacaataaaaatgaaaaactttcaaatattatgagaatgcccaaaatgtgacacagagacatgaagtgagcacatactgctggaaaaattgcactaatagacttgttcaacacagggttaccaaaaactgtcaatttgtaaaataaacaacaacaacaacaacaaaaacacattgtctgtgaactgcaataaagcaaagcacaataaaatgaggaaagccagtggtcatcttcctccaaaacctgtttttccatcagttgtatctatttatgaaaatgacaacatcatctacttaatctagaaataacaaccaatttgattctttttcttccttccccacatccaattgattgtactctgttttccctatctcatatggcaacatagttgcctttctgtcaatgtagttcaagctatcattgccagtagcttagagtattgtcacagcctcctaactggtacttccactccaatttattttttgatactaacacaaagagaatttctgcagataataatagtaaataacattaattgcctagcatatgcccagcactatactatgtgcttcctgtctctttttaataggcacagccacatgataaagtcagaacttttttttttttaattttacagatgaggcaaaagaggtttggggaggttaaagaacttacctaaggtaacagagatagctcagaagtgacaacaccaggaatccaaggtttatctggcttctaaaaaccctgtttgtttttgctttctttgctactagcctgtttgcaatcttcaatgtctatccctatcccatctgccttttccttctccttccattcttccaacccatgagtccttcttttggttttacttattcccttaaatatttacttgtttgtcatttcaaggaagtccgtcacagcaggctcctcttcttctgccgtgtccacatctgtcctgatccctctttctctccactctctcttcccagctgctaagagaggctggagaaagaaacgaatagacaggatggctccaacaacctctgcagatgcagatacacaaaaatccctgcattgagccgagatcgcgctactgcactccagcctgggcgacagagcaagaccccgtctcaaaaaacaaacaaacaaacaaacaaacaaaaaactccctgcatctttagcttttctctgactaactctcagagttgctttacggttcttatataatgaatcaatcaagtacaaagtgctttgtaaagagagctataaagcaccctgcatgtgtaaggtgcaactaactactcaccctccttttacatgctcagggcttcaactgagttattctgtgagcaagaatattctgtgtgcatccaagcagagaatggcacatctgtgttcaaggtgaaggaagaatagaaccctaaataatatgaagttggccgagaaaatctctacttaacattactgccagagtccagcttaaaacttcattggggttgtcataagcgagtaagacaggaagaaaatggcattaacctaaaaaaacctcactttaaaaatctctctaggagggttcccctccccccatcttcctggaagttttaagtttttgcaaatatcctcccttgtcctgcccagatcttgtcccttctagtactggccttccccattcctgggggcccccgcccctccgacccccgccgaccggcgctggactacaactcccggcgtgccgcgcgcgtccggccggctgcaccggggctttgcgcgtggcggccgccgagctccgcgcggggcaaacctcccggcgcggccatgcgggg

SEQ ID NO: 1856 - DNA, 2300 bp, Homo sapien
caggatctttctggggaacctgtgttctgtgccctgtcttgagtggttttgttgaccatcttgacctaaaagtgtccaaatgttgattgatgtttatttcaatgaagaggcaaccatgtatgttttctgtgtatgtgcagaacattaatgggatgagattattctcctggaaaagtggtttaagccaagcaagggaactgtgagaatgaccagggtaacttaaacaaaagatcttgcccagcctctctgctccacctcccagttttctgatttggtatttaggatgatggcgggagagactatgaattttggggtgggcataatgtctttctattcatatgtaactaatatagtaccgggtactcatagattgtaagtgttggttaaatttcttgaattatgctttttgtccaactgggataaacagttaaaattaaacctcccagaactaattgttttcgttttgtagaataaggttttgtttgtttcagtttgaatttttgctggcttcatttggcaggataaatgccaaaataaaagaatgtgggcgttttcaggagatctggtcatctattttgcatcctttccgaaatatgttacttcctgcataatgaagtaaaaggatttgctgctgggcagtgctttccttattctcacaaagagattacttaaaagccagccctgggaactttgtccatgaatctctattaggaaaaaaagagtaacatgggactgcagcttccgagtgttctctggttatagcccataagcactggcttctcactcttatttttccctctggggagaaaaggaaatagtttgaaacatgacattcatgctcagaacaacagctaagacctatcatgcagcaacaatgaaggggagggagaaaataagaagctattgagacagcttgtttttctttgtacaagacaggtgcagggagaattctgcaggttttggactccttactcatttcttgcactaattgtgctgaaggtagttagcaaaagtgaacaggcacactgtagctttaaaaagtcagccatgaaccagaaggcagttggtgcagcttgtgtgtgattcctaacgtcatgttggctgagagccagcctggttttatttcactgtgtcaaattgtacctccttattgaattcctttgccagcctactttgtgaaagaaaacattggggtttctttggctgttcttgataagcctataaaaaatgatattttttagttgcttataggtaggttttctttttactcttccacagaaaagaaaataatagtaataataataagacaatgtagtgtggtgttgcagagtatcattgtgagtgttttgttttgttttctgagatgcttagaaaatggtgaatgtgtaacagtttccaactgaagtgaaatcatattctgttagcatggagcagcagcactatcttcctgtctactctctaacggtgtgtgaatgtatgctaatatctatatatatatattaaatgttggatttctctatcaatgatctaagtggtttgcagctggaagtttgtgtgtatgtgtgtgtttcaggagtgaaaattatcccacacttacagtgttatttgttaatcatctacttctctaacagtgataaaatcttgcgaatatactaaatgatgcacttgccatgtcagagtaatccctagagaaggagtgccgaagtataaagtgatttgagtggaaatgtatttaatttatggcttcagctgaataagagcaaacacgtttcgggactgtttcttccttttttttttttttttttcttaaagcagttttgttcgtagctttttcattttgctaattgcatattaattgtggaaggcttttaattttccacagccctcatcctactaaacaaaaagacagagtgatggatgctacaatatctccttaaatgttttgatgatttttcataaatctaatgagttacctactctttcttacacatacacacacacacacacacacacacacacacacacaccagcaccacctttctgtgctaagggctatctggcattttttgtgagcttcctgctttaccacagcatggccatctcacagacgggtttttgaggctttcgttgagaatgtgaggtaggggaatacttgctgacaaaagctttaagtgtccttctgcattgcaatgaaaaaatctaggagcaagggggagtggacaaaaaaaaaaccaaacacaataagaaaaaacaaatcaaagcccataatgggaggggggcaggaaaagggggattgtttt

SEQ ID NO: 1857 - DNA, 2300 bp, Homo sapien
acaaacctgacaaaaacaagcaatggggaaaagattctctatttaataaatggtgctgggagaactggctagccacatgcagaaaactgaaactagaccccttccttacaccttatacaaaattaactcaagatggattaaaaccttaaatgtaaaaccccaaactataaaaaccctagaagaaaatctaggcaatactattcaggacataggcatggacaaagatttcatgacgaaaacatcaaaagcaattgcaacaaaagcaaaaattgacaaatgggatctaattaaacaaaagagcttctgtaccgcaaaagaaactatcatcagagtgaacaggtaacctatagcgtgggagaaaaattttgcaatctctccatctgacaaaggtctaatatccagaatctacaaggaatttaaacaaatttacaagaaaaaaacaaacaaccccattaaaaactgggcaaaggacatgaaaaaacacttctcagaagaagacattagtgcagccaagaaacatgaaaaaaactcaacatcacagattattaggtaaatgcaaatcaaaaccacaatgagataccatcttacaccagtcagaatggcaattattaaacagtcaagaaacaacagatgctggcaaggttgtggagaaataggaatgcttttacactgttggtgtgaatgtaaattagttcaaccattttggaagacagtgtggcaattcctcaaagatctagaatcaggaataccatttgattcagcagtcccattactgggtatatacccaaaggaatataaatcattctatcatgaagatacatgcacatgtctgttcattgcagcactattcacaatagcaaagacatggaattaacccaaatgcccatcaatgatagactggataaagaaaacgtggtacatagacaccatggaatgctgtgaagccctgaaaaggaatgagaccatgtcatttgcagggacatggatggagctggaagccattatcctcagcaaactaatgcaagaacagaaaaccaaacactgcatgttcttacttgtaagtgggagctgaagaatgagaacacatcgacacagggaggggaacaacacacactggggcctgtcaggggtgggttggggagaaggagagcattaggaaaaatagctaatgcatgctgggcttaatacctaggtgataggttgatagtgcaacaaaccaccatggcacacatttacctatgtaacaaacctgcacatcctgcacatgtacttaaaataaaatttaaatttaaattaaaaaaaatttttaatcagctgaagaagacttatttgacaatatatgggaggtcttcaattctagttatattttgtaaatctactattttgaaaagcctgcctagtttcatctctatgacccagttttctcatttgataaaatgggccttatgtattttccttcatcagaaatgtgtttcaggtttttgttttttgtttttttggcttttttttttttgtaatacagaccctttatcacctaccttgtgccagcagaaaatattaaatagcactaggaaatactcatgaagtcactgaaagcattagcccttacagtgagccaaaatggattttgtgtccgatttaagtgcaaaagccattttgcttgtgactgttacttcaacaaatgaaatacttttgagccacacaaacagcttctctctgaataagctgctcagtgttgatttttaaataaggtgaagcctccccacagtgtatattatccactctaaatttcccaccaataggaaggcaaggcaagcacagccatcagctgagagtcattggctgagaatgttgagctcatagtcactccacccacaaggagctgctgacagaaggtgggcgggagtggaggcatgtgaaggatccatacaacaaagaggaacttctctccagaagatacttcatcccaagagccttgtgatagtattcaaaagggcttggtgtaaacttgaatagttcaccatcttcctttccaaccttatatggaaattcttccaaaaataaaccctgtcttggtggggaaaggctgtttaaagaaacatggtgaattactacaaagtactaggtgtgcctcaaaatgcttcctcccctgatattaagaaggcttatcaccagttggctctgcaggtacacccagacaagaacccagggaacaaagaggcatctgaggagaaattcaaacaagtagcaagaggcctatgaggtcttgtctgatgccaggaaatgaaatgagtatgaca

SEQ ID NO: 1858 - DNA, 2300 bp, Homo sapien
aattagccgggcctggtggtgggcacctgtaatcccagctacccaggaggctgaggtgggagaaccacttgaacgtgggaggtggaggttgcagtgagctgagattgcaccaccgcactccagcctgggcgacacagcaagactctgtgtttactttaacagagaagagtaatctctctctctctctctctctctctctctctctctctctctctctctctcagtatacatacatacatacatacatacatatatatatatatttgagacaatctcactctgtcacccaggcaaaagtgcagtggtaccatcatggctcactgcagcctccacttcctgggctcaagcaatcctcccacctcagcctcctgaacagctgggactacaggcatgtgccactatgcccgactaattttttttttattgtttgtagagatacattcttgctatgttgccccggctggtcttgaactcccaggctcaagcaatcctcctgccttagcctcccaaagttttgggattacaggcataagccactgcgtccagctgataatttttaaaaaaacttttaaaaattgacaaaaaggttggggttgttgaaatccttttttctgaacacaggaagaaaatatataaaacaaaatgagaacaggcacagtggttcatgcctgtaatcccagcactttgggaggccgaggtggatggattcccaggccgaggtgggtacactccagcctgggcaacaagagcaaaacttcatctcaaaataataataataataataccaatggaggaatgggtaagaaaaatatttcttcatttaacctgcagaaagctgtgaatctaccaaatacagcatagtcttggcctcagggcagtgagtttcaaactttagggtacaccagcatcaccaataagcttattaaaaatatagattcttgagcccaactggaagaattctgatgtagcaggtttggaataagtcctagaattctgccttttttgcaggcaccacaggtaattgggcaggtggtacagagtcctcctcccaaaactctgtcttaggatagagacacaagccttccccttttctatgaatcctgagaattgtgaacagttctagtgcaaccacagaggtaatctgatttacaagggttcagtttggtctggatcctctgatctggaactattatagttatcattgtgattatcagagagacagattaggggcagcattatttccaggcatgatgtaaactgctatttattatgatggcagctttaataattgatgcaaaagtatgcattaaagaaattattttcatatgtctatctactccttccctgattcacaaagaaattggtctcacctttttatagttgttatggtagtgggccattttattttggttttctacttcagattcagcttcgagaatgagaaagcatagtttgggcaaaatagatgtttgtaacattttttattaacctgaagagtgggtgatcaatatgtttacctattgcatagcagcctgaagcaccacattgagtggctaaaaccaggaagatggagagaatatgtaaacatctttggtaaaatacagttaaatttactgttactttgaagcaaccctttgaagtatcccttagcaactggttccttaagacagagattattaagtgacagatcctaattattactaagacataaggttttatcatttctgtttaatgtacgaaccacctgcatttgctctcattcattgagtcaaacaggagaagacatgaaatatatttaacatctacttattaaaatgaagtccccctgcccaatgaatttcatacaacaatgttcactccaaagagtgaactatctttccctatttttctgcagaactttttgatgactttgcaaaccagtcaacaattcagcacaaaggcatccagagtcacgctggcatgttgtgacagaatcgcacaattacatgggatccatcccactctgaaaatgccccgaacagcgaacagcacaggtaaatcaaatcaaacgtcagagccagcacagcctgagagcgccttgaaactcagactccacaatctatggggaaagtgtcctgctgtggcatgaaataaatgaaacagaaaatgatggcaagactgctaagaacatcctttgctttgctcttccttggcctctttggggtgctgggggcagcaacaatttcatgcagaaatgaagaagggaaagctgtggactggtaggtaaatgaaatggaaggactgctgcatgcaaacagcct

SEQ ID NO: 1859 - DNA, 2300 bp, Homo sapien
ttagtgggaaaataatgcctacattgttcctttccacatcaacgagactgctaggggaggaagaaggaaagagcaacattgtaaagcctctatcatttgccttagttggagtagataggccttcacttgccggaatacaataatgatctttgaaggtgcaaaggtagccccacaccctagcagggagacacagttaaactgctctgctaaacaaaaaagggacagaaagaagccagggattaaaaagcataagaaacatggagaaagactggggtaaggccttatggtgatgtaaaaccattcaatatttcttacctttagtaaaacctgccacatgcaatgtcttgagtgattggttctggggggaaaatgacaggaaagggactgatttccatgcctgattggcatagagccaaaagaagagagcaacagcagttggtgatatccaggtatgactcagtgttctttggaagctggaattatgtgccagaagtgactgtgagaatattactcctccaccccctgacctggaattgaacctctgacagagagtgaaatgcaagattagaccaactggtttaaatctcaaatgtgaaggtgaccaaggccaatagctgggttacatttggaattgtttcccttctcttgcctttacaaataagaatcttccgtgtaccttcataaacatttatcaaactatattgcctgcacttgtgtgactatattttctgctagacagggggcagagactgtacccctcttgttcaacactcaatagtcaaaacaatactgaacatatgtgttaaaggaataaagctattcaaaggcacatgcctacatctacctactcttaagtccatgatcttttccctttatcaatagcctctcttccaactaaggctacaatccacttaacctcagctggcagttacactcagttagaacaataaacttcatttatcataaaaaataaattcctcactggatcatcccagaattcctccatgttgtaccccaaaggcacacaaatggcctccttaccacattcaatgcaggttcacagagtaactaactcttcagagttctccaaatgatgatatgaatgccattcagtagctatgatcaattatggaaaatgaaggtaagaaaacagcttacttttcggggcattcctaagcacagtagacaagaatgctccaacagactatgttgtgcattgaaaaaaaaattttatcacatcatataattaagcaactgtgagaggcttcttcattgaatttgttttctaagaaaaaagcaagggccttttttaaggacataggttatcctttcctgcttttaattatgtcactcagatttttttaatattgacattattggcttcaattaaagttgtatcatcacacaaattaaatggaaccacctagaacaaatattagcaagtttctaaaacatgaaaaatagatactatcgaaataatagctttattttggctctaagatttggctgtttgaaaattgactcatatttggccttaccagaggaaatccaatatcacacagtaaatttcaccactttttttaagcaggaaaatatcaagttggaaaggtgaagtgacactgaaaaatggattgcagaaaaatcctctcataatgggaggaagggagagcagataatgagggatcctgattaaacacaacgctactacccagcagtgaagtgaagcacaaagtgtgcagagaaaatcagatcctgacagccagttctgcactgtgcctataatatcaatggaaaaaacctcagatgtaatccttggttggttgttcctacttcatttcctgaacaaataattcagtactcctttattatacactggttgcttaatcagaaacttggttccaaaacaaccaagagaaataggaacattgccctcacacacagatcacaatgcacagggctcctgtcacatgagtaaaaatcatgcacagttaaaaatggactttctttcccctgtctttcatgtcacaggcttcatattgatggggaagctgcctattaggggaatagatgacttctcatgtgtattaatgaaagcaatgtattgcaggctgggtagctggtagaaatgttgtgggcgtttgtaagtggaagatttacgccattataaccctaatatattcctgcagagtaacaacacagcctatctaatatacaatgatggagtccctaaacctgtgaattacagcagaaagtatggacacaccaaaggtatgacaaagattcttggtttctctttccta

SEQ ID NO: 1860 - DNA, 2300 bp, Homo sapien
ttggatggagcttgtgttctggaagacacagttttgatgcttttaatatcctgctgttgttaaatagaatttgaatgggtgaaaaatgaaatgtggacaaaaacatattggattctcaaaacacgaaatatagatattggtacataaaatttgaaattaaggcagattctggaaaactgactcctaacagtaaatcaaaagggatttcttgttgctatttggaaagcattttcataaaattagaatgaagaatacagcaaatttaaccactaggaaaacactttcttcacttgccttccatgacattctactctcttgattttctcttctccttctcctttgctgggtcctccttttctttccatctcttcatgcaggactcctccagggttcagtccttgatcttcttttttcagttttctatctacactcattctaatggtttgaaatactacctatgtgccaattacttccaaagtttgatctttagcccacacctctctgtcctgctgcagaatcatacatcccaactgactagttgacaccaccaatcagatcactaaaaagtatctcaaacttaacatttccaaaactgaaatcttgatcttacctctcagatttgttccatctgaactttcccgcatttcacctgatggtaactccatcctttgaatcactcaggtcgaaagtcttggagtcatccttgactctttcatgtcctcccttcagttccatcagtaactttaccttccagaggaatcacttctcaaccacctacacaagacttaccctggttcaggccactatcatttcttcccttcttccacacaccctgcccctgcataggctcttctcaaaagaagattctgaatgacgcttttactttatttttatttatttttttgagagggtctcaccctctcacccaggctggaatgcagtggcaccaacatggctcattgcaacctagccttccaggctcaatggatcctactgcctcagcctcctgagtagctgggaccacagatgtacaccatgcccaaacagatatatatatttttttactttttgtagacatggggtctcacagtgttgccaaagctggtcttgaactcccaggctcaagcaatcctcctgccttggcctcccaaagtgctaaaattacaggcatgggccactgcaccagcctgatacttttaagatgttaagatcataccattcttttcctcaaaattctataagagatcttcatctcacataaaataaaagccaaagtccttacaaaactctacaccacctgtccaatctcaacacttcttgcctttcctggcttgctactgactaggagcattggagctggctgtttgctttgccaggacagcttttctccttgataaccagcttttctcagattaacagctcttccctcagataactagtttagcccattacctccttcaaaccttggctcaatgtaacgttttcaatgaagcctactctgagaatcctatttaaaattgcaacgtactttgggagtccagggcggacagatcacctgaaatcaagagtacaagaccagcctggccaacatggtgaaactccatctctgcaaaaatacaaaaattagccgggcatggtggcacgtgtttgtagtcccagctactcaggaggaggagtttgcagtgatcggagatcgtgccactgcactccagcctgggcattaaagcaaggctccgtctcaaaaagatgaatgtctcttcatcttcttttatcctgttctattttttttccataccatgtcttactctgtagctcaccataatttatttgtatgctcattttaggtttccctcaagtaaaacgtaaactaatccaggcacggtttttgttgttgttccattattttgagggctgggcacatagatgcgcaaggagtgcccaaactcatcatctcactctttatacagctgggcaaactgcctaaagtttcctcaagcctcagctttactattttcttgaatggctaaaactcacaaaacacatctagcgtcaaaaactttgcgaccccggaagtaaaaggttaaggaagggggtcacaggagaaggctatttccgtttccgtacggaagcaaaggagccaagaccatggcgaaagccggggataagagcagcagcagcgggaagaaaagtctaaaacggaaagccgctgccgaagaacttcaggaggctgcaggcgctggggatggggcgacggaaaacggggtccaacccccgaaagcggctgcctttccgccaggctt

SEQ ID NO: 1861 - DNA, 2300 bp, Homo sapien
cacaaaaaaatcacctagcccagtcattgataaaacagatacacaacgttaaaccacatttagcaacatgtctaaagaaaagctcattaaaaagtacaaaaggggatgctccccttcttgctacagccttaacatcaggcaataactccaaaaccaaatcatgtctggtgcctttaatgatcccgaccagaaccagaagtctactgaagatttaggtaggatcagttttggggaattaggggagcagcagctagggttttcaaagtaaagctcttggagtattttagcctgagaacctcatgtcattttctttggagactaaagatgtacaatttattgctttcactatcccacccccatttttttttcttggtccatcctatctatgataaaggcacacctgaatgacatttaatggttacgaaataaatgatttcgagtttcagagccaaatccagccaagactgactagaaaccactgtgatgaggtaagaattgggagagtagagaaatggattccaaactgcagtgaggtctacagcatttcaaggactggacgtgagggggatcccacaccaagacgaatgagaattcccttcccttctgagttgaccacaactgagtaagctaggtccctgacatttctagttaacaaaactaaatgggagactctctctcaggaggatcctgcaccaagacgaatgagaatttcccttcccttctgaggtgaccacaactgagtaagctaggtctctgacacttctagttaagaaagcttagagaccctctcagttcacaaaacatttcggcaagtaataaagactagcctgatgagtataaaatcaaatcatcttaggaactggctgcttttaacagggcacatgatttacattcttgtttctttttttaactgcagaagtgtttcacatgtagcctgacctattgtaccagaaagaagccaatccatttaggactgtaaaaatcaggaaatacttagaacagcacttgaatgtcaagttattctatcaacacagacaaaaggctttttctcccaaagtaccccaagacaaggccaatactaaccagacgccaaaataagaccaataattacccacaataatcattttctccggcatgcggaccagtcgatatccccaaggtcaaatatgagcaaactgtgccataggtatgaaatgcacgctttgttcgaggttgtacggggcactgaccggaactttacactccaggatcgtttcgaaaaatgcttattcaatccacagtttaagttatgcaataattcgcttaaaagtatgtgttcaacggacaagagaagttgaaggtaagaatttaatactaaaggaagtaggtttgggaaagatcaaatgggagaaaagtctgctctgaatcaaaagtcggaaaataccctgtccgatgagaaacaggaggctggcaaagtgggaaaggaagggtgcggacagcgcgcggaggcgcagctgttggtgagaccagccgagaaggctgccaagggaggtagagacggaggaggaccggaatgtcggccacggttcaacccaggggccagcccgcctcggaaagtcctggggcggaagggcgaactaatcgtccccctaaaacacagcgtagacccacgcggcgcctgctctaaagctggccgctccccgatcgccgccgctgagcgcgcgtcctctccaggggaagcgagggccggcgcgtgtcccgcccgcccccgccagctgggccgccggatcccacccgccgccgccgccttcctcccgcctcggccgcccgcccccgctcacttttacgcggttgagtccggcctccagccggagctgttgaaccactttcttcatagcggcgacgctggaggagccagacatggtgcacgcgacggccgggccgattcgtgggtcggtgggtcgtgggccgtgggtcggcggggccagacaactcagcggcgcgcggcgggggcggggctccgaactttgtctctaagtttccggttctgtgctcagcggctccaccctcggtgcgcatgcgcgccttgccagccctctgttccagctccacacccggccccgagcgcgagcctggaggagggggaggagaaggggcggagcagtcggtgggcgcggcggctgctggaggctagcgcgacccgactcttaagttttcttttcctctccagaggggccgattagggagaggtaaggagagagcttaccgttagccgcgaagaactaagagggggtctgaagaggaccagggagggaaggcag

SEQ ID NO: 1862 - DNA, 2300 bp, Homo sapien
tgaatttagacctagtgaactaaagaacttagggtactaattaattgaatacggtgaagatctcaggtaaatttaaattgacagtgctctgctgacaaaacataaagtgacagattacttggtggtcttttcttggcatttattgctaaaagaatcctcttggtgacaacaggccagtcttcaaccaactgaacagtgagcatctatgtctgtacagttggtaacatgtttgaaatgtcttagatcattgtggaaggtcaaagaacatctaaacaaaagtttaagagatacagatagttcataaactatatttactggtaatcacttcagatgcaactgaacttaaagttatctcaatggttttgtttttttttttttgagacggagtctcactctgtcgccaggctggagtgcagtggtgccatctcggctcactgcaacctctgcctcccaggttcaagcgaatctcctgcatcaagcctcctgggcagctgggactcctgggtggcgcgcaccaccacgcccagctaatttttgtattttttagtagagacggtttccccacgttggccaggatggtctcgatctcttgacctcgtgatctgctcgcctcagcctgctaaagtgctgggattacaggcgtgagccaccataccaggcctcaatgttttatttttcttttgtatcctaaatagaatctttaaacacacgctacaaaaaaataacacctggtgtttgagacagcactccagtctgtggtttcccaatgcagcagttaataaaaaagcaacaattttttttttttctgaaactgtttcggcctaaaacactgcttattcctcaacagtctccctcacagaagtaattattggaccatatattccctaaaatctcttccagcattaacataccacggttctaagagttcagtgatatattttacaactactgtaaaacagatcattctttgaatagatacttgtgtttaatcttacaaatctgtaaagtatgaatgacgttttagcattatacagtcaacaaagcaccaaaggtgaaataattacaataccttttgggaaaagacaatatttattgagatagctttcacattctttttacatataatgtcatttcattccgaaaaacaactctacgaagctgtataatttactttgaaataaggaaataaagcctcagtaacttaagtggcttgcccaagaataccgtaagtagcagagccagaattcaaaccctggttttaaccccaatcattacatccgtatgaattaagtaaaatgctaaacttacgatgtacatttttgcgaactgatataaactgttgagtaaataaattagattttgttgaccagtgcaattacacatgcttccctaataaaaaatttgaaatccattaatgataaaattattaacattaatggaaaacatcagcgcattcggagattgactacccgaaaagaaataggaaacatctgcccttagtgctgtgacataacacacatatttccgtggatgaaagaaagacctactggctgagcctattttgtttggttagaccctaccctctctcctaaaaactcctttggtactcaatttcaagcaggaggtaataaattacaacggaaatactaaagagcaaactttccggaaacacaaaaataagttttattttaaaaagtacaataagcattaattctccagagtaaatgggtaaccgagcagacaggtgtaatcttcagccagcaccttggcttcttcacaatctccttcagaaaaaccgattcaagagctaagaagccagtaaagtcaaacctcgagaagatcccttctccagcgaatcagcgcccctgctccccgcccgcccggctccgctgggtacgcgacagcgacctccgcgcctgctctccgcctcgggtcagcggggctgggggttgggggtggaactgaaaatgcctgttggccaaactcgggtcacagagagacacgcctgtacggggcgggggtgtgcgggtgactcacgccgggtgcacagtagctcctacgcctcacccagtatctcccctcacttccctcaacccttcccacaaactgggaggaaaactgagacctcctggtcacccgccgccgggccttttagaaactcccacaagctctgccttccctccctggtcctcttcagaccccctcttagttcttcgcggctaacggtaagctctctccttacctctccctaatcggcccctctggagaggaaaagaaaacttaagagtcgggtcgcgcta

SEQ ID NO: 1863 - DNA, 2300 bp, Homo sapien
atttttatttgcatttttaaattgctgtattatttgttatttttaaatactgttatctgacattggttaaaaccatggatgtggaacctctggttatggaggttcaattgtactttttttttttttgagacaggatcttgttttgtcacccaggctggagtgcagtggcatgatcatagttcacttcagcctcaacctcccggcttcaagcaatcctctcatctcagcctcccgagcagctgggactacaagcttttaccaccgcactggcacacagggctaattttttgctttttattttttgtagagacagggtctatgttccccaggctggtctcaaactcctgccctcaagtaatcctcctgccttggcctgccaaagttatgcaattgcaggtgtgagccacagtgcctggcctagcttttcattctgaaaacgcgtgttcttcagtcctggagccttgataattacttatttcttttcttttcttttttttttttttttttggagacagagtctcactctgttgctgaggctggagtgcagtggtgtgatctctgcaacctccacctcccaggttcaagcgattctcctgcctcagccttccgagtagctgggattacaggtgtctgccaccatgcccagataatttttgtatttttagtagagatggggtttcacaatgttggccaggctggtctcaaactcctgagctcaagtgatctgcccacctcggcctcccacagtgccgggattacaagcatgaaccactgtgcccagcccaaattacttatttcttcttatttgtactacgctgcttctcaagcacctttaagaattatttatttcatcccctctgtactgcgttttccaattttcttatctttcagagtttttgctctacattcctcagtgttatcttctactaatagttttttcacttctttcttatttctattaacttttaaaaatcccctaccccttttattgcaccctgttgtggcttcatcttctcttatttttctggggctattatgagaatttttaaaagtgttctccctgcagcatctgcttcctccatattcctttgtctgttgtttgggtcccttctttctacattattggatttttttggttgctgtccatgattaaaagtaaaaattaaaaagtacaaagagaggaagctccaagtagatagctggtgcttttaactttgaatttcactgtagggtgatctgggtgtatgatttgtccagaaaacccgatgtcagtatctttgctcagcctcttaggttaatcagatagcgaggggtttcagttttcagtaggcataaagccacttattctccgttttaggtggaatacccactcagcagagaatttatccccttcagggaattcagccggggtgggagcccgtggtgggaaagaggggcagctgcccagagacatgaagctggaaaaaggatctagcgatcagagtccttgagcagcctttgactaatctcccccttttccgatttacctctcatactcatacttgtgctctccagcttccaacattttgttgctgttatctctttgtccttgtgtttaggttgttaaacttgatttttaacaggagagtaggcaaaattagatgcttgaattcaaaccacgatcttaactaagacctgatatccgtaagtaaaaatttttggtattccagctttcttttgagtagcaaaagaaaaacaaagtcttttggccactccaaccatgttactcagtaggcccttccaaagacacccacttctccattttggggatccccttgtaccttcagactccacaaggagtacacgaccagccacgacaaaacgagatgcagactattgggaggactataaacggtaggggtgatacccatttgagtccacgaacggccctctcggcgccgcagacactggctgtcccccgagacgctccagcagccacttaacttcacccacctgtagcgcccggggacgctcgaagcccgacctcccacgcccgccccggagccccgcccctcccgcccctccccgcccttcccgactctccccgccccttcctgccccgacgcgcagcaggccccgcccacccaggcggtaggaacccactccggcccgctagacctgctgctatgtcccggccgcagcttcgacgctggcgcctcgtctctagcccgccgagcggcgtcccgggtctagcgctgctggcgctgctggcgctgctggcgctgcggctcgcggccgggaccgactgcccatgcccggag

SEQ ID NO: 1864 - DNA, 2300 bp, Homo sapien
gagaaatgatcaacatggcctttggctagagatttactgcatccatccttggaaaaggaaaagaaaagaaatggccagtgaaaagttcaaattcttactttgtggatataacatgtcctagttgccacaagattaccatgtttttcagccatgcccatgaaaccatctttgcaaaaatcataacaattaaaaaacaatgacagtgaaagggatctatctgatctaaccaactcccatcttgccttgaacctccggactgccttagtcattcctgggcttgggccaagctaactttgggagaaatttatagtttaaatgataacagcccttccccaaaactaaaccacctttgtaaagcaaatgaaagaccaccaggctaggtggatgagaggagcacgaactctgctaaggggtagacctaaacaattacaagccattattctggaggtcacaagatttgcaacttcccccaattactcctgcagataacatcactattgtagaacctaagattggtcttctgagatgtcttttcaggcttttgtatttctgactaccatggctccacttggacctgccaaccagtcctgtggccccaccaagaagcaaattctgcacacccctctgattgcacccccaaccaatcagcagcacccattcccttgcctgccaaaccatccttgaaaaaccctagcctccaaattttcagggatgctgatttgagtaaaaataagactccagtatcctgttcagctgcctctgtgtgaattaaactctttctgtgttgcagtgcctctgtcttgataaattggttctatataggcagtgggcaaaatgaacccatttggcagttacactcagacagtggatctttgtgtaggttcttcaacagtgttgtgccagcctacaggatgaaacaccaagctcacagaagagtgttcatttaaaagaaagcaacactaatgatccacacaacatcctgaatttgttatgtcccagaaaggcttatcataagttcagtaattctggttcatctaccaagataagtaagtgtgtttgattttgtaaggtatgcagcagtgatctcctattttggtgtttttcaatacaattttggttatgtgcaaataaaaaattgatgaaattttattttccttcaatatcaacttaaatggttcttacatctataaagctttttctgactctgtggggaggcagtcacaactctgctctcagaattgaactttctcccttttattcattcagcaaatgtttattgagtacttattaggattgctatgctaggtgctgggattctaacatggaaggtgacttggccattgccctcagaaactaacaaactactgcggcaaacaagccaatgggccacttaaggcacctgagtaagtgctccaataaaggttttggagggctctgaggcagggaagagggggagaagcatgtttagcctgcggaataggaggtcagagaggatgcttgagttaagtattgaagagggaacagaacatacaagatcagaggtatgaaaccaaatgacctccagggaaattacaaatagctttgtaagaacaaagtggtgtgggagaacagtgggaggggtagagaggagccaggttaaaagggtctcagattcaagaagttttgaacttaccctgaaggcttagtgatgtgcttggtcaagcacaactgtgacccagagtgttccctctctctccttgtcatagcattgtgagtatacctctattaaagcatttattacaaatgctttaactgcatatccttctgtcatagcatttatcacaattctaattccatatggagaactgctgaaaagaaagcaaagtggagatgataccaggttgcagtaatccaagcaagaagtgattgagaggaatgcatgttcctacaggtagactctgattggatgtcggtgttaagtaaaacaatctctggctcagatagcggtggatgaaagggcttacagaagaacagctttaggggattgagcaggaaatagtctagtcagcagacctgggttgcctgtgtgttaacccagcaaaggtctgtcttcaggactggaaaatgacctctgagtcttacacattctgcctgctaagagtgattttgcatgcctgaggcctcgggccatgctgtaccggtgtgactaggtaagtttatcctaacaatgtgatttatggtgaatgccttttttgcctgtgggctggagtctgagtagctgagatcagtcacctgggtaggcactgcatacctacctgatg

SEQ ID NO: 1865 - DNA, 2300 bp, Homo sapien
gtaaatcattatgatatgttggtgatctgaggctattgagcctttacttcaaggagtggtcccatttattaggactacccagagcagagactgtttcttcaggatgtcttctaatatgggatttgacctgggccagaatcttgttattttgggtcaactatggacagaaatgtgtattcagtggggaaagttgccaatctatctggaaaagtttctagatctagcatatgattaatccaacttgttgaacaaaatttattgagtatatgctaggcactgagtttcaaagatgagtgaaaccccagtcctaggtcacgaggagattgcagtccagggaagggagacatattgaaacataactgtttgcttcattaattgttcttggggtaggacgcaagggaaggcttcatggagaggtaacacctgatctgagattggaagaatgagtagaaatttgctagtgtttggaaatgtcattctaggcagagtatatgacttgtgtaaatgcgtagcagcataagagatcactgcactttagaggaaccacaaatatctctgttggggctgcgatgggtatgtgatggtatgaagagtggtatgaggtaaggctggagcctcatctcctgatggtgtaaaaggaattgtacaaaaacagggaagcactgaggagttgtaaacaggaggaagacaatgtgtaaatattctggcagtggggtggagaaattataggggaattgcagacttgtatttgggatggagttagggggctcagaaagccctggtgataaagatgcctgttagcgaccctttgctgaggttttggacttgaactaaggtagtgctaatgggaatagtaagtaagattgagatctgacgaacacttaagaagtagaatgggtaggattttatgaaaaattgaatttggagactaggggtcatggattcaagaccccattcaggtttctgccttgagttactgaggatggcgatgtgattcactaagaaaggaaggaggggtgtgtgcagatgttcaggggtggtgctgagttcaggtaaagtgttgataatcatgctgagtgaatttctgatttgacatatatgctacatatcacctggcctagtgcctgtaagttatgtcatgccaactgatctaccctagtagtaagttttacacattcaaaaaaaaaggttgccaaaaactgacaaccttagagttatccaggttatactcctacattttctgtaccttcttgagatctgttcttacagaaattgtgcaagttattatttatggtcggttaagacataatttgattggcttttgaattttataaaaatattagtacaattttaaaaatattccatatgggtggcctcatgcagaactcggcacagttcctcagatgcgataagttgaaaaggagcatcttgtttcatactaattctggctttgctgccattccgctctgggaagtaccttcagagactttaccacttgcagggagaagtggtgtcacacagaagtcccatttctgtgacttgatgtgttgccactttgcttggtcacccatctttttcttcagacttagctccaaatcacttttgcttctttttcaaagccaagtatactctcgaaggatgatgacattgctgtacttgaggagatcttcaaaagtgtggtatagaagtgttaaaaagtattaaaaataaactttaaaaatattcaggggcagcatcatggagtgatgctctttccagggatccattttgaagcacttttgtatatgtgtacaaaatttgatatgtagattaaaatttgatgtgtaagtttaaatgttattttatagtgtgctttgtaataattcctttaaataaacatttcatgtgccactaacatttgattttgactaataaacactaggatgtataacttcttgttactgatattttaaggattcagttattctaaatcctttattaattttaagcaaaattgcttataaatgttttaggaacaactggaaacctccaggagggaaatgattgggcttcaggaaagagacagacagttacaatgtaagaacaggaatttgcatcagctactaaagaatgagaaagatgaggtgagttgtcagttattgcagatgaagtttaagtgaatttttgttttctttgtaatatgagatgaccataagagccactttacttgaaaaaagaaagaaccatttattcatctttccccaaattgatatggtggacctttgtgtaatagtatttaactggaagctcaggaaccctct

SEQ ID NO: 1866 - DNA, 2300 bp, Homo sapien
tctctctgtttttcatcgttaacacattaatatccatcataagtctttgtatctgctgtttcctttacctgggctgctctggtcattgattttcttgcggctgactccgtatcatttaggtttcacttcagatgtcaccgtttcagtggaggttttctcactgatctagatgctccctaccttaatactctctcatattaccatgttttattttctttttagttatcactctgttaagttgttgctcatttgtttagtatttatttctatctccatcagaatatgaacttcacttcttgagaacatggcctcccctgtgcctaggaaaacgtagtagcacatagtaggagctcaattagtatttattggatgaatataaatttcttttttctttttgagatggggtctctgtcgcccaggctggagtgcagtggcacgatctcagctcagtgtaaccttgcctcccgggttcaagggattcttctgcctcagcctcttgagtagctgggattacaggcgcatgccaccacgccggctaagttttgtattttcagtagagacgggggtttcgccatgttggccagactggtctcaaactcctgacctcaagtgatccacccacctcagccacccaaagtgctgtgattacaggcatgagccactgcagccagactaaattttcatttaacactatattttgaatattttaccacagtcttaaatattcagaactgtggttgtgaactcttgatccacagtccagatctggcctaaagacacattttatttggcttattacatagtgctgttgtttgaggtataacttacagtcaagtgcacagatcttaagtgtacaacttgatgaactgatcttgtgtgtaccagtataaccacatctcagatcaagatgtaaaaagttttggcaccccagactcactcatttccttctctagccactcccctttcccacaggataacttaatacatagagttttttttttttttaattagctactagcattttaaaattgggagacttcacataaaaattcagagttccagtatctcataaaaacatcaaagatcaacacaaccgctttccccttgaccacaatttattgtagccgagaagcagctgtccacagtattgacatgtgttccccaggctgcctgcagtcttcacccttcctcctcttccccctgaccttgaaatcaattgccagttgccacttacaatttcatttgaattgtttttcttatgatggagaaatatttatctcttccattgtctctataaaaaagtgaaaacataaatgaaaacagaaaaggtgtcttatacttagtccataccattcatttgtagttttggctgtttgtttgccatcctaattccacacagttacgtttaaatgctgtataaatatattgtttatttactcattcttctatggaaacataaacacattatttttgttcttttgatattgtaaataacattttagattatctttgtacacagcattttattaggataatatttttgaagtagattttctggatcaaaatatattttaagacttgaaacatattgtcagctttcttggtagtagtgtaaattgctataatctggagggagtatatggaagtttcatttctctacatctttgccaacactgggaattgtaatttacaagttttgccaatatagttggtaaaaacaaacaaaaatgaaaatgctggccaagaagaagtttttcatcatcttatctatataattgtattttattttagaggatataatatagaaatattacttagtacaatgctataccttagatgtatgttgagtcaaatcgtgtaccatgtatcttgtatataaagtaatatgaatacctcagtagaacttgggaagcctttaaccttgatccttacatattatttatatttctatgtatatacacacaccatgttctatatctgtgcatgggaataggtattgcaaaatccttctgttttgaagcacatacaactaattcttaagcattgggtttatattggctttcatattttaaattagatgctattattctataatctgctttttaaggagatgcctacatagaagagtgacagcagctagactaaatgtttaactgctgaactagttcctcaggtatcctggctctagagattgctatgggagattggatgactgttacagatccaggtctgtcttcaggtaattaagtctaaataattgtaaacaaaagcagaaactgtaaaggtgaatttttcaatga

SEQ ID NO: 1867 - DNA, 2300 bp, Homo sapien
cttagtctgtcaggataaaatccttcccctgaagctcctcatcccccactccccattatggactgagcagaattaggtcatatttttagccccttaaccagttattggttaacaaagagggacagagtacaaagaggtttagaccagtggttttcaaagatctgctgaaccttggggcggcaagtttccaagacccttccagggagtctgcaaagtcaaaactatttttgttataatactaagatattatttgcctttttccctctcattatgagtgcacagtagagttttccagacgctacctgaaatagcacaacagatcgaatgcacaaacagatatgaaaatccaaatgccttctattaagcaagacattaaagatatgggcaaaattttaaagtaacaccattcttttaactaattttttgaaaatagttatttttaattaaaatgcgctatttgacatttttatttttattcattattattttaaaaaatagcaatttttaaatttctgttttaatattaatagctgtaaccaacataaagaaaagttcttggggctctcaataattttacaagtggaaagcggtcttgagaccaaaagattgagaccgctggtttattcaggcagatcttattcctttcccggggttgctgaggtcagagctaaacttcccagagctcaactaagcttggttcaaaccttttaaaaatgtaactgttaatggtaacgccacctgggctcaacagcagctagacgggcctctgattgcttggccaaaggaaaagaggaggatttcgttgggccctgaagttgtcaccgtggcgtgcttcttctggccctgatctttcatccaggattggggatacgtgcatgcaaactgggaggtggacattcctcccgctcttgtttttcagtgttagcatcttcactcatactgttttggtttcaaagtgctctcaggagtctccttaaaacaccaaacctgtttttcgccttttgaataaatcccttggcttcaccaaaactaaacaaaacaaaaatcaaagaacatctttgtgtaacctatatgcctgtgatttctccatctgatctcctttctctggcctcttttcttttcttccccagtgaattttaggctgccatgaaaccagggaggagacagcctgaccctggccacgggtgcagcaggcatacattttcatcgcacatactttgtcgagtgggtgtaagacatttttgcataaactgagttcacgaatgctatttcttagtctttcctttgcccgcggtcttctgcccagatccatttcttcgccctaattttacatataactttctcccggctggattgtttgcatccacgactcccgacgcttgaacctcccgttccttggacctgacctaattctaggtgcccgcagtttatttctccactttggcaaacgcacgtggctctcctggaagcttcacttttgctgctaggctgggtgttggggttcagtggggctcggaaaacgtgctctaaagtagccacgaccccggtccctgcagagtcccggcccccacagagccccggccccggacgctgcaggcgtcagaagggggcggggagcagaaaacggccgggtgaatcactgggcgtaacaggtgccgcagccgcagctgcgcccgcagcgcgcgcggaccgcagggataaggtcttctttttctccgggtttttttggaggtaaggaggagactaccgaggcccccacccgaccaatgcaggccacggttgttcatcgcctagcaactggcggagccaatgggaggcggcggggcctgcggcgccggcgcgcgggggcggggtgggaacctcggaaacctgcggaggccgggaggcggctgcaaggggcggggaaggcgggagcccgcagcggaggaggggccgcgggcgggaggcgctgcgaggcgctgctggccctcgggctgcgggagccgggctaggacgccgagcggtgactccccgccgctcccgggggccgtgacggtgagcagcagcgcctcgcgtcggggattgtgacgcgccccgccagggaggggcgggcgggggtgggcgccggcaaggggcgggcgcgcgcggaggtgagagccggcacctggctcagcgccccgttgttcggcgggaggctccgcgcggctgttggggccgttgcagggtgcgggcgagcgtcgacccgggccgctcctggaggaggaggtgggaggtaggtgctggccccgggaccgctctcgctggcgttcgcggagctgcgc

SEQ ID NO: 1868 - DNA, 2300 bp, Homo sapien
accaagtgaacacatgctcttagaaaaaatggtgccactagacttgctcaatgcagggttgagcaacaaacctttattaaaaaaaaatacagtgcctgtaaagtgcaataaattgaagtataaaacgaggtacgcatgtatttttcttgcttttctctcgtggttgcagaatatgctgccacagctccaaacatgtctggcttactggaggatgtccaaggcaagaaggaaaaaacttgtccttagtctgtcaggataaaatccttcccctgaagctcctcatcccccactccccattatggactgagcagaattaggtcatatttttagccccttaaccagttattggttaacaaagagggacagagtacaaagaggtttagaccagtggttttcaaagatctgctgaaccttggggcggcaagtttccaagacccttccagggagtctgcaaagtcaaaactatttttgttataatactaagatattatttgcctttttccctctcattatgagtgcacagtagagttttccagacgctacctgaaatagcacaacagatcgaatgcacaaacagatatgaaaatccaaatgccttctattaagcaagacattaaagatatgggcaaaattttaaagtaacaccattcttttaactaattttttgaaaatagttatttttaattaaaatgcgctatttgacatttttatttttattcattattattttaaaaaatagcaatttttaaatttctgttttaatattaatagctgtaaccaacataaagaaaagttcttggggctctcaataattttacaagtggaaagcggtcttgagaccaaaagattgagaccgctggtttattcaggcagatcttattcctttcccggggttgctgaggtcagagctaaacttcccagagctcaactaagcttggttcaaaccttttaaaaatgtaactgttaatggtaacgccacctgggctcaacagcagctagacgggcctctgattgcttggccaaaggaaaagaggaggatttcgttgggccctgaagttgtcaccgtggcgtgcttcttctggccctgatctttcatccaggattggggatacgtgcatgcaaactgggaggtggacattcctcccgctcttgtttttcagtgttagcatcttcactcatactgttttggtttcaaagtgctctcaggagtctccttaaaacaccaaacctgtttttcgccttttgaataaatcccttggcttcaccaaaactaaacaaaacaaaaatcaaagaacatctttgtgtaacctatatgcctgtgatttctccatctgatctcctttctctggcctcttttcttttcttccccagtgaattttaggctgccatgaaaccagggaggagacagcctgaccctggccacgggtgcagcaggcatacattttcatcgcacatactttgtcgagtgggtgtaagacatttttgcataaactgagttcacgaatgctatttcttagtctttcctttgcccgcggtcttctgcccagatccatttcttcgccctaattttacatataactttctcccggctggattgtttgcatccacgactcccgacgcttgaacctcccgttccttggacctgacctaattctaggtgcccgcagtttatttctccactttggcaaacgcacgtggctctcctggaagcttcacttttgctgctaggctgggtgttggggttcagtggggctcggaaaacgtgctctaaagtagccacgaccccggtccctgcagagtcccggcccccacagagccccggccccggacgctgcaggcgtcagaagggggcggggagcagaaaacggccgggtgaatcactgggcgtaacaggtgccgcagccgcagctgcgcccgcagcgcgcgcggaccgcagggataaggtcttctttttctccgggtttttttggaggtaaggaggagactaccgaggcccccacccgaccaatgcaggccacggttgttcatcgcctagcaactggcggagccaatgggaggcggcggggcctgcggcgccggcgcgcgggggcggggtgggaacctcggaaacctgcggaggccgggaggcggctgcaaggggcggggaaggcgggagcccgcagcggaggaggggccgcgggcgggaggcgctgcgaggcgctgctggccctcgggctgcgggagccgggctaggacgccgagcggtgactccccgccgctcccgggggccgtgacggtgagcagcagcgcctcgcgtcggg

SEQ ID NO: 1869 - DNA, 2300 bp, Homo sapien
ctgtgtcttagggagtagggaggcccaaggagagggagagagatgatcagccagtcagtggagcagtcaacatatacattgaattggctgtcttataagggtgcagtttgcggcacccccaaaataatacaatagtgacatcacagatcaccgtaacatatttaatggaaaagtctgaaatatttcaaaaattaccgaaatgtgacagagacaccaagtgaacacatgctcttagaaaaaatggtgccactagacttgctcaatgcagggttgagcaacaaacctttattaaaaaaaaatacagtgcctgtaaagtgcaataaattgaagtataaaacgaggtacgcatgtatttttcttgcttttctctcgtggttgcagaatatgctgccacagctccaaacatgtctggcttactggaggatgtccaaggcaagaaggaaaaaacttgtccttagtctgtcaggataaaatccttcccctgaagctcctcatcccccactccccattatggactgagcagaattaggtcatatttttagccccttaaccagttattggttaacaaagagggacagagtacaaagaggtttagaccagtggttttcaaagatctgctgaaccttggggcggcaagtttccaagacccttccagggagtctgcaaagtcaaaactatttttgttataatactaagatattatttgcctttttccctctcattatgagtgcacagtagagttttccagacgctacctgaaatagcacaacagatcgaatgcacaaacagatatgaaaatccaaatgccttctattaagcaagacattaaagatatgggcaaaattttaaagtaacaccattcttttaactaattttttgaaaatagttatttttaattaaaatgcgctatttgacatttttatttttattcattattattttaaaaaatagcaatttttaaatttctgttttaatattaatagctgtaaccaacataaagaaaagttcttggggctctcaataattttacaagtggaaagcggtcttgagaccaaaagattgagaccgctggtttattcaggcagatcttattcctttcccggggttgctgaggtcagagctaaacttcccagagctcaactaagcttggttcaaaccttttaaaaatgtaactgttaatggtaacgccacctgggctcaacagcagctagacgggcctctgattgcttggccaaaggaaaagaggaggatttcgttgggccctgaagttgtcaccgtggcgtgcttcttctggccctgatctttcatccaggattggggatacgtgcatgcaaactgggaggtggacattcctcccgctcttgtttttcagtgttagcatcttcactcatactgttttggtttcaaagtgctctcaggagtctccttaaaacaccaaacctgtttttcgccttttgaataaatcccttggcttcaccaaaactaaacaaaacaaaaatcaaagaacatctttgtgtaacctatatgcctgtgatttctccatctgatctcctttctctggcctcttttcttttcttccccagtgaattttaggctgccatgaaaccagggaggagacagcctgaccctggccacgggtgcagcaggcatacattttcatcgcacatactttgtcgagtgggtgtaagacatttttgcataaactgagttcacgaatgctatttcttagtctttcctttgcccgcggtcttctgcccagatccatttcttcgccctaattttacatataactttctcccggctggattgtttgcatccacgactcccgacgcttgaacctcccgttccttggacctgacctaattctaggtgcccgcagtttatttctccactttggcaaacgcacgtggctctcctggaagcttcacttttgctgctaggctgggtgttggggttcagtggggctcggaaaacgtgctctaaagtagccacgaccccggtccctgcagagtcccggcccccacagagccccggccccggacgctgcaggcgtcagaagggggcggggagcagaaaacggccgggtgaatcactgggcgtaacaggtgccgcagccgcagctgcgcccgcagcgcgcgcggaccgcagggataaggtcttctttttctccgggtttttttggaggtaaggaggagactaccgaggcccccacccgaccaatgcaggccacggttgttcatcgcctagcaactggcggagccaatgggaggcggcggggcctgcggcgccggcgcgcgggg

SEQ ID NO: 1870 - DNA, 2300 bp, Homo sapien
catgcgcctgtggtcccagctactcaggaggctgagacaggagaatcacttgaacccaggaggcagaggttgcagtgagccaagattgcaccactgcactccagcctgggcgacagagcaagactccatcttggaaaaaaaaaaatgctatctctcttaagtggagtttcacaagatgtatcagaaacccttaaatagatttatatcctttacttcaatttgaaatctatgggttattcctaaagaaacaattggctagatatataaagattaatgaacaagaatgcagccttgcttataaaagtgaaatacaggaagcaaccctaatgtccagtatttaggattagttaagtcaggtgtggcctattcatataatagaatattgtgaagctattaaaattatactacctgtatttttaatttggggaaattatgatatagtgtaaatatatgatattatcatgaatttatttgatatttacagttaaatattggtgactgtctgccaaagagagtaatttttattttgtcattatgaaaattgagtcttcctttcttgtaattgaaagatactggaaccatttgtctcttgagactactcccagttttttttaagcatataaaatgatatttacctcccatttgctatggccaaaaagcaatatctaattcatgtaaaagtatcattataccattaaaatataaattaaaaaaaagactgagatacatttctattttgtactacttaatagttatctggtcttcttgattctggttgtggtattagatttcagaattttcaggaactttaaaatctgggggcttttactgagcttttactgtcacagctcccagagggctgctcagtccctctgccgactgaatctctggttctccagggaataagctgcagcctcattctcagtgagggagcagatggtcattcttccaagaagctagaaccctgaccctaagcccaatcttcttccgtaggaccgttcatggctgtggccagaccactgtgaggcagaacacttggttttccccaccacgtgtagacagatgggcatccgtggggcttctgcccagcccttccttggccaagatccctcgcttttgggattcaagagatcttttactgagaggattagtgtcttccctgtctgcctgatatcccagtttggggtcttctttcagacaagtgtctgaagaacatgccctcacttaatagatatgttctcacatccacattgagttggagatctgccccaattccaaatctcagtcttgcctgtggaagcccgatcctcctccacctgccgtgttgaggaatgctggaaaatccagtgagcaggttcacattggtacagtttgggttaggagactataaggaagaagtgaacaaaaggtaaggaagggagatattgggaccaaagtctccatccctgcatcatatacctaatatgtgaatatcagagttgtttgttgaaaccaaaagatggcaaaaggaggatcaggagtggaatcagaagtcatagaaaactggtctcttggggtatctgtttggttatgtgaatggtaattcaactcctattatcttgggaagaatgtacctgaaattaccaacctgccgttgattaatgaacatatccataaataactaatgaactgggagccaggaggaggcattaacataatgtgttgtcattgtgttaccagtgcagagtggatattgcagggctcagcacatttgccctgttgatgcctccatgagaattcattcattcattcagccagccagccaacctaccaataattacccaccatgaggcagacagagcaactgaatcctagggttgtaatggtgaacaaaatagagatacaccctcctaacctgagcggcctagcctgggaaacaaacaattaaaatgtgcgctaaatgctgtggtaggaggtcaggggctatgtcctggaccaaaggacatttgcactgagacctgacacttcaggtcttcaactcccttgatgggagttagccagaacgggcttagaaacagcaattgatggcttagtgactgattttacaaatgatatttgtttcttctttaaatttctttctaggatgttcacttctccacaatgaatgagtgtcactatgacaagcacatggactttttttataataggagcaacactgatactgtcgatgactggacaggaacaaagcttgtgattgttttgtgtgttgggacgtttttctgcctgtttatttttttttctaattctctggtcatcgcggc

SEQ ID NO: 1871 - DNA, 2300 bp, Homo sapien
ccatatctctcccaagacttgagaagatttcaactgggttatttgaaaagacctgtcttcaagttcagaaattcttttcattttattttactttatttttatcgagacagagtctcaatctattgcctaggctggagtgcagtggtgtgatctcagctcagtgcagcctccgcctcctagattcaagtgattctcatgcctcagcctccccagtggctgggattgcaggcacctgccaccgcacccagctaattttgtattttctattagagatggggtttcaccatgttggccaggctggtctcaacctcctgacctaaaatgatccacctgccttggccttccaaagtgctgggattacaggcaggccactgcacccggccagaaattcatttttctttgcttgatgtagtctgttgttgaagctctcaattgtaattttttaatttcactcattgaataattcagctccaagatttttgtttggttcttttttatgctatgtctctctgttgaatttctcaatcaaatcataaattatgttcctggtttcattgaattgtttgtattcttttatatctcactgagctttcttaagatcattattttgaatttttcaggcatttaatgaatatccttttctttggggtctgctacttgagaattattatgttcttttgggtgccatgttttcttgccttttcatgtttcttgtgtccctacattgttatctatgcatctagtgaaatagttgctttttccaattttatggaatagctttcacagggatagactttttcctgtagatgggccctagggtgttggttggttatagtggctttggttctgggcagactcagtagtatggtgtccatgcagtttgttcagttgtactccttgtcagtgatgtctgtgattggctcagtggcctaagctgagggagtttttaacagcaatgacacagttttgctggaggcagggatgccagacttgttgtcgggctggacatgtgcatacatgataagcagcaggctgtgtggcaggctcttcaactgggtaggggcaattgctgcccagctggttgtcaggccaggtgtgcatggttgtggtggggccagtaggctgtgaggcaggctctttagagatgcgaagttacagctgaactggctgtcaggcctgtgtgggtgtggagagacagccaactgtgtggcccaagtgtgcacaagcacagcacaccagccagctgtttggcagcttcctgctgtgcacttctgcctgttcccaggggcaggggcaggaaggggtgctgcatggattcagatgtcagggtctcagatgttccatcaggtctaggctctaggcagccagtgtcatggtgttgcaggcacctttgtgaacatggtagaataatggcaggacttcagggatggagagacacaaagagtactggcccccagggcagaacacactctgttagcatctggtctctaaatggtgtcatgccatagcagcttaggtcacagaggtgaagagtgcgcaatgtgtgcttccactctggggcagcatggctgtatgaactcccggcacctctccaaactggattcaaagcctgtgaggactggagggctctcctgtagcaaggactgctggcattctgtggccataatgaggaccaccagagtctctagcctaacgttttcctatccaaagagattcccctggctctaagctgatcctggctggggagacagtgtggcagaggcagggtgccttgctccccttcctatgttgctgtcctgggctttcatgctccacaggattttcctgctaccctggtgctctccagtgtacttctttagtgatttcagtcaaaatatagttgtttattcattattttggtcccgtgtgtgtgtgtgtgtgtgtgtggtggggggtgcaggaaatgagtgtcaagtaattctagtcagccattttgctggcctgtgtaattctctttggatcagcacactggatgccagtgattttttttttaagcagatttgatctaacatgttatactttcttctgtgttgtaatctcgctatacatttgtgtctccagattatctttgacaataaagctcacagtggcaaaatcaaaatctattttgacagtgatgccaaaattgaagaatgtaaagacttgaacatatttggatctagtaagtatgctatatacttgcccatgggaattatagatgatttttaacactttattttgtggcttggggtatttaaatggtttgtttgcatgataatagg

SEQ ID NO: 1872 - DNA, 2300 bp, Homo sapien
gagatcctcagatctcccttttgaaactatttctccgtctgcaggggtccccaaaccccgggctccagactggtacaggtctgtggcctgttaagaaccaagccgcgctgcaggaagtgaacattgagcaagagagcagcggttccactcgattctcataggggcagaagccctactgtgaactgcgcatgcgatggatctaagttgcaggttgtgtgctccttataagactctaatgcctactgatctaaggtgcaacagtttcatcccgaaaacatcctcccctcatccccccacctgtccgtggaaaatatcatcttccatggaaccagtccctggtgccaaaaggttggggtcttactatgttgcccaggctggagtgcagttactattcacaaagctggatgattgcgcacctccgatgaaaggggctcaaaaccaaggcatttctgcctaataaccccttggaagtgccttaaaagagggtcaattatgtgtgcttttatatacatcgtctgtccaactgcttctgcctggacacgcatattaaaataattacctggcagaatattctttgcctgagctaaacccggagatcttttaaacgcttgcagactcacagagcctggcactgcggactttgctgctgctacctcgtgaaaaggaggggtacgagctctaggaggctgtcggccacgtccaaactaccaagctaacatcactaggagccgaacacggcttttggtcatgtactgacgactctcatctctaagattcacgaacggcgaccgattgtctgttcgatttcccacaggcgtcttcctttcgtgcaccaagagggaaaagcaacggcggctgcagcagggcgctggggttacgagtccagccctggggccgtgcgccctccctccgcgcccgccgggccacgctgacgctccctcccggctccctgcctttcatcccgacgcgggcgcagggcaactcgcttttcctattccttgcgcgccggtcgcactttctaacatctcagaaatatggcccttgtcacagactttcatgatcgtgcactttagagaaaagccagaatgaatgaacttgtcagtttaatgtgaagtcctcaagggaaaggaccatgtctttgtcatcccagagaccacagtacccaacggtcggcttggctctcagtgagtgtttccctaagcatcaaaacaggaatgaccaaagcaacggacaaattaatgcatgtggaaacaagaaatgaatgcatgagagagtgaagaaaagaaggggccaggcgcagcggcttacacctgtaatcctagcactttgggaggcggaggcaggagaatcgcttgggtccaggagttcaagactgcagtcagcagtgatcgcaggtcaggcgacagagtgagacccggtctcaccaccacccccccgaaaaaggcaggaaccccagagggccgggagtgccaggtgcggccgcccgggagcggtgtggagggtgcgtgggccactttgccgcagggcccaccgcccgggtccctctgtaaggcgcttctccggcagacaccccgagccaaagcgggccgtaccgcagcgttgggcacttgggtggagagtgcaagggcggcgggcctgcgcccagacaggtgtagccgtcccacgctaggtgtcctcctgccgctccctggccgcgccatgcctcgaggcatggaggtgctggacctgccggtgtgcaaccgcgcctcgggcctgtcctgggggccgcaccacaggtcagtgccccacggcgcccttggcgtgccccacgcctccctgggggccccaccgccgcccccttttgggactgcttacttcctcggctcttctcgcgcgcgcctcggttccatcccctacggcccccaccccgcctccgcgtcgccgacccccttctccgggagcgcggggaggctggtccgctgaagcgtggaataagtcccctaggaccccaactggggaagctccggtccccggtaggaggcggcggggcggggcggggcggggcagccccttgggggcggggcgggagcgcctggccacgcgccgcatcctgcagggtgcacacagagccgcctttcagccgcccgagaactgcccgccgcactccacgactgcggcgcctgctctcgggccggggtctgcgcgcaccacgcggccggcagaaagggtaagagaagggaaccccgctttgcagggctccaacttcggcggacgcgttacggcgagggcgaaatgagtcggccgtgaacggtgtttcctgt

SEQ ID NO: 1873 - DNA, 2300 bp, Homo sapien
gagagcaggcgccgcagtcgtggagtgcggcgggcagttctcgggcggctgaaaggcggctctgtgtgcaccctgcaggatgcggcgcgtggccaggcgctcccgccccgcccccaaggggctgccccgccccgccccgccccgccgcctcctaccggggaccggagcttccccagttggggtcctaggggacttattccacgcttcagcggaccagcctccccgcgctcccggagaagggggtcggcgacgcggaggcggggtgggggccgtaggggatggaaccgaggcgcgcgcgagaagagccgaggaagtaagcagtcccaaaagggggcggcggtggggcccccagggaggcgtggggcacgccaagggcgccgtggggcactgacctgtggtgcggcccccaggacaggcccgaggcgcggttgcacaccggcaggtccagcacctccatgcctcgaggcatggcgcggccagggagcggcaggaggacacctagcgtgggacggctacacctgtctgggcgcaggcccgccgcccttgcactctccacccaagtgcccaacgctgcggtacggcccgctttggctcggggtgtctgccggagaagcgccttacagagggacccgggcggtgggccctgcggcaaagtggcccacgcaccctccacaccgctcccgggcggccgcacctggcactcccggccctctggggttcctgcctttttcgggggggtggtggtgagaccgggtctcactctgtcgcctgacctgcgatcactgctgactgcagtcttgaactcctggacccaagcgattctcctgcctccgcctcccaaagtgctaggattacaggtgtaagccgctgcgcctggccccttcttttcttcactctctcatgcattcatttcttgtttccacatgcattaatttgtccgttgctttggtcattcctgttttgatgcttagggaaacactcactgagagccaagccgaccgttgggtactgtggtctctgggatgacaaagacatggtcctttcccttgaggacttcacattaaactgacaagttcattcattctggcttttctctaaagtgcacgatcatgaaagtctgtgacaagggccatatttctgagatgttagaaagtgcgaccggcgcgcaaggaataggaaaagcgagttgccctgcgcccgcgtcgggatgaaaggcagggagccgggagggagcgtcagcgtggcccggcgggcgcggagggagggcgcacggccccagggctggactcgtaaccccagcgccctgctgcagccgccgttgcttttccctcttggtgcacgaaaggaagacgcctgtgggaaatcgaacagacaatcggtcgccgttcgtgaatcttagagatgagagtcgtcagtacatgaccaaaagccgtgttcggctcctagtgatgttagcttggtagtttggacgtggccgacagcctcctagagctcgtacccctccttttcacgaggtagcagcagcaaagtccgcagtgccaggctctgtgagtctgcaagcgtttaaaagatctccgggtttagctcaggcaaagaatattctgccaggtaattattttaatatgcgtgtccaggcagaagcagttggacagacgatgtatataaaagcacacataattgaccctcttttaaggcacttccaaggggttattaggcagaaatgccttggttttgagcccctttcatcggaggtgcgcaatcatccagctttgtgaatagtaactgcactccagcctgggcaacatagtaagaccccaaccttttggcaccagggactggttccatggaagatgatattttccacggacaggtggggggatgaggggaggatgttttcgggatgaaactgttgcaccttagatcagtaggcattagagtcttataaggagcacacaacctgcaacttagatccatcgcatgcgcagttcacagtagggcttctgcccctatgagaatcgagtggaaccgctgctctcttgctcaatgttcacttcctgcagcgcggcttggttcttaacaggccacagacctgtaccagtctggagcccggggtttggggacccctgcagacggagaaatagtttcaaaagggagatctgaggatctcaaacattaatgtgcatatgagtcaccagagtttttattgaagcagactgattcagtaggacctgaggttttgcatttctagcaagaagatgctcctgctgctgctgctgctgctggtcccactctgtaagtag

SEQ ID NO: 1874 - DNA, 2300 bp, Homo sapien
gtaactaaggtaagagttttttttttttttttaatcttacaagaaatgctcgaatctttaacaaaaatgagtggggctataggggaaagtgaggtcaaggcactatggtgtgcatgcttgcatttgtttcctccgtccattcaaagtgagaatgctcccattttcttactttaccattgatgtgctacaagcttatttattttaagactaacctagcctaaaaatcaactgtccccacaaaataaaaatcacattaaaaaaactaatagtgttcagactaatcttgctcaaacttatgtttccctagtcttgatgcaactgattgagtcacctggggagttggttataaacctgggcagagaccccaaatgcaatggctcagagaagataggagcttatttctgtcttatgcaatagtcagaatgggttttacagactggtgagtagctcaacatctcacagtcattcaggcacccatgttcctcccattttgtttctctgccaccccttaaggacttgccctgactgcatgattattgccgtgttgcctcaaacaggttgcagcttatgggaagcaaaaacacggtatggtagaagctctcccatagactgatggcttggctcaagagtggccgactttatttctgtacatatcccactggatagaatttagtcaatcctaactgcagagggagccagggaacacagcccaggcatgtgcctaggaaggggagaatgggtttaggttgacacttagcagctgccactatatgtggctatagtatgtatcattggaatagatgtttaactttagggacaaataaaaaaccaaaacaaaaaaaggagtaaggggagagatttgcagcaaatctttatttttaccaacctcaactatcattaatttcagtgaaccctaaatggtatccaacaaaatatctttctagaccattcaccgtctctgcctcatagatgatcatatcatgttttcttctcttctgaaacctctaatacccttgtcctatcctcattctaagctgatgaccttacttcctatttcacaaaaataatagaaaaaaaaaacagaatttccacaaacccccacctaatttatctgcctcctgccatcagtgccaatatactgtgcttttcttctgtggatacattatttaggccactattcagggccaacccctccacctgcctactagaggccatcaccacttgtttattcaagggcacagctccaggtagttttccttctcttggggatcatcagtttccttctgtctaccaggtcattcccattagcatgtttttgccgcttttcttaagagataatatctcaaccctaattcctcccgctaacttactaccatcatttatttagtaaaatatctcaaaaaagtagttaatcttgttgtttctgattctgctcctcccctcccccacctgttttttttaagagacaggatttcactctattgcccaggctggagtgcagtggcgcgattatagctcactgcagcctcaaactcccgggctcaagcaatcctcccacctcacagccccccaaaatctcattctttcggtgtctgttccaatcaggctgccctgccactccaaggaaagtgttcttttcagtgtcctctcatgctgataagtccaataaccaactatgtaccctcatgctgacctagcagcagctttgaatactgccaagcactccctttttgttgacatgctttcaatggactatcacctggttttcctcctaagtcactggctggtcttctgactttgctggttccctcacatctcaccaacctattaaggtgataatgcttcaaggcatagtgcttggacatcttctcttttctgccactgtcttggtaatctcatcctgtcccacagcttagtatctatatgccaatgattcccaaatctatacccccacttagaattcttccctgaactccagattcgcatatccaccatttagtctatatctccacttggatgtctgcttttcctctcaaatttaacacacctaaaacagaacatctaaagcccccacctctgcagtcaaaacctgcttttcccatagcctttcaaatttcggttaatggtaactctcatcagttactcaagccaaaaatcttggattcatcacagactcctctctttcactaatctcttctttcccacatctaatccaagaggaaatcctattgttctaccttcattggccaggcactgtgactcatataatcccagcacattgggaggctgaggcgggagga

SEQ ID NO: 1875 - DNA, 2300 bp, Homo sapien
ctgtcacctaggctggagtgcagtggcgcgatctcggctcactgcaagctccgcctcccgggttcacgccattctcctgcctcagcctcctgagtagctgggaccacaggcgtccgccaccatgcccggctaattttttgtatttttttttagcagagacggggtttcaccgcgttagccaggatggtctcgatcttctgacttcgtgatccacctgcctcagcctcccgaagtgctgggattacaggcgtgagccaccgtgcccagcctattttttctttaaacagtcaattatcttttaaagtgatttaaataataataaaaacatttttttatttgcccatgtagctaccatttccagtgtgcttcattctgtgtgtagctcccagtttgtatctggtattattttccttctgcctgaagggcttcctgcaacatttcttacagtgcaggtctgcactttcagcttttgtatgtttaaaaaagtattttgccttcctttttaaagttcttattagcatcttttaaataaaaattttacgaatacgtatttatggggtacaggtgatattttgatgccagcattcagtgtgtaatgatgaaataagggtaattgggacaacattcaccacctcaaatatttaccacttttttatgttgagaatattctaaatctactcctctatttatattgaaatataaaataaattattaactatagttgccatattgtgctactaaacactagatcttatttctcccatctcactgtatttttttttttttttttgagatggattctcgctccattgccaggctggagtgcagtggtgtgatcttggctcactgcaacctctgcctcccgggttcaagcgattctcctgcctcagcctccggagtagctgggactacaggcacacgttaccacgcccagctagtttttgtatttttagtagagatggggtttcaccatgttggccaggatggtcttgatctcttgacctcgtgatccacccacctcggcctcccaaagtgctggaattacaggcatgagccaccgtgcccggccctcactgtatctctatacctattaacgaactcttatttatcccccacgcctccccaataccctttctagcctctggtaaccattattctattccaagccttcctttgctaaaggtagtttccttggctatagaattgtaggttgactgtttttttctttagcactttaaagatgttgcttctagcttgcattatttctaatgagaaatctgctgtcatctttatctttgttcttatctatgggatgttatttcccatctgttggcttttaaatttttcctttatctcttactttaaaacaatttgattgtgaaatgctttgatggtgttttcttaatgtttcctgtgtttaaggttcattgagcatcttggatctgtaggtttatagttgtcattatatttgatatttattcagcatgattttcttaaaatatatttgtcacttccccccaccttttcagagattcagagacaaaaacgtctgtatttggttacttggagttgtcccatagttcagtaatgatctgtttgttttatgtctcagtttttttcagtgtgtttcattttggatattttctgttgctatattttcaaattcactgttttttcttctgtgctatctaatgttttctaatcccatccattatttttcttctttctttgggattcagtttactgagatgtgattgacattaagtcccagttttttactcaatagatatttagtgagcacctattatttgtacaagttggaggccctttgtgtaggaaaagcatggcttctccgtagcaaggatttctgactcaatcaagtaacactgagcgtcctccttgcacgaggccataggctgggtcttgcagccgttagggatatgggcagacactgactgtgccctcagttgcttgtcaaagaaagaagcttacaatccctcatgaggagaaatacagtggttgaacttttaaaagtcatttgaaatcttatatttgaagtgtttctgattaccccatatggagaagcttcaatacaatttatttaaatgacaaagttttcaaagaactttttttcttcaggacttgagagaaagagaagaggcagaaatgaaacggattgattttcttgccttgccttccctgtccttgcataaggaagacagtaggaaaactatggaaggtgttctggcctagctttgtcctgcttggcccctggtgtcctgaagtggttattcttgaag

SEQ ID NO: 1876 - DNA, 2300 bp, Homo sapien
ttggttattctggattctttgcatttgcttccataggaattttagaatcaggttgtcaatttctacaaaacagtttgctagaattttcattgagattgggttgaatctataaatgaacttggtgaaaactgacatcttaataatactgagtcttgtaatttatgaacatggttgatattttcattaagttttccaaataaaagggggaatcagcatttataagcacatcacatatgcctcatatagtaatgggtgctttacatgtatcatattaattaaaaatcaccattccttttattagctagattgtgttagggacaagctaccccaaaaaagcttcttggtactgccaacacccccgccccccacccccgcaaacctctccgtaccacccctcctcttcccccaaacctttttacatttctaagcccctatctaggcaccgcggtgaagccaggagacttttacctatcaggtcttgctgctataaagcaaacccaattacaaaccatccggactgcacagtgggaggtcgtgggaagtataaacaaactttacctacaccctccggtaccataaacgtcacaaggtgatatgtggcagagttaaccaacaaacaactccagggtctctctcccccacataaaaccctcattttgtaagctcagggctgcctcctctgtctgtaatggagcagccggcaggttgaataaaggcttgcctgaacttgggtctcggtctctctcggtctctctctccctctctctctctctctctcgtcctttctctcggctaacttcacagattgcacataaaaaagaaaaggggttcagagaaggtaagtaactccctagagaccaataagtggcacagaagggaatttgggccctcatctgtctgactccaaaacctggctttatctattcaccggtccttataactcagctaaaacgagggttaagcaagtgccatcatttatgactgtgaacctcttcaaagttcagattgttcctgaacaatcaagcatttcaaactcttaccatcaagtaaggagatagcgttacatcgtgtgtaggcatatggggattaaagattacattatattttccaaattgcacttgagaattgactgtgccaattatatcctttctgggtatctaccttgttcacagtatgtgggatccaggttgaggaacagcataaaattcttgtaccctgttgcaaaaatttattagtaatccatgcatactggtttaggatttgaaaacaggttttataaaaggtttgctaggtatcgatctaatttcaggaataccctagtagggaaattcagtgacctttacaaatttacccgtggccaaaaaaaaaaaataagtaaaaattaaaaatcagaacacatccaaagtaattataattaaaattaaccaaagttcctgatccaatcctgataaggggtattaggtttaatatttacagataatttatgaagaaaaagattacggttcaaagtctacttcaggtatttctatttacatttcttggaaaagtttcccagggctctttctgccccagccgccaatctacagaagagtctagtcgactgtccactcatttcacagcacttgtctgaaactagaagacccagggagggaacaaggttcaggcttgaaacgctaagacattcaagatttcaccttgtatgcaaaaatcagaatgggaggctgcagcggggcctcacactcaccggagctaggcgctatagatcccgcacccgcggagcccggcaaccacctgaggggccttggccaggagggggtggccccccggcgccggcggcagctccggagcaaacctggcaaacccgagcagggcggtgcgggttgctcagggagaaaatgaagggagtgatagggtgggggtggcagggaacgggcacaacgccggcttcctccggacggcctcctgcgtcccacctgtgctcctgaaaagcggcccccgacagggcgcggcgggaacccgagccgggagtagggtcacgagttaaagcggcgggggcgggaggatgcgcgggcggcggacggggcgctctcctcccgtctgactctgggcggagcggggctcgaggctgctggagtcgctcgctgactcgccctgcgccctcgccgcggacaccggagctgcggccgctccccgctgtcccccaggtgagcccgcggggcgctgccccggggcgtcgggtgtcgcgggaacggcgcccgcggcgcacagggagggccggggaggccgggaggcagcgagct

SEQ ID NO: 1877 - DNA, 2300 bp, Homo sapien
ctgtttatacagggtttcatatgccagattgagcatatttaagcagggtgacgtcaggattcaaactatggaaaattatgtggcaacttggcaaataaattagagggaaagagatagaacaagtcaaaagactattgctaccgtctaggtgagagataaggcatatctgaaataaggcagaggcagaggatggctaagagaaaatggattatttgagagacaattaagaaagaaaaatgacagaacttaaatgatatgttgactgtgggcagtagaagaggagtcaaggatgactttcagatttcgttttgcaactgatggacaatgatactattacctagggtagaaaataaagaaggaaaaaaagtttctgaaagataatgagttgactttggctctgctaagttgtggtgctatggtcattcattcattcactacatttaatctttatttagcatctattaaacaacatgaactgaactacacaggtagttggaaatgtccagtagctagaggaaattcaggtatggaatttaagagatatgttaggctgagaatgtagaaatggaagtccagtgtgtttagtggtgatggctgaagctaaggggaatatatgatgccgacgccaccaggagagtgcgaagagtgacaaaagaagactcaagactgagcccaggggaaaacgaatcttccacttcctgggagtggacaagctggaaaaaagttgtcagaatgtttagataatacctcttttttagtttttttccttcataatttgtattgtaaaattcatttgaattttgtgaacacaaattcttcagaaatttgaaagaatctatataatctttctgcacataacgtaaaaatcttcattcaggatccttaaagtctcatatgttataaatgattagcctcttctcaattaaagattttatttaaattgggtgtaaaaattaatttagaccaattacagaagtcaattacattgctttattaaattctgccagtttacaaattaggaagttattattattattattttttaagacggaccctcgctctgtcgcccaggctggagtgcagtggtgcgatcttggctcccaggttcaagcgattctcctgcctcagccttctgagtcgctgggacttacaggtgcacgccaccacgcctggctaatttttttgtatttttagtagagacggggtttcaccgtgttagccaggatagtctcgatctcctgacctcgtgatctgccttcctcagcctcccaaagtgctgggattacaggcatgagccaccgcagcagccccctgaactctcatatgttataaatgatcagccttttctcaattaaagattttatttaaattaggtgtgaaaatttatttacaccaattacagcagtcaattacattactttattaaattctgccactttacaaattagacagttataattattttttaagggaaaggaggagaacagtgttcagagagttgagcgtcactgtatgaatcccaccggactcctaatcacagataaaatgaaccttgggttactcacggattcaagtttcttccccggagactcatatttacagcttgagtcaaattctaaacaaaagttattctggcaagaaggaaatgtaacccattagggttctggggcgcccacgacaaccagtggggcgcagcttcctctccactccctaggagggcccagctcgctgcagggggtgggcaggaaagctgcccgaaaggattctgagcgggcagcctccttaacattttctctcctggttcctagggtccacaccccagaaagattcttctctggctgagattgcggtgggtgtgaggcatggaccgagcctgttagacctggggtcaggccgggccactgtcattaatatacttaagacacaaaactctttccttggtagtggaaagctgctggcctcacccggttcgcgttgagtgacgtcacatagtggcaaccaatcacaagtctgctttgaaagatactgttagggagcggacactgtattggtagagatgctctgtcagtctcgcagaggactcgcctcttttctcttagcgacagatgcgtcctggcaacagtcggcagagttgctgcggtttgtgcccttgcgatttctttttctgagagaggagagtcaaactcccacctccagctctcgaaggagcttttcctgagggcactgcaaagaggctccttttctttcagatcagcagtatcaggtaagagaagctctgaatgggaaaggcggcttggaaa

SEQ ID NO: 1878 - DNA, 2300 bp, Homo sapien
tgtttaaagacaaatcttttcaatgtaggttggtgggatgggtagtgtctgtgcatcttatataaattttgaaatagaggttttattttacctttaatatattattttaaatttcctccatcactttataatcaattaatttgacaacttaaaaaaaaaacaccctaggtttgcttctgggtcttcctgagaatcttttttcttaaaaagttttatatagtatactagaaccttatttcaactatatacttattttaaggataaaagaaactgagttttaaagagattaaataacttgcccaaattcatgaagcaagcagtggggctttatgactccaaaacccttgttcagtgtctgtgctgtactacttcagtctagaacaaaagatgtgaaagggcgcacattcctggggcatggagatctttattgagcatataaaactgaaaagaagggattgtgttttgcttaagataggtagccagcattaccgaactgatagtgtattgtttgaatttaaatgaaagaataggatatttttattaaactaatcaacatagtatataatgagacttcaaaagctatatttgaggtatttaaaattaaatgacatcagaacatatttgattgcaaagttcatgtgatctataatgcaattatattttccctttatcaaatttactgtaatgtggccataattttattcctaggtagtaggcctgtatcgattatgtggttcggcagcagtcaagaaagaactgcgagaggcttttgagagagatagcaaagctgttggtctgtgtgaaaaccagtacccagatataaatgtaataacaggtaataaatagattttattttatgtactctttctggaaagactacatctgcaagaaagataactgaaatacgtttgtagctgaaatttaatttgtttttattctgaagtcttttcttccttcacaaacattacttactgtgttattttctatgggaaggtattaagctatggtcccttgcccacaaacagctgacatgatgaagggaagtaagacctactttaagttagctatagtagctagcagaaagaaaaaggtaccttcatagagggataaataaaatgctttggaagttgagtttgactggtacttaggtgatatagagcgtattgactatctggttagagaatttaaatttatttactagccagaggggatccattaagattttttgagtgggggagtgatatcatagagattattttcaggaatattaatctggcaactctatgtgatggattgaaattagaagagaccagaggaaggaaaaccaattagaaagccttggccgtagtccaggcaaagaggtagtaagagctaaaggggcttgtagcagtagaaataggaagaagtagaattgaaaggaggtggagaaagaaggagcccagacagatatgactttgagacatggttgattgggtaccattagcagaaaaagagagcttcagggagagctactgcttttggtggggaagtgtcaagaaagattatgaattgggctttggatatatagaatttgaagtgctagtaggagatctaaatgggtagatcaagcaaagttgaaactgctcatctgcagctaagaagaggatgcagtagaatttgagggatctcttatttacccaagtggtgactgtaattcaatgtatggcattggaaatatacttctattacccctgaaagataagagtggaaagagagtcattggcatatatgtgtagtaaagtgttgcaattgtccataaagtttgaaaagaaagaactttgggggtctccaaactttggaggctggcaaagaaagaagaaacacctaaagagattgagaggaaaggagtcagaatgtttgggaaataagagacaacagagattaagcaaaggtgtgatacagtcattctatggagagattatatgagaaaagaaaagggcctttgaatttggccattaagaaatggctcataaccttattggtaaccttcaggagctactggtttataataattccatatttgtttttgtcgttttaattttttaattattgaaattttcaagcatatgcgaaagtagagagaatactatgaaaaatcctctctgtcacctggtttccataatatcaacacatgaacagacttgtctcattcatccccccatttgcttcttctcaacccttgattattttgagaaaatctcagacgtatcctttcatttatagatgcttcagtgtgtatctccagatcttctgtgtatttt

SEQ ID NO: 1879 - DNA, 2300 bp, Homo sapien
gtaaattagggcaaaattatttcattttattcagtaatgcaaacatttatttattcaacaaatattttcttaagtatttgagtatctactaagtgcacgcactgtgctaggtgtcagcatatttatgagtaactcagaaaaaggccctttctactatgtaaacactaaaaaaagtaactcaaatcagggatgatagcacgactgattcttatcagtcactgaatcaattaatctctggcaacgaggggtacttgagtttgcaactgctgcccagaacctggaatttaacgtttttgggagacagccggtatttctagattacactgtgtctcaacttcaattcaattgcttctcaactcactatttaaattaaaatgaagtgttaacttttttatattagaaagctgcaaacctgtatgataatcttgtaggtagggtgatgagggacataatatttgtggctccattttacaagttttggctgatgtaataattttgttagcatgcattaactgaaataaagaaggaaaaacagacttaaaagagacatcggtgggtgggttttgttttgtttttgataaaagaactcttatagaaaaggaatcgctgcaaatttcttttagctagctagctctctgggcgattaaaatgattgatacatttctagaacacatgcaccgagatacacctgcactcgtactttgtccgtcaaaacaatctttgttttctctcaagctaggacttgctgtgcctaagacacacctcgtgcagcggtggcggtgaaggtgctggggtgacagccaggagggcactttccctttctcgggctccctaaccaaaactttgcagccaccagcccaaactcacgttcctgctcgttcttctttcccctgcctcaactctccccgcacccttcgcgctctgtgcgcccacccctgcttccgtcggtcagcttcagccgacctactactcaacctaccggcccgcgccctccgcctccacctgcaccactcgcccaccccgagaacccacctctgccgcccccggcccgcgcgccccgtcgcggcccggggctccggggcatgcgcgttgcggcgccaccgccctcccccacgccttcccgcggcagagttatgccaagtatgtgaggagccggcgagggccagcgccggtcatggggagccgccgccgcctccgcctccgcctccgcgagcgcggttttctccccagcggggctccgacctctccccctggcgggggtgagcctcgcggctaaggcagaggggatggcggaccctctgaggaggacgctgtccaggctccggggaaggcggggtccccgcggcaccggggggctagggctccgggcggcagccgcagctgcggtggcggcctcttcggcagccgcgggagacgcctggggtgccgcagacaccctcccacgtgagcacgccgggggacacgggcggagcctacagcagccctcgccgtcacctgaggcgtggggtcccggggcgcgggtccccggagggcacccggagcagttgggggcgctcgggcctcggccgcgcggcgggcaggaggccgccccccagagccatgggctcgctcacgcccctccgcactccccggagggctccgaggacagcggagaggaggaggaagacgacaaggacgaagacgactacgacgccgactactacgaaaacctgcccggcggctcgcagtctgcgcccgagcctgagggggcggaggcggaacggcgtcccccgcctcccccagcggcgggctcctccctgggggcggagggcggccgcctggagacaggcaggctgcggacccagttgcgagaggcctattatctgctgatccaggccatgcacgacctgccccctgactcgggcgcgcggcggggcggcaggggcttggcggatcacagcttccccgcgggagcccgggctccgggccagccgccttcccgcggcgccgcgtaccgccgagcctgcccccgggacggggagcggggaggcggcggacgccctcggcagcaggtgtccccgccccggtcgcctcagagggagccgcggggaggccagctgcggactcctcggatgcggccgtcctgcagcagaagcctcgagagcctccgggtgggtgccaagccgcctcccttccagcggtggccgagcgacagctggatcaggtgcggcgcgcaccgggactgggacgagcccccgccacgtggaggcaggatggacggctggagtggggaccgcgcccgggcggctgcacccaccggc

SEQ ID NO: 1880 - DNA, 2300 bp, Homo sapien
agaaggcacctatcttgttgaaaggtcaagtaagaagtggtctttggaccaagtctcacagagaccactgatggtttgataacaagaactcatgttgctcaaactgagtacctcaatctccgaggcattcaacagtgagcccattttaaaagtcactcagagtgtcagttttactcagtaataagtaagtctaaatatttttgtctattaaaagagctttattaaacacaaccatgcaaaatttccatacattttcaagatcttatattaagaaaaataaatatgtatgcccatgggactttgggtcacaatgtatcagctcagcttctggaggaactggagactgaggtcactcgtgggcaattaactgtgcctatatggccaagccccaataaaaactctggacaacaaagctcaggtgagtttctctggatggcagtattccatgcatactgtcacgtgtctctgccacgagaagttcatactgttcacaattccactaggagaggacaactggaagctttgaatgtggaactctgcaccatgtgcctcttcccttggctgtttggttttttccccccgcctgtattattttgctgtaataaactgtaaccatgagtataatgacttgcagtgagttctgtgagtccttctagtaaattatcaaaccaacctgagggcagtctgaactttgcaaaacctgaaattggtgtcaggagtgaggatggttttggggactcccaaactttgcactttgagaccatcattttcctctgccaacataggaacctggatgggaaaactcgagaaacacttatctagacccataccatcataaattattataatccaaaaatatttattaaccatctgctctgtgacaagcactgcgctgggtagtaggaatctaaaaatgagcaaagcacagtccagctcctcccctcaaggagctcatagacatcgtaccacagcaaagagggagtgaacaagatagttatataactctgccctggagcctacttccagggaggaatggcaagttatgtgtgagtgtgagtatcatctaaacgagcaggcatccttaagtgaaatctaaatacactgataacaacttcatttgggtgtcattcccatttagttcaccagaaggaatcaaagagttctagtttccctgaatactaggcatatggttacaccatttaccaaaagaaggaacaaaaatgcagagaaaaattatatgaaaagacagattacggttccaataggtgggtgtttgaggccccagaaggataccatatggaaaatgtaagatccaggtggtggtcgggtctagagtttgggtggaaagattgggattagacacccagatttgggaatcatagcataaagtagttaatgcggtggaaagggatgggctgacttgcaactttgtaatgccctttaaaatgttagaagcatcactgaaagatagtacaatatgttgggaaacaccaacatttaagggccatatggagcaaagcaggcggagaagaggctgacaatgagaagccagagagtttggacgacccgagtggtaggctatgatccaagaggagttttgtcaaagctattcagagcgcacttgaatgaggtcaagcaggaaatgatttggttcttggcttgggaagtccaccacccctagaggtcttccatgacaacctagggaaacacactgagagtaatttttatttggaagacgagatgcagtggatcaggaaaaaatcctaccctctctgggcaagggctaaagtggagtgacagcgaaaagacaaaattcttaggtcttctatgcctttggtaaatgctatcgaatgcaggaagtttggctgggatccctggctcagaacttcgtctcttctcagagctcctcagaaatgagcaaaagcagcccccgcccctgcttgggaacgtgccgggcccgcctccagcctcagcccctccgagggggagcaggagcgtggcgcaaccgccagggggcgcagactgcaggcttatttgtaagagttggggcggggccacgcgaggggcgggccctggggtggcttccggtttccggtttccggcttccggcggagtgctgggttgtcgctcgcagccgtcatggcagcggaggagaaggaccctctgagctattttgcggcatacgggagcagcagctcaggctcctcggacgaggaggataacatcgagccggaggagacgagtcgcagaaccccggatccggcgaagtcggcgggcggctgtaggaacaaggcggagaa

SEQ ID NO: 1881 - DNA, 2300 bp, Homo sapien
tgggaaaaggatagtaaaagttcaatatttgacaaggtgagcaatctgtaggatataaaagtagatttccagtagacatttggaaataaggacctagagtggagagaaaagtccaaatatgtggataattttaaaactctctaagatcagaagacattttgaaaatatcatgaaaaaaacctctaagaaaaaagcatgcacatagtttctttcatagaccttttgaaacccatccatggtttcctcaaggttatttatttctgatataggcgtaaaatgaaatcctgaagacagataacatcaatgaattgacagagaagaacaaagacctggaagccactcttcacatctgtacttgtatacagatcttatttccttccacttgtaatttctcagttcctgttttattagctgtaaaatgggaatggcaattatcttctttagaggttgttgcgaaggttaagtgggaacattgtaaactgtgtgacacagcatctggaacataggaggcctagctcttggaagttcaaggttttactggcactcaccatgaataagacaacatttattctacagtagttatttatgttccattcttatctcaactagaatgtaaagcaggaaactgatcttcatttttttgtatccttccagacccaaggccagtgctttccatatagcaagtgctccataaatctctgttgaatgaggaaactaagcacaactcccagtcatatccagtttccttctgctggtgagtcacaccaattgtgagtacagtgtaataaaccttacagggaagaggaagggatttgaagtggatgaacatttaaaaagttgccatcctgtccagttcatcaaaatgactttgtaaaagtactgcagtgttcaataagaacacgtttcatgttgagtttctgtttttcatttgacttcagataaagtattttagtgatactcatataggtctcatctgacaaaacaagtaaacgcaaaggaaaaagaatgtcatatctcaacaaagccattcgttacgaataaatatgaaggtttatgtggttctgcaccatccgagaagagcataatttagctactgaatattttcgacgtttacctgtacattaattctcagctacgtgtattcactcccccaaccccaatttaaatatgtgggcgtctgcttactaggggaattccaggttgtgctttcagctgttgagcttcctcaagcccccttatgcaaaagagcttcacatttttggtccactgcttgggatccttcacctggtacagccttcgctctaggctgagtgagcagcctaggcagcctgacttaaggatgaatctgagccgccagtccctaacgaagcatctccaagaacccagttggggggaaagcatgaggagatgggtgaggagtgggcaagaatcaaaacaccacttggcaacaaagcccaagctctgcgtttagcgatgtaaaacctggattgacagatcactggaggatcactgccaccaaggtccctcggatgcagggctcgccacagtcctcctgtgctaggactttccgctcctccgacctggaggatcctccttgtcctcggactccaggcttccgctttcgtctcccgctgggctgcagcccgcccccgcccgccctgggcacagctgcgttactcacgtccttcttcacttcagtgaggtcctcctcggtgagggacggtgcggtgggctccatggtggaggcgggagatggcgcttcttccgggtccgggagctcgggctgcgccgccccgccctggctgggggcttcggcctccgggtaatggggaagaaggagaggaggcggagcgggtcgggagaaagacggccgccccttcgggaacagagggactcgggggtcaaaccgtagcgcttccggccccgcctctgaggtcgacggcgacgcgaatctacgcgacgcgacgcggagctcggagcagcgttccttccctctcgtagaggctcaggcgcaggcaccgccccacggcgaggcgcgtcgcttagcagagcccgccctgtctctgcggcagcctatcgacgccagcccgcgggccgatcctgttcccgcccccgaccggagcctttcgggtggctccgcccacagcgggcgtttcctcaagccacgcctgcgcaggtcgtcggtaagtggcccgggttagcttcctcataaggcatcgtttccgtgggtggggtccgtcagtgcccaggcagctggcactctcagcctttgctgcctgctcacttcgggggagtccggt

SEQ ID NO: 1882 - DNA, 2300 bp, Homo sapien
gaggctgaagcaggagaatcgctcgaacccgggaggcagaagttgcagtaagctgagatggtgccattgcactccagcctgggaaacagagtgagactccgtctcaaaaaaataaattaattaattatttttttaaaataacttagatatagccgggtgtggtggcatgcgcctgtaatcccagctactggggaggctgaggcaggagaatcacttgaacctgggaggaggaggttgcagtgagcagagatcgtgccactgcactccagcctgcgtgacagagcgagattctgtctccaaataaataaataaataaacttagataaaatttttcaagtgcctacctcgtctgccccaaacacaaataaactagaatataaattccatgaggaaagagatttttattggttttgttcacagctgttttcctagcacctagaacagtgtctggcacatagtggacattcaaaacacatttgttaaatgaaaggattcatcctaaagttaaggatggttcagtaaatcggatggaagatgatgaaaaattaagcaattagaaaaaaactgtccttgtgtaatgtgtcaacatggaaacaggacataatgtaaacatcagaatcccttgctgtgattctggtttttgtggctctggttacattgtttttttgtgtgtgtttttttttttttttgctttcccgtttcttaaacattggcgttcccaagtttctccttggtcctcctgtcatttttatctactctcgtagcttcaaataccatctagtttatagtttatttagcatgttgtccaagccaccgtcttgggcccagggctctacctgtagcttttcatccacacttctcaggttgcttcttacacagcgccatagtagttaaaatacggtctggggatagtcgtctcttcatcagtctccccctataaaatggaggactcatagtataagttgcctagaacatattagtaaggactcaataaatgtttgagtaggatgagctgggtggctcatgcctgtagtccctgcactttgggaagccgaggcgggtggatggcttgagcccaggagtttgagaccagcctgggcaacatggcgaaactccatctctataaaaaatacaaaaaaactagctggactcccagctgcttggtggctgaggtggaaggatcgcctgagccctggaggtggaagctgcagtgagccgagaatcgcaccactgcactccagcctgggcgacagagtgagatcctgtctcaataaataaataaataatcagttgagtgcatactgtgtgcccaactacctttaagaactttacatatgatcccggcagccctaaaaggtaagcatatctatctccattacacagattaactaatgaggaaaagctatgtttataatgaacagtgaccaaaaagtatgcaaacgttaaatgaggtgttaaagtggtgggattgtaggtggtttctttttttctttcaaaaatttgtttagtattgtagttaggctgtttgtgtgtatgcatgtgtatgtgtgtatgagtgcgtttgtgtgtgaccaaaacagtaactggcaaacgtaacaacaggaaattgtagggcagggtctgggaaaaggggaggaacccaaggtactgacaagcccagaccggactcccccgaagtgagcaggcagcaaaggctgagagtgccagctgcctgggcactgacggaccccacccacggaaacgatgccttatgaggaagctaacccgggccacttaccgacgacctgcgcaggcgtggcttgaggaaacgcccgctgtgggcggagccacccgaaaggctccggtcgggggcgggaacaggatcggcccgcgggctggcgtcgataggctgccgcagagacagggcgggctctgctaagcgacgcgcctcgccgtggggcggtgcctgcgcctgagcctctacgagagggaaggaacgctgctccgagctccgcgtcgcgtcgcgtagattcgcgtcgccgtcgacctcagaggcggggccggaagcgctacggtttgacccccgagtccctctgttcccgaaggggcggccgtctttctcccgacccgctccgcctcctctccttcttccccattacccggaggccgaagcccccagccagggcggggcggcgcagcccgagctcccggacccggaagaagcgccatctcccgcctccaccatggagcccaccgcaccgtccctcaccgaggaggacctcactgaagtgaagaaggacgtgagtaacgcagctgtgccc

SEQ ID NO: 1883 - DNA, 2300 bp, Homo sapien
caccctggtcaagccatcctaagctgtgcctggatggctgtgtgtaaggaacatggctgtgctttggtcaaggataggacgaggtaaacatccacagggactcagcgagtttagagcgcaggcatataactccacttgttatcacagctatgtagccataacatgggaaggccatcccttggctctaagccactattgtctgtaaaaggtataattgccctgttgacatcgtgcaggcgtgctgacacccagagagagagagagagagccagagttgaccctcttggagactgacagtggggagccaggacacagctcggcttgctcatgcccagagagaggaagagttaagctgctgaccccgaaggcaagggagagtcggccatgcagctgtgtgggggagccgccagactaagcacctgagacagggcagacagtgtagagagctagtgtaagaaagctgttgatgagagctgctgctgagtaaaatcatcttttacctgcctacggtcccctgagtgttctttctgctcatccacccactccccttggacctcagcatgggctagaacctgaccccaagcatgacatttggctcagtcgtgaacctgacattgtggtagcctccacgtagtctctgcttcttgcccttgcccctgccatctactctccacttagcagccagagtgatcctttcaaaatgaaatcaaactgcttccttgcttcatttcaaaatgctcccaccaccctcactgctccaccctggtctgaaccacaacctcctggggcctggatatagcaatacctccctaaatggttttccctcttccatcttctttccccttagcacagaagtgaaagtgcttcttttcaaatcacaaatcagatcatgtcactctgctcagaaccttccagtggcttcccgtctgactcagcacacccatatgactcaacacacaaggagatcatctccttccagttacactgagcatttttattggttgctgactgtactcataatgctctctccttatatccacacggttcactccctcacttcctttaagcataaatcaaatcccttatcttggtattgacaagacaaggacagactcctccaaagtgagcagggaggtcatgaccaccctagcttaaattttaccaatccatacagcctcatcctacttccctgttttattttttcctcttagtatttatcatcttctaataaattaaataacttagatatagccaggcgtgggggatcatgcctgtaatcccagcactttgggaggttgaggtgggcagatcacctgaggtcaggagttcgaaaccaacctggccaatgtggtgaaaccttgtctctactaaaagtacaaaaattagctgggcgtggtggtgtgtgcctgtagtcccagctactcaggaggctgaagcaggagaatcgctcgaacccgggaggcagaagttgcagtaagctgagatggtgccattgcactccagcctgggaaacagagtgagactccgtctcaaaaaaataaattaattaattatttttttaaaataacttagatatagccgggtgtggtggcatgcgcctgtaatcccagctactggggaggctgaggcaggagaatcacttgaacctgggaggaggaggttgcagtgagcagagatcgtgccactgcactccagcctgcgtgacagagcgagattctgtctccaaataaataaataaataaacttagataaaatttttcaagtgcctacctcgtctgccccaaacacaaataaactagaatataaattccatgaggaaagagatttttattggttttgttcacagctgttttcctagcacctagaacagtgtctggcacatagtggacattcaaaacacatttgttaaatgaaaggattcatcctaaagttaaggatggttcagtaaatcggatggaagatgatgaaaaattaagcaattagaaaaaaactgtccttgtgtaatgtgtcaacatggaaacaggacataatgtaaacatcagaatcccttgctgtgattctggtttttgtggctctggttacattgtttttttgtgtgtgtttttttttttttttgctttcccgtttcttaaacattggcgttcccaagtttctccttggtcctcctgtcatttttatctactctcgtagcttcaaataccatctagtttatagtttatttagcatgttgtccaagccaccgtcttgggcccagggctctacctgtagcttttcatccacacttctcaggttgcttctta

SEQ ID NO: 1884 - DNA, 2300 bp, Homo sapien
aaattaagcttggcgaaacaccagtctttctcagttcccagtcatcctatataatgctgccagatcaagctccaataatatcacttcttgactgaaaagtcttcaggggatcctggcagactgccaatttcagtccaaatatcctaactcagcaggcaaggccctcaatgttccaaccaatgttgtctcaccatgctcttacacttaccctgtgtttcagccaaataaatccgcttgcttgaccctatggtctgctctaagcaccccattctcctttaataatgttcattccccttgccctaacttgttcaatgtcagtcttccctgttgcatgtacattccaggagggtagggactgtcaccactgtatcctcagggcctagcaaagttaactggcatgtaacaggggctcaaatacttgcttctgaagtgaacacgatgctctcccacctccatgcctttgcttctgcggctccctcagcctagacaacctgtagtcccatctcaacctattgaagccagagctgtccttccaagcccagattaaaccccaattcctatgtctggtctccctgacttgggaacagacacggcattgttcttttgtagttcgtacattctgctgtatcataatcatttgtgtaattgtgtagtcgtccttccctgcctctcccaaaccatcagttctggaaagatcggagctgtactccagagcctggcagagtacgggcacttgttaaacacgtgctcactcgtctaaaatcgttgatgaccagcattcttcagtgagcagaattcccacttccagaatctatagcttgctacggagggtatttttctgtttcctctccccttattctttcagaggtggggaggaaggtcagtcagggaacccctgccaactcttcctttaagaagtatctccctttctcctctggaggagcagtatatctggcactgaggtggagggctccatttccgactgggacccacagtaggtttgcaaggtggcatttggcattttttagcatcattgccagtgacaatctaaataatgcagagataatcaatgcaacaccaactgagaaggtgtgattaaatcaatgacatccccaaggaattttagaactggtctttgcatctgatgagcattcacacagctcattcagttatgataaaaatatgccacatgaactagctctggggctgggtgaaagcttagaagcggtgcatttttgatagactgaagacccctggctaatagcaatgtgggcatattgactatctgtgacataacactatgtataatttagaacgagctgcttgaataaccgtgttgtagaatattcagggctgttaaaactgatgatgtagatctacatttgttgagatggaaagcggccaacaatattgctaagtcgaaggaagcagactacagaacagcatgattatgtaaaattattgcatatttatactgctatctatttacagatctgtgattattctctgaaatgttaataatagttatctctgggtgataaaattgtggggtagtttttaaatttacttagttttttgtgttgcttggattttaacagtaagcagttatttttacaatcattgaaagaaaacaatacagattgaaaaaacttgttgaaaaaagcctcatttaaaaaaaccttcaaatttgctaaaagatgcttactatataacaaaaacaaactcttgtatgaatgagcaaataaaaaaatcatttacctgcctccataactgaaccacataactgactatgtgctgaatatggttaacagtgaaagggatgaagggacgccgttttgaggagaggcacaggggaactcaagctctcctgacctggtgtacatactatgcacactttttaagtgcctgaagtatgaagtatcacttcaaatattattttaacccaagctttgatggcaattgatttacaggtatggtatttttctaagttcatagcctaagggacaagagagaaaatatcccatgactgacagcaaagaaatgatgacttcattccccatggcagtttctgttgcaaagaaaagagacatacactgttgatcacagtacaactcaacactttattccattgtgattggtatacatgtaagattgagacatcaagagactaaaaatcagtgcagaacttctctgaactaaagggccgtgaaaggcatgattggttttggcacacagagtggataaccatacattggctggaatgaggtggtcaggaaaataaaatgcacaaatctaacacc

SEQ ID NO: 1885 - DNA, 2300 bp, Homo sapien
atggagcctcaatgtctggtaaagtctgcagtaaagagcagaatgaagtcctatactttatttaacccgggagctaaacaaataaacaatatataataagaataaataggctgggtgcagtggctcacgcctgtaatcccagcacgttgggaggccgaggcaggcggatcacctcagttgaggagtttgagactagcctgaccaacatggagaaactccgtctctactaaaaatacaaaattagccaggcgtggtggcacatgcctataatcccagctactcgggaggccgaggcaggagaatcacttgaaccccggttgcagaggttgcagtgagctgagatcgcgccattgcactccagcctgggaaacaagagcgaaactccatctcaaaaaaaaaaaaaaaaaaaaaagaataaataatgaactaatttaaaaataaataaattttatatttaaccagggcaagcttaaggtaaaagatcaactttcacctgtaactttgatggaaatcctccatctgaggacaccattaagtgatttctgacgctaaactggggctaatggggctgcctggatcccctaagaattttgctttagaagtactacctagtcggtcttaaaggtttgttattttacttttggtcccacttcccaatgtcagtgtcagagctgtccttgagactcctcaaatttgggcagggcgtggtagctcatgcctgtaatcccagcactttgggaggtggaggcgggtggatcacctgaggtcaggagttcgagaccagcctagccaacatggtgaaaccctgtctctgctaaaaatacaaattagccgcgagtggtggcgtgcacctgtagtcccagctactcaggaggctgaggcaggagaattgcttgaactggggaggcagcagttgaagtaagccgagatcgtgccactgcactccagcctgggcaacaagagtgaaactccgtcaaaacaaaacaacaacaaaaaacaaaaaaaactcctcaaatgtgaagctgagaattttgaagctcatttataaattcacaccacccttgtgggaggggagagaaggcagatcacatctctgggctcagttggggcaaccattctaggatgctcagagagacctgctcctagaaatccagagtttcctaaaagctgggatcagagttctggcaagaaggctgtagcctgggccttggccctagaccaccaaaaaagtgaatacaggcttaggcagtgttcatagaggcccagcatctggaacaagggtgctgctgtagtctgtgctggtcagaccacacaggaagaattgtttattttccggatactatgattttaaaaggatacaagcaaattggtgtgtatcaaaaggaagctgaccagaatgttgaagggacttggaaaccaaatcactagttacttttcagtggtttgggctccaggactggagggggtttagggtggggggtagaggatggtgttaggcagcatagataattagaactgttttcagatatgcaaatgctgttttgtgaaaacacacacacacgcgaacacacacaaaacaagaaaaacttgtactttaggtaaggccagaaaacagaactgggacccgtgggatttaagctcaacatgaagaatctgtaaaccattatagctcttcaaaagtgggctagactttgtaagcacgcaaggtttaaactgttcaggtaaagaccaggaagccctccagctgctctgtccagaccgaggccggctctccaagtccgcgctggggacgatgggaggtgtgcacctgcgacagaacacaggtaccgccaggtccgggtagcggtggcttttcgccgaggtcccccgcctccgcatacttcttgccctcgctgcttccccggccgcctctcctggccccactcctcgcccggcgctcgccgctacaactcccgcctgggctggcgcgagacccgcgagcgccggagtgggcgcgcgggatgcgcgcgggccggcgcccggagctctgggcatgctcagtcgcgcgggcagggctccgggcgcgagctgggctccttctgcaccacattcagcggctgccaagaggagccgacgggcgctcgcaggctcagcgcgcgctgcccgcggcaggacccggccgcctccgccgccgccgccgcccctaagcctcccgaagccatggccgggctcggccaccccgccgccttcggccgggccacccacgccgtggtgcgggcgctacccgagtcgctcggccagcacgcgctgagaagcgccaa

SEQ ID NO: 1886 - DNA, 2300 bp, Homo sapien
tttgaaaggctgccaaagttcagcctttgtgttcatagagttaactttcctaatatccttaatgttaatgccaaagacaaccaacaatagcagctttactcctgaacccagttcctataaatgacatgcttgttatttaaataactaggcaactagtttcacccacacttcccacatgaggagtaaaattattatagctgatactttttgggcatttgctttatgccaggctctgttctgtgctctttcacacactcactcacttaattcttgctgcaatctattttaaagatgaggctctgaagtacaagaaggttaaatcccttgctccaggccaggctcttgctgaataccacattgtagccagagctgggctggagttgcagacaagttatggtttgatggcaccatttctccatgtttcatacaaaatgctaaaataagcaaataccagaattagtccagccaagatgctaatgcatagagactttaatgtctgtctcaaatatacttgagctctcaactgttctctgtattgtaggtgccccaggtagagaaggggaggagggctgcaggagctgttacttggttgtgagcacagaaaacagtcacctagagactcagacttacttctgtttgtaaatatctgctctgctgcatcagtaggcgtccccttgcctcatctacttccactttccgtttcatactctgatctcttccaggtattccctcagctttgaattttccactttcctaccctccttcaactgcgtgagccctacaggccattcaagaagcaacttaaatggcctctgaccatctcagacaggtgttggtatccctgcaactcctcgtgcatcccacccccaacagctgttagtgttttattttgtaattgttggtttaattgtctctactgctagattacagtctcatcaaggatagggaccctctcttattcatgggtatcctgagagcccagcacaattctgggcacatagaaagtgtctcataatgtttgctgaatgaataaatgacggtgttgtttgcatgtccataccactctgaaagtattacataaaccaacttcagggactgtgcacctccacatttagatgcccaagatttggcaggaaggacacagccaagaataactgattagagatgttgtttctctgtccctatataacagagagaaaatatcccactgttatccaatataagaccataaaaatgaatagtctttgatgaggaaaaaaaaagtaagcctgaaaaatgtgtggctggaaaaaaaatgttgcaaacagcattttatttttcctctgtggacttgtataaattatgtgtaaggcaaatatgtgatagagagatgcagtggtaattacttgttctcaaatgtttggttaactatgcctcttaatcccacatacagtagcttagcacagaattaaattctgccccttaggcagaattagcatttggaatttcttatttctgtagtttaaatgtttttatcccaatatttgtacttttccatttagaataaataaatgtactgagtgtgtgtggagaaatataaatagcatggaatttttatgattcaactcattgttcttattggtttgtggtcaatttttatgggtaccaattttttaaaaattactcacccataattagttacaggaacatagaaagaatcgctagaccactctttcttccaatgaatgtagtatcatcttattgccaataattaaagtctttaattttatgagggaaaaaataacttccttcaggctttgctctcaaaatgcagatatttcatgatacagtgttatatgaaataattaggaagaaaggtttttctttgctgccacttatagtaggaatgggaaaaaattgttgctctgattaactggggagtctactccacgtgagcggtagtactaatttactaattcatccattaacatctgctgtgtgcctaaaatgtgccacaaactgctatttactggagatgtaagaagagctaagacttggcctctgtccttaaggagcttacaaagaaatgggagacgtttgtataaacaattgcaatgaaacaagacaattcttaaatggaagtctatacaaagcacagcaagcctgtaggagaaggacgtgagccggatggggtaggagtgggcactgcggattatggattcacagagagagcatctgagccgagacctgctggaggagaaggaatttgccaggcagcacagctggtgactcagcgacgggggaaggcatctagatacagg

SEQ ID NO: 1887 - DNA, 2300 bp, Homo sapien
cgaggggggccagttcagaactttgcctggactgggtgggtgggaggacctgagagggaggaacaaaagtcgttttgtttggtgatgcgagttgaccgggcagccactgaagccctcacccgggaaggcagtgagctgtttgcttttttacagcgaaggtgagaggcaagttatctgttgaaagagtagaacggggaagaggagtgtgtctctgagtcaggaatatttgtggacttcaaagaggcgtgttcggaacaagtcccaaagctttggcatgatgtttattagcaaagttcagtgaattgcaaattaatacccacagtggcatttatgaatgaaaaggcggggggggggtggggcggggggaaacttgcccatcgtctggcaaattcccaggcagaggtctcccccactcctccagcccttccctcttttgggtatgttgtacttgtttgtttttggaggttcccactttagttccagcccactgcctgggttggaagtccgagaggaaacgaacgcggggagttctccgggaggctgacttatacttcctcacggatgcaggagacggggtaagcccttcccgcctccctccgcgggcaggaggctatgctaaccaagcagccagccagaagtgcaggagaccaccgtggagtggcctgaaatcatcacctgcaaagaccgcaaggccaaaccagattccaggaccattgtgccctatgaatctctgggaaaagcagactccttcaagctggacattttgtggggtttttaactcctttcctagggaccactggaagcctcccattttaaatgaattgcaatgcccttctctccaagtacagaaaagagatttaggatgtaatattttgcagtaaaaatgtcagcagattttaagatcccgttctacttgcaacacactcagtagaagaccccaccacaagacaatttacttgaacatcaccaataccattagtgtgattgataaactttccctgcaagtttcaaaaactttttgcataattttaataaaaattatcatgtaagactcatatgctctaggataactacttatcctttttaatgtttaaggctattcagacttcataatttagcagtcttgcttgaaaaggcccttagtgctaatgctgactttcctgataagcacaatgagaatctgtcaggatgaaaacacactccagtgaagagaattcttgcaggaaggagttcagtttcattcattccaaagtgccctttcataaatggaagcagcatttgctagagggagtgggatctctaaagctctgttagagggttaggggtgggagacttttcaagacaatggattgtcaggtgttatgcaaatacagtgaggaaagtgtgggcccaacacgtacacaggttaatacatcaattattatttacaaaacactgtttttcctgccttatcatttcattattgtttccttcttaatgaagtgacggggggcgggaggggggaggaggggtgcagggacagtactggttgaactagagagagaatggagaggagggttcctggcttctgttgtggcgtcttttctatttgacttcatggttgtaagtatttccagatggtgaatcagacaccagacgtaacaatatttccatatttgggtatagcagtagcctgcgtttttaacatttttctgcctctgttatccaaccacaaagcattcttgacagcttcaaatgttgttaaatatagatttaacttctcttcccagagcaggaaattctttggaattccttgtttttcacgcaatctgtccatcatgatttaaaataaaagcacagtggatcatccaactggccgtatataccttaattggaggttggggatgggggacggcagagatccagtctgccgcactgcgttcaaacacacgccattccagagattcctttaaaatcacattaaagtttttttaacaagggtgtgtgggtttgtttctggacttcaactggggaatcttgaggatgagtttgccccagaagagaaatttagagaaccttaccgtcagctgcccatttaaagcagggggtgtgttgtgggatgggggtgggaagctggagcaacagggccaggaggtgtgggagcgggagacactagagtaacctatgtgcacagcctctccatataccatgtgctgttgcgcctgctagtaatcgacgacattaggcaagagaaacagcggctcctcaagtcctgcccaaagaccgtccagaaaccccagcctcccgtcgccttctcgccg

SEQ ID NO: 1888 - DNA, 2300 bp, Homo sapien
gctttgtggttggataacagaggcagaaaaatgttaaaaacgcaggctactgctatacccaaatatggaaatattgttacgtctggtgtctgattcaccatctggaaatacttacaaccatgaagtcaaatagaaaagacgccacaacagaagccaggaaccctcctctccattctctctctagttcaaccagtactgtccctgcacccctcctcccccctcccgccccccgtcacttcattaagaaggaaacaataatgaaatgataaggcaggaaaaacagtgttttgtaaataataattgatgtattaacctgtgtacgtgttgggcccacactttcctcactgtatttgcataacacctgacaatccattgtcttgaaaagtctcccacccctaaccctctaacagagctttagagatcccactccctctagcaaatgctgcttccatttatgaaagggcactttggaatgaatgaaactgaactccttcctgcaagaattctcttcactggagtgtgttttcatcctgacagattctcattgtgcttatcaggaaagtcagcattagcactaagggccttttcaagcaagactgctaaattatgaagtctgaatagccttaaacattaaaaaggataagtagttatcctagagcatatgagtcttacatgataatttttattaaaattatgcaaaaagtttttgaaacttgcagggaaagtttatcaatcacactaatggtattggtgatgttcaagtaaattgtcttgtggtggggtcttctactgagtgtgttgcaagtagaacgggatcttaaaatctgctgacatttttactgcaaaatattacatcctaaatctcttttctgtacttggagagaagggcattgcaattcatttaaaatgggaggcttccagtggtccctaggaaaggagttaaaaaccccacaaaatgtccagcttgaaggagtctgcttttcccagagattcatagggcacaatggtcctggaatctggtttggccttgcggtctttgcaggtgatgatttcaggccactccacggtggtctcctgcacttctggctggctgcttggttagcatagcctcctgcccgcggagggaggcgggaagggcttaccccgtctcctgcatccgtgaggaagtataagtcagcctcccggagaactccccgcgttcgtttcctctcggacttccaacccaggcagtgggctggaactaaagtgggaacctccaaaaacaaacaagtacaacatacccaaaagagggaagggctggaggagtgggggagacctctgcctgggaatttgccagacgatgggcaagtttccccccgccccaccccccccccgccttttcattcataaatgccactgtgggtattaatttgcaattcactgaactttgctaataaacatcatgccaaagctttgggacttgttccgaacacgcctctttgaagtccacaaatattcctgactcagagacacactcctcttccccgttctactctttcaacagataacttgcctctcaccttcgctgtaaaaaagcaaacagctcactgccttcccgggtgagggcttcagtggctgcccggtcaactcgcatcaccaaacaaaacgacttttgttcctccctctcaggtcctcccacccacccagtccaggcaaagttctgaactggcccccctcgcccctcacgaccctccaactaccatcaccaccatcacgccccaaagaacccttcccaacataagtcgtaatttaaggtggaaaaaacgaactgttttcttgacgggtctgggacacacacacacacacacacacacacacacacaccccccgaactgttttcttgacgggtctgggagacagacacacacacagacacacacacacacacacacacacacacacacacacacacacacacacacacacaaaggtgcaatggagccaggggaggcgcttggcagcagcccgcgccaaccagcattcctgagatgtttgagaattctggaacgcgcagacagagccgacgtcactgcaacacgcggcgcctccgccggcccgtataaaaggcgggctccggggcgcctgggcagaccgcgagcgagagcgcccccgagcagcgcccgcgccctccgcgccttctccgccgggacctcgagcgaaagacgcccgcccgccgcccagccctcgcctccctgcccaccgggcccaccgcgccgccaccccgaccccgctgcgcacggcctgtccgctgcacaccagct

SEQ ID NO: 1889 - DNA, 2300 bp, Homo sapien
caagcatgtgccaccacgcttggctaatttttgtatttttttttttttgagatggagtttagctcttgttgcctaggctggagtgcagtggcgcaatcttggctcattgcaacctctgcctcctgagttcaagcgattctcctgtctcagcctccaagtagctgggattacaggcacccaccaccatgcccagctaattttttgtatttttagtagagacagggtttcacaatgttggccaggctgatctcaggtgatctacctgcttcggcctgccaaagtgctgggattacaggcgtgagccactgaacccggcctaatttttgtatttttgctagagacaggatttcaccatgttgacctggctggtcatgaactcctgacctcaagtgaactgcccacccaggtattccaaagtgctgagattataggcatgagccaccgcgcccggccagaaaatataacaattttaaacacaggacatcagaaaacctaaatatataaagcaaatattaacagaatgaagagaaataaagagcaatagaataatagggtactttagcagcccaccctgcctcaataacagagagatcatccagataatcaataagaaaacagcagacttggacaacattatagaccaaaaggacctgtataacagacatacagaacattccatctaacggcagtaaaatacacattcttcttaagtgcatatgaaacattctccagaacagatatgttaggccacaaaagaagtcttaacaaattcaaaaagactagaatcacatcgaatatctttttcaaccataacaatataaaagtagaaatcagtaacaggaggaaaaattggaaaattcacaaatatgtgaaaatcaaacaacacactcctgaggcaaacaatggatcaaagaaaaaaatcaaaaggaaaatataaaaacttcacaaaaacaaaaatggaaatactacataccaaaatgtatgggatgtggcaaaataagttctaagcagaaagtttataatgataaatacctacattaagaatgagatgagaacacctcatggttaacagcataaaaaaacaaacaaaccaaaaaaacaaaaacaaaaacaaaaaacttccaacaacctaactttaaatctcgaggaactagaaaaagaacaaaataagcccaaagttagcagatggaaggaaataataaagattacagcagtttagcaaaagagaaaaaaaacctacagtttttttaataagataaatgaaattgacaaactctttagcaagactaaccaaggaaaaaagaggactcaaataaataaaatcataaatgaaagaagagatactacaactaatactaaagaaatacaaagaatcataagaaaatactatgatcaattatacagcaacaaattgcataacttagaagaaatggataaatttctagaaacatataacctaacaagactgaatcatgaaatggaaaacagaaacagaccaatgcaggtaaggagactgacccagtaataaaactttccaacaaagaaaagccaaggaccagatgacttcactgaattctaccaaataattaaagaagaattcataccaattcttctcaaactcatccaaaaaattgaagaggaaacacttccaaacttattttatgagaaaagtattaccctgacagcaaagctagataaaagcactaaaagaaaaaattaaaggccaatatccctgttgaacctagacacaaaaattcttatttttgtatcttattttatgagaagagtattaccctgatagcaaagctaggtaagaacactaaaacaaaaaattcaaaggccaatatccctgtcgaacttagatacaaaaattctcaacaaaatactagcaaactgaatttagcagcacattgaaaggatcatataccatgactaagtgcaacttatccctgggatacaaagatggtgccacatgcaaatcaatacatgtgatacaccacattaacagaatgaaggataaaaatcatatgatcatctcaacagatgcagaaaaagcatgtgacaggctggagccaagatggccgaataggaacagctccggtctacagctcccagcgtgagcgacgcagaagacgggtgatttctgcatttccatctgaggtactgggttcatctcactagggagtgccagacagtgagtgcaggacagtgggtgcagcgcactgtgcgtgagcggaagcagggcgaggcattgcctcacttgggaagcgcaaggggtcagggagttccctttcctagtc

SEQ ID NO: 1890 - DNA, 2300 bp, Homo sapien
aataccttttaaagtttaaataaaagaagaattaaaacttttttggaataatttagttgaacttttaatctagaaacctagattgagaaataaatacaactgtgaaaaaatatagttaagtatcaaaaattgtagaaatttagagctgaagggatcttagtgatcacctaattcaatgatcttattttagtggaaaaatactgtggcctagggcctgctactagattgctaaatttggagaaattcaaacttagttttggtattttttagcaggtggaaggggcgatgatccatggagtgtcagtgatcagatgggacataaagtggtttgtgatttcgtttctttaaaaacttgtcttttgtggttatgaggaggttttttttttttttttaaagcacactaatttgctaataaagtacagagaaagaagttcaagagcttggcctgtttctttgaaagttagtgacagagtcaagattaaaagcacacccttgattatcatgacaacttttatttatatatgtcactgtaacacctgtttggcccactgagccgttctgccctcataatgcgcccatgaggctgcccagagcagggtcagccagtgaacctgtgagggtgagcaagtgaaataacaagaggaaatgtctaagaagggtcccagagggcaagagaaaagacaaatgttagtatcttaattcctccaaacctaagtagtttgtcttatggtagcagagacattatattaatggaaataccagagtttgtgaaaatttcaaaaagataaagctgtcccttaggattcagtagcttaatggcttgcaaaggagctaaacctaagtgttttaggcagtgcaaagctgggctcttaaaacttgcttcaagatagtggaaacagaaacattcaaagtacctttatcttcttggaagtaaatgtgacaataaaataatgatttgaaggtcatacagaaagttgtaaggctacatttaaaatgcaaaatgcacataaaggcagtatgttcactgctaatgaaatccagtgactttgtcctgaactagagtttctataggaaagtgttgttatttttggtaaataaaaatataaaacaaacacatgtgcttagggcttaaataaatgagtgagcagtttctgtgttttatcatttagccctcacagtaactctctgaagtgatactgtcattatccccattttcaagcatggaaactgaggattaaataacttaagtaacttgtccaggatcacagaccagtgaatgatggagccggaactttaactcagcgttaaactccaaacccaaacaaccagtaaaagttattgcttcatttaactaaattccaagtccataaaatattaaccccatatgtgtctgataggctttctttatgaacagtttacaaaatttacttttaaattactgataaatattaatggtagattaagagtaaccacttgtagtagaaaaatctaagaaattcagaatttcagctaaaagattatttagtgaaatctgaacgcttcatttaacaggttggaaagctgtggcccagaagcttactgacactcaatagcgtattgctgattagaagtttgcaacattttaggctaaacactaaataaaatccactgattctaatcaaaaccacacaacataccagattttcattgcataaaatatttttaaaataatttatcagttgacaagcctcttataaatctttgcatccttagtgctttttaagtgcctgcttagcatgtaaaacaggaaccaagtttttttaagtataatcattacagtttcaggatccaagtaagtgtaatcattacagtttcaggatccaaataagtgtaatcattacagtttcaggatccaaataagtgtaatcattacagttttaggatccaaagcatgtttaacttgttgcatagtaatttttatgtacctctgaacattcctctgctaggaacatattttatatcagcaataattttaggctctgattctcatgtggcctttgaagaactctttttgttgcttcttggtttcagctttggaaatctagagaaacccaattaagatttaatattacaaaaagaaatcagatacctaaaacattaaatatgcactgaaaattatttaccaaaaactgaaacaagtaaaaaacattcccttatttgaaaaatgcctttcattagaagccttatgatttagctaaaatgcacagaagataagttattgccaagtgcttgtaggatgccacttgaaaagttcctgtttg

SEQ ID NO: 1891 - DNA, 2300 bp, Homo sapien
attaaagaaaatatccaaatggccagttggcagatgaaaagatgttcaacatcattagtcattaaagaaatgtaaattctcaatgacgtacccctacacatctataatcaaataactgataatactaagaattggccgggatgtagagaaataggaaccctcagccagtaggaatgtaaaatggtatagctactttggaaaacagtttgggcatttctttaaaaattaacataaatttatatggcccagcaattccactcctagttatttacttaacgggaaatgtaaacatgtccacacaaagacttgcatatgaatgtggaagcagaattattcgtaatagcccaaactggaaacaagccaaatgcccaccaactggtacatgcatgaaaaaacgtgccacattcatacaatgcaatgttattcagcaataccgggcattaggcactttcgcctaatatatttatgatgttctctgagagaatcctgcagaatgctgggaatggggaatagcctgacgcaggctgttacttagaaagaatggaaagaaaaattaatgccctctttcctacttgaaacccatcatgattcccagttatacactgagtttgtgtctgtcactgacagttgattcctatgcatgatctcatattatcttcgcaatgacactgggagatttatattaataataccatgctccctagtttatagcttcaagaaactaaagcttgcaaaggtgtaacatcaggtgtgtcctttttcatacaagattggatttaatggttaacacagataagggtgggttttcccatttccagagtgtaagggtttcgcttctctccctctgccggtctcctccactgtttacacccagtagggcgtggagggtggcctagggtgtggcccaggaggcttccctaagggaagggggtggtggaaaccaggcggtttgaagcccatcaggattcccagttatatatcgagtttgtgtccgtcactgctagttgatttccatgcatgatctcatataatctttgcaatgacactgggagatttatattaataataccatggtccctagtttatagctttaagaaactaaagcttggaaaggcctaataacatcaggtgtgtcctccattttcatgcaagattggatttaatggttaacacagattagggtgggttttcccacttccagagtgtaagggtttcgcttctctccctctgccggtctcctacactctttacacccagcagggcgtggagggtggcccagggagtggcccaggaggcttctctaagggaagagggtggtggaaaccaggaaggagacgagaaccccagcgggcaagtcacgcagttacgcttgttcgcccagagaatccggcagggcctccgcagagccgtaaagagctctacaagtcgtgaaggggcgaggcgcaaaagcgtagctttacggcgattcgagcagtcgcgtcaagcaggctattccgggtttgtggctgcttggctccacacgtgggccgccgtaggtattccgaccggtaattcctcctattggtgtgcagcagccacattgaaggatagagtggcagcagaggccaaggatcgtgagttgatggagtttgctgctgaaaatgaagggaagtctgggggaggtctccacagcgtagctgagggggtgcggctaagtccagagcctggcagggagggagtaagggacttagcaggggcggaggagttcggcggcggagaggaggggacagggctgacagggataaaggagataggggatggagaggaaggaagtggacaaaggccagaggaaataccgatggacctaacggtagtgaagcaggaaattatagactggccaggtacagaaggcaggttggctggccagtgggtagaacaggaggtggaggataggcctgaggtgaaggatgagaacgcaggcgtattggaggtgaagcaggagacggatagtagtttagtggtaaaagaagcgaaggtgggtgaaccagaggtaaaggaagagaaggtaaaggaagaggtaatggactggtcagaagtgaaggaagagaaggataacttggagataaaacaggaggagaagtttgttggtcaatgcataaaagaggaattgatgcatggagagtgtgtaaaagaagagaaggatttcctgaagaaagaaatcgtggatgatacaaaggtgaaagaagagcctccgataaatcacccggtgggctgcaagcggaaactggccatgtcaaggtagggcatgggggattccattt

SEQ ID NO: 1892 - DNA, 2300 bp, Homo sapien
cctcactgtatcatcgtatagtcttttctctctgcaggcatccctcgtgtctctttttgtgtccaaatttcctcttcttataaagatatcagtcagattggattagggccgaccttaatggtctcattttaacgaaatcacctttaaaggtcctatctccaaatatactcacagtctaaggtactgggtgttacggatttaacacacgaatttgaggggacacaattcagcctgtaagagccagtaacttcggcccactaccacatgggcctcttggtactcacaacctggcagcttgcttcccccagagtgaatgatctaggaaggagaccaaaaaagcaagagcctaaggcagaaaccacagcctttctccaaacctaatcttagaggtaacgtattacttctgctgtatgctatcagtgacacagaccaatcctgggatgatgcaggagcagtctacacattggtctgaacactgtgggggtggagaatcactggggaacatactggtgcttgtctaccacaaacctatatccataatatatgaagaactactacaatttgataataaaagacgtcaattaaaaatgggcaaaagatctgaataaacatttcattaaagaaaatatccaaatggccagttggcagatgaaaagatgttcaacatcattagtcattaaagaaatgtaaattctcaatgacgtacccctacacatctataatcaaataactgataatactaagaattggccgggatgtagagaaataggaaccctcagccagtaggaatgtaaaatggtatagctactttggaaaacagtttgggcatttctttaaaaattaacataaatttatatggcccagcaattccactcctagttatttacttaacgggaaatgtaaacatgtccacacaaagacttgcatatgaatgtggaagcagaattattcgtaatagcccaaactggaaacaagccaaatgcccaccaactggtacatgcatgaaaaaacgtgccacattcatacaatgcaatgttattcagcaataccgggcattaggcactttcgcctaatatatttatgatgttctctgagagaatcctgcagaatgctgggaatggggaatagcctgacgcaggctgttacttagaaagaatggaaagaaaaattaatgccctctttcctacttgaaacccatcatgattcccagttatacactgagtttgtgtctgtcactgacagttgattcctatgcatgatctcatattatcttcgcaatgacactgggagatttatattaataataccatgctccctagtttatagcttcaagaaactaaagcttgcaaaggtgtaacatcaggtgtgtcctttttcatacaagattggatttaatggttaacacagataagggtgggttttcccatttccagagtgtaagggtttcgcttctctccctctgccggtctcctccactgtttacacccagtagggcgtggagggtggcctagggtgtggcccaggaggcttccctaagggaagggggtggtggaaaccaggcggtttgaagcccatcaggattcccagttatatatcgagtttgtgtccgtcactgctagttgatttccatgcatgatctcatataatctttgcaatgacactgggagatttatattaataataccatggtccctagtttatagctttaagaaactaaagcttggaaaggcctaataacatcaggtgtgtcctccattttcatgcaagattggatttaatggttaacacagattagggtgggttttcccacttccagagtgtaagggtttcgcttctctccctctgccggtctcctacactctttacacccagcagggcgtggagggtggcccagggagtggcccaggaggcttctctaagggaagagggtggtggaaaccaggaaggagacgagaaccccagcgggcaagtcacgcagttacgcttgttcgcccagagaatccggcagggcctccgcagagccgtaaagagctctacaagtcgtgaaggggcgaggcgcaaaagcgtagctttacggcgattcgagcagtcgcgtcaagcaggctattccgggtttgtggctgcttggctccacacgtgggccgccgtaggtattccgaccggtaattcctcctattggtgtgcagcagccacattgaaggatagagtggcagcagaggccaaggatcgtgagttgatggagtttgctgctgaaaatgaagggaagtctgggggaggtctccacagcgtagctgaggggg

SEQ ID NO: 1893 - DNA, 2300 bp, Homo sapien
aaaagaaacttgcccttatggaacttaaatttagagaggagataggcaataattaaattatctcaaaaatcctaattaccaattgagatacatgctatgaaagaaaagtgcacgaaactatgagagaaattagagaaattaatcaaatctggaaaatgtaagaggttggaaggaataggtcagggaaggcttccctgaggtagtaaaatttgaactgatgtccaaagaataaataagaattgttaggagaaggggtaggagagctttccaggcagaagcagcaacctggcacaaaggccatgagacagaaggagcatggactattcaagtagcaaagagggtaaacctaaaatattctctgcagattaaataattatgaccatcctgcttgcgtgaatgagcagattttggatatgggtcacacaaaaatattggcactaaatatgggaaactgaattaagggctaaaccatagccacctttatgttgttcacttggtcccctgctggtgattatgggttttaattagaaaacctagcatagtggttctcaaactcttcagaatcagaatccttttgcacttttaataaaggattcctttattattagaggccttacaaattttttgtttatgtgaattataactttttttttttttttttttttttaatttgagatggagtctcgctctgtcacccaggctgaagtgcagtggtgcgatctcggctcactgcaacctccgcttcccaggttcaagcgattctcctgcctctcagcctcccaagtagctgtgactacaggcttgtgacaacacacccagctaatttttgtatttttggtagagatggagtttcaccatgttggccaggctggtctcaaactcctgacctcaggtgatctgcccgccttggcctcccaaagtgctgggattacaggtatgagccaccgtgcccggccaacttttgatattgactatagtagaaaccaaaataaattttaaaactattcatgtgtcaattgctttaaaatttcaacaaacccattatatgttaatataaatatttttataaaaattaactatattttccaaaacaaaaaaattaatgagaagggtcacccagttttacacttttgtgcatttctgtaatgtctggattaatagattacagctaaattctcatatttgtttttgtattcaattagttgtgaagaaaacccagcctaatagagatatgtagtaggaaaaaagaaaagtatttaagtcgtgtttttcaaataattatggattttcttctttcatattataccttataccaaaacttgataagtggtagtttcttaaaggttagtttttgtgggaaaactgaacccacctcaatgaacgttttgtacttttatactaaaatccattggtctgttttatactttcataggtcttttgcttatacatgattttattaacataatatattgatcattctgaaaatactgatttatggaattatgcaggtcttccaaacacagatacagctcattccttaatgtcaaaaattacatttgttaacatcattaggaaaacataatgttacttatcaggaaaacataagtactgggaatctgtcaaatcctcagtgataaatacatgttttccctaatttttatttttgcttgagagcttgaaatttctcactggcatcaaattctgtcagttgttttccttgaaatggaaggctaacttcattcattttcaagaaaatatctgtgaactactcatgtcttaataatgctggtagtctgtcaataaaaaatggtactctatgataaaactggctagttgggtttgcaactcaaatagctgcacagtgcttttgaagcaatcactacagtgtgcactatatgtactttatatgtccttccatttcatctacgaaatattaaaaagatatttaaagaagataagaaatctaggagacagcaaaagtggtggaataatagccttccagaattctctcttaggcaagttaaaaaatgaaataaaaccatgtctttagaactaaaggacagagggaggagccaagatggccgaataggaacagctccggtctacagctcccagcgtgagccacgcagaagacgggtgatttctgcatttccatctgaggtaccgggttcatctcactagggagtgccagacagtgggcgcaggccagtgtgtgtgcgcactgtgcgcgagccgaagcagggcgaggcattgcctcacctgggaagcgcaaggggtcagggagttccctttccgagtca

SEQ ID NO: 1894 - DNA, 2300 bp, Homo sapien
gagactatgtcacacaaatccagattgaggaaccctccacaaaatgactgctcagtgcatttcaaaagtgttgagttcgtgaaagacaaaggaagacaggactgccacagatgggaggagactaaggaaacctaataattcagttaatcactgtgttagtttattaaacacagtgtaggatcctgagtaaaatcctggaccagacaaaggtcattaatgggaaaactgacaatatttaataagatgtatagattggttattagcattatattggtgttgattatccagggattttattttttattttttattattattttttttttgagttggagtctcactctgttcctaggctggagtgcagtggcgtgatctcagctcactgcaacttctgcctccctggttcaagcgattctcctgccttagcctcctgagtagctgggatcataggcgtgcaccatcaagcctggctaatttttgtatttttagtagagacagggtttcaccatgttgaccaggctggtctcgaactcctgatctcaggttatctgcccgccttggcctgccgtgctggaattacaggcatgagccaccacacccagcccaattgtccagttttgataactgtaatttggttatgtaagttgttaacattaggggaagctgagggaagtatatataggaactctgtactattgtgcaactttctataatctaaaattatttcaaaataaacagtcaaaaaattgaggggggcataatgaatttctatattcttgcatttaaaaaattaccaagcttgagagtcacatcaatcattgtcattcaccaatatgatcactttaacctttataatgtgtgtgtaatgtgggatccctttcagcatgtggaagggtcattagctctggaaggcacacaggctagacaagaaaaatttggagcaatgattctcagtgatatgcagcattcattcaacagatatgccaggtaggtgctaagaacacaactatgaacaacacaatagattcctggcctcttggagtttccagtcttattaataaggaagataaaatcagaacgtttgttttctgtttgtttgtttgtttgtttgtttgtttttgtttttgcaaaaatcagaaggtggatttcttagtataaggccatgggggcatagagacttgtatcaaaagaagaaatttgctacaaaagttggagaaggtattcaaattgttaaggtagtggtgtgtgcgtgtgagagagagagagactgtgtgactgtagtgtgtgtggtgtgctcttgctgtgaaccagtaatacttgtagacaggaaaaggcagaaaggtgaattacaggagaaaagtcagtagaaggtcgtaagggggacagactgaaaggaaggagtaaagggaggaaaggtagaaatgaggacagttaaagtcatttaataataccacgtaggccactggcctaactgcaaagaaggcaagaaggtcgcagggtaatgaaggcctcctctaagtgtgatttcagaagatgtgggtgaaaagggtagagaaaaagattggggatgagagagaagcaagagggaaacatcaaattggggactgctgagatggggaatggagcatgaacatggtatggaaggaaggatactagctgcctataagtgggaaaggagaccatccgggtcgtacccaggcggaggcgagcgcgcccggggtgcggtggcccagcccgaccccgaagggctggcgaacgggggcgcctgggccggacgctgggtcggggaaggttgcgggggcagagggggaggtgtgcgcagtgtttggtgatgtcattgcaagtcagtgagcggtgaaatttaacaccggccggatttgcttggctcctcttcttccaggcaaagcagccggcggcagtcaacgccgagcgcctgcagttgccaccggccccctcgcaccgacttgatttccgaagtgggtgtgtgtgcttgtttgacaaacgttcgggcgcgggctgtttccaaggacttcctcccccacttcatctccttccctacccccacccctttctcctcccaggcccaaagcagaggactccactggagtcacagagtcgcctttgaaccgcaagtgaacttgagtgctgcactagcagcccggctcccgctgccgccggcgccccgaggcctcccagtgaggtttacctcctcgcccgccctccccggggagcgcaaccctgggctcgttcgttaccgagccagagagctaggaagcctgtcctccccttcgggtgctatt

SEQ ID NO: 1895 - DNA, 2300 bp, Homo sapien
ccaaaggaccttctttttactaaagcattgagaaaatatagggaatgccagaatcctttaaaagctctgtagctgctattctataagcctggggataaagatgctgccattgcatgaaatccctaattccctaatggaaatagtaagatcccaaagtgatagaggccaagtgataccactgagccatcagagatgagatatctgttgataccatgataccagcagggtgtatcatattgtttgactaagggggatctttaggagttgataattaatcactgcccctataattgaaatggatagtctgctaagattctacttaatttgtacagcaaaaaatttaccagaactaatgaagagacctgaatgtcataaccttaaaggagatttacagcatcttgacattggctttttgactcatggctattataataggaagacaaagtggaagcctttggaactgcccttatctactaaaagattaaaccaaaggcaataccatagtcctaggggaattccagtgattagtggcactattaaagagtgcaaagatgtaaaggtggtgattctccatcacactttcatttaaccttctgtttgtcctctgcaaacaggttatctaaaatgttgctttttaattttgaagtattatttgtattcaagtatctttattctatttcattgcctgctatttttacattctagtccccatttgttgccatgaagatagaaatcacaatttctacccaacactgtagtgttgcatcctgcacacaaacgtactttagtgagctcatatgtttatgtttatgtatcatctatggcttttcttggtaagacaatggcagagttaaatagtatcacagagaccatatgacctgcaaaacctattaataaaatattatctggctgtatgagcacattttcatactgctataaagaattgcctgagactgggtaatttataaaggaaaggggtttaattgactcacagttcagcgtcgctggggaggcctcaggaaacttacaatcatgacggaaggtgaaggggaagcaggacaccttcttcgttaaggagaagtgcccagtggaggggaaagagccccttacaaaaccatcagatagcttgagaactcactagcatgggggtaaacggcccccatgattccattaccttcatctggtctctctcttgacacgtggggattatggaactgcccccatgattcaattaccttcacctggtttctctcttgacacgtggggattatggggattacaattcaagatgggatgtggtcggggactcagagcctaaccatatcactggccctttactaaaaaatttactaattctgtctcccgctttaaattatgaaagggacaattacagtactggtggaaaaacattgctggagtgctttagtgaaaccaattatttaggtagcagcatgccacggttatggcttagttgacagttactctacttgtgaacttcataggttggtgtacgattcttaacatgaatattaagtagaggcattgaatgaagatatttttccaattaaaatcttgctttgcttcttcaggactttataaaccagaccagctggctgtggcacagatacgaaagactttgagaccctgaaggcaccttgcagaacatcctcaggcttcctcatttaacaggaaaaaacctgaggcccagggaggcatctcagctaaaaatactactatacatttaaaaggaggtttcttccggtcgcagttgccttcacgttttcaaatcttctctttaaaaagcaaaagcagggcacaaccaggccaagcgccagaaaactcggaattggctttatttcctttttttctagttgggctcggttatgattttcggtaacgtacacaaatgctgtccttgtccataaacaaacgcttaaaaaaaaatgtttacccgagaaacaaggatagacacgaagctgccctccctgccccgttcctcaccctctccaatagctataggcgctgcccgccgtccctaacccggaccaatcggcagcctgctgcgggcctgacgggaggggtggggccgccgttgccagagaagccactagccggttactagctgcgcttttgttccacttgagcgggcactcttctgcggcaagcaggtctaggaattcgcctggttcccacctcgcgtcccttgccttccttcctagtctacccactgtagtgccccctgcgtcccgctccctcctagccgactcagagcacaagaaggattgccacggtttccattg

SEQ ID NO: 1896 - DNA, 2300 bp, Homo sapien
actgccagggatatttgaaatgaagtgcattgttctgctcaatgagtcacatttacagacagagcctttggagctgccacacctctggccttctactctgaagacacagtgaacaagcagaaaaaaactagggctgggaattcagtttgggagaaaaggcagctaagctgacctttgaactttagggtaagacccttgggcagccacgtaatgaccagcgccatcccattcttcaaggagagcaccatactcaagcactgcctgtcaagagggagcaagagggaaactgctctagaacagaggagatgccttctagaaaacaagggtgggggaaagaatttttacactataacccggggctccttcactatcttgttttatttacttctcctgactccattcattcagtcattcaacagagagtttactgagataggtgctggggaagtactgaatgaaaacagactccatcccttccttcatacagcaggaagctgacaatcaattatacaatataaatttgacattgttaccatgatcatactgcaaaggtgagttatctgatgctatggaagcatgaaagaagggaatttgacttagttatggagctcaggccaggcttccaggacacagctggaatttgaaggaaaagcaggtgagaagaagcatgagaaaatgattcaagcaagacagcaaggggaaaaaaattccctcaacatctgtcaacattgcagtgcaatatcaaagcccaagttcagaagactccaaccttgctgggaagaagagtgacatcacactgcccatgaagatgttgaaaacagacaatgttggtgaaatccctgttgagagcagggacagaccgtttcctaaatgctacactcccctccccagaaatgttccgagacggggccacagcagggaagagtcacaggttttgcttgctgtggacctctgacgctgtgaataaaactttttctttagttttacaatagatgtcactgtgcggcattcttaaacacaaagaagagggagaaacgaggttactaagataatttagtaactaagagagaacatgatatattgaaaaacagtggaatttggagtcagttggttcattctagtacgatgataatactcccaaccttgaacaagttacttagatttttttgaacattagttctgtcacccataaaataggcataataaaatccatcactcaaaaaatgttagtttcttctctcattggctaattttcataatcagaatttccaagactcattattttcatttgaaaagtacaaattatacctgcatcagagtattgatatttaaatgagttcatttgtaaactttaaagcatgaggtaaatatcaggtattatgaatcagtcataaaatatttgcgatggttactatatattagatcctgtttttggtcctggagaaatggagggttgactgaagcagggccttgcccttaggagagagctgaaggagaaatctattcttcttcctgaggcagagagaaaaggtagcaaggccagagggaaagggctgcacaggcacccaagttcctggcagttggccctctctgggggatatctgatatctgacctccagccatcagctgagagcttgcccagactatctgacccaagggctgtagggactgggctgcagaatggatttctaaatcttcaaaataaacaggcaaggaaatcttgcaacaaatgaaaaatgacttgagggcagtagaaagtacttgtgccaactgatggaggaggttatgaaaaatgaggagaggaaaatcactatagacttctgtgtttctactgcaagtggattgaacagtccagatatactgatttccagcccatatttcctgcttttaagctcctttggtcttatttccctcttctttctgaaaagttataaaatgaatgaagggcagaatgtttcttgcccaaccatgattcaggaggcagctcagccacagaacaggcaagtgtagcattgcctggaggaaaaggacttgtagaggcaggtcccagatggatccaccccagacttttcaaagaagacacctccttcatcttgtgttctaaaaccttgcaagttcaggaagaaaccatctgcatccatattgaaaacctgacacaatgtatgcagcaggctcagtgtgagtgaactggaggcttctctacaacatgacccaaaggagcattgcaggtcctatttgcaacctgaagtttgtgactctcctggttgccttaagttcagaactcccattcctgggagctg

SEQ ID NO: 1897 - DNA, 2300 bp, Homo sapien
ggactctccactgagcaagcagccaagacccagcttgcagggaatgccaagcaaatttggagagcacttaaactgagtctgtcacaccagatgacctctgtcatagggaaatgcagcagctgcagccaacaagggcaggacaactaaagaccccactcagggatgaagggtgggattaccccaacaagagaacaaacaatacagatcaaccaaaatgctgagtaaaagtgagggaaataggtgataaaggagggagattataaaagccttgagaccagctgtaacagcaggcattgcaatttatttcaataaccttcttgccttatgcacttgagcagattgcaattgaccaccactttgaaggagattctgtaaatgattaaacttgtaccttctctcaggggaaaagtgagacagctagtgctcacacacacagaaacacaaatcctacattataatattggagcttgatatgatgaaagtactagagtgaatctgagcagctcagagtgaactgtatcagactcttcttattgaacctcctcagatttgcttggttccatctgtctaccgggcactcagtcatttgctccacctcagtcactatccactccttgcaggtccaagcagttccactgcctgaggtcaagctgccacctcttgtaacccctggctcctcacataccacaaggcatgggggtctctctttctaagcgactgccgaaagggctggatgacacagccaggaagtctggggggagatgatcacctgtagaagatgagaaggagccaaacgcttttccttcctctctccaaagggctgctccaaggcgtggtttctttgcacagccccttaggagacaacccacacaggaaggcaagggcgcctgtgggctggcctgctgggtgtctccattgcagggcttagtaatgctcctcctttagttgcttcccagccttccctgactcatttccccattccctcattctcactgctctgggattaaactctcaaactcttagcacatatgcctgccttaggctctgttttttagggaacccaggcaaagacacatacatttggggtctgagatatcttggaatctacatttttaaattttgtatgaataataaatgtatatgtattttgatataaaagcatattttggatcatctggacaaccacattataattgagcatttccactctatttcagtgtttcccttttaactgcttaagattatgctagatataaagggtattcaattaggaaaagaggaagtcaaattgtccctgtttgcagatgacatgattgtatatctagaaaaccccattgtctcagcccaaaatctccttaagctgataagcaacttcagcaaagtctcaggatacaaaatcaatgtacaaaaatcacaagcattcttatacaccaacaacagacaaacagagagccaaatcatgagtgaactcccattcacaattgcttcaaagagaataaaatacctaggaatccaacttacaagggacgtgaaggacctcttcaaggagaactacaaaccactgctcaaggaaataaaagaggatacaaacaaatggaagaacatttcatgctcatggataggaagaatcaatatcgtgaaaatggccatactgcccaaggtaatttacagattcaatgccatctccatcaagctaccaatgcctttcttcacagaattggaaaaaactactttaaagttcatatggacaagatgaaattaatgcttatcaccatctgaagaccaaatgaatttatgaacgaagagatatttcaagtatttcaatacaagaaaatggggggccaatttgaggttccacctgaggtttggcaaattgaaagaatatacacagccactgacagcccataattcatgttcctagggacatttagtttcagcaaaataatttaatgatgttaattggaattttattgactggtaggagctatgcaatagagaaagcagaaatctgatgaggaacttggagtatgctttgcaaagtaagatatacattttatctttactctccattataaaatagtcaataatatctacatcacttgctaatgcttttggtacaaatggatgtggaatataattgaatattttcttgtttaaggggagcatgaagaggtgttgaggttatgtcaaggtaaacaaaaccaccattgtggtaaagaccaccatgagggataactgaatatatggcttacaaaatgtttactgaataagcagaacagtctggattttcctgggcagga

SEQ ID NO: 1898 - DNA, 2300 bp, Homo sapien
catctgtctaccgggcactcagtcatttgctccacctcagtcactatccactccttgcaggtccaagcagttccactgcctgaggtcaagctgccacctcttgtaacccctggctcctcacataccacaaggcatgggggtctctctttctaagcgactgccgaaagggctggatgacacagccaggaagtctggggggagatgatcacctgtagaagatgagaaggagccaaacgcttttccttcctctctccaaagggctgctccaaggcgtggtttctttgcacagccccttaggagacaacccacacaggaaggcaagggcgcctgtgggctggcctgctgggtgtctccattgcagggcttagtaatgctcctcctttagttgcttcccagccttccctgactcatttccccattccctcattctcactgctctgggattaaactctcaaactcttagcacatatgcctgccttaggctctgttttttagggaacccaggcaaagacacatacatttggggtctgagatatcttggaatctacatttttaaattttgtatgaataataaatgtatatgtattttgatataaaagcatattttggatcatctggacaaccacattataattgagcatttccactctatttcagtgtttcccttttaactgcttaagattatgctagatataaagggtattcaattaggaaaagaggaagtcaaattgtccctgtttgcagatgacatgattgtatatctagaaaaccccattgtctcagcccaaaatctccttaagctgataagcaacttcagcaaagtctcaggatacaaaatcaatgtacaaaaatcacaagcattcttatacaccaacaacagacaaacagagagccaaatcatgagtgaactcccattcacaattgcttcaaagagaataaaatacctaggaatccaacttacaagggacgtgaaggacctcttcaaggagaactacaaaccactgctcaaggaaataaaagaggatacaaacaaatggaagaacatttcatgctcatggataggaagaatcaatatcgtgaaaatggccatactgcccaaggtaatttacagattcaatgccatctccatcaagctaccaatgcctttcttcacagaattggaaaaaactactttaaagttcatatggacaagatgaaattaatgcttatcaccatctgaagaccaaatgaatttatgaacgaagagatatttcaagtatttcaatacaagaaaatggggggccaatttgaggttccacctgaggtttggcaaattgaaagaatatacacagccactgacagcccataattcatgttcctagggacatttagtttcagcaaaataatttaatgatgttaattggaattttattgactggtaggagctatgcaatagagaaagcagaaatctgatgaggaacttggagtatgctttgcaaagtaagatatacattttatctttactctccattataaaatagtcaataatatctacatcacttgctaatgcttttggtacaaatggatgtggaatataattgaatattttcttgtttaaggggagcatgaagaggtgttgaggttatgtcaaggtaaacaaaaccaccattgtggtaaagaccaccatgagggataactgaatatatggcttacaaaatgtttactgaataagcagaacagtctggattttcctgggcaggagggggttgggggctttgggtgggttggtgtccatggcttggtaaacatttccaagaagtaaacaaacctatcagcggccaagctgcttgtcacctgtgagtgcttccaaggaaccggatgtgggctcccccacccttaccccagcatctggcacagctgaaggcagatggaaatatttacaagtacgcaatttgagactaagatattgttatcattctcctattgaagacaagagcaatagtaaaacacatcaggtcagggggttaaagacctgtgataaaccacttccgataagttggaaacgtgtgtctatattttcatatctgtatatatataatggtaaagaaagacaccttcgtaacccgcattttccaaagagagaaatcacagggagatgtacagcaatggggccatttaagagttctgtgttcatcttgattcttcaccttctagaaggggccctgagtaattcactcattcagctgaacaacaatggctatgaaggcattgtcgttgcaatcgaccccaatgtgccagaagatgaaacactcattcaacaa

SEQ ID NO: 1899 - DNA, 2300 bp, Homo sapien
acaaacgtttttcaggtctgcttcctaaaaagtatccatattgataacataaaaacattaccgaaacacatgacctgaaaaacgcacataaagagaaaaatgttgtacaactaatgattactttctaaattaatagcatcccagatattaggatttgtaattgcatgataatattgtaaagtcactgagaggaggaatcatgttacttttcttttgtatactatgccttaaaaaaaaaatcccccacaggcgagagatataaatactagcaagtgttatatgacataagaaaggtaaaggaaccatcatttattggctgtgttagtattgaccttagtgcatatattctcatttatttcctgcataataactatcactattttgtagatttaataattcaggtgcagagaggttaaggttactcaaaaaataacaaagtcatattgagtttttgttatgtgtcaggcactagggctaaattttgaggaagcaaaatttagtaagcaggtttctgtaatagatggtgtattaattcattttcacacctctataaactatatctaagactggataatttataaatgaaagaggtttcattgactcacagttccacatggctagggaggcctcaggaaacttaccatcatggtggaaggcgaaggagaagcaaggcacaccttacgaggtggcaggagagagagaatgcaagggaaattgccgcttacaaaatcatcagattacgtgggaactcactcaatatcacaagaacagcatggaggaaaccatctcgatgatccaatcacctcccaccagatccctccctcgacacgtggggattacaaatcaagatgagatttgggtgggacacagagccaaaccatatcagatggatttacagtccagtaagtgcactgcaatgttaaaggggccttattgaaatttctacaagatatcgtgaagctataaagggtggaatggaaattctcaggaggaagagtagaaaatggagaaacatttcggaagtgactttttggctgaacatgaaggtagagtttacaacgtagaagacagaggaggagcaatagagatgccaaaggctggcaagtttgggaactgacaggctatagtggggtaaattagagacatggaatacacagccagaatgagaatggagaatgaagcaaagctccaagtcatagagtttgccattggtatatgaagagtggattgtaatgtatgaacaattaaagcagaggagtaagaggaaagactctcaggcagctgtgaggtggaacaaacagagaggaaacaagatggaaaagtcacaaagtaaactgcaatcgtctgagggagggactgtgatggcttgggtgatggatatttcattggagatggagaaaagatgaagaaattgagatatagtgaagtgcactggtcttgggtactttttaggagggaaaaggtaggaaaacttccagtttcctaattttggtgatggggtgcatagtggtgacatcaagttaggaaatacctgaggaggaggagcagatgggagaaaagtgataaggtcaataatgaacatgtggagtttgaggcgcatgtgagacatccaagtggattttggagagagctggaacattgggagttgaaggttagaatatagtgtgttggtaaatgagtgagaagtaaggaagtggagtttggtggtataagggtggagagataagatggttccaagagaggaatgctggagagggtgctatggagagagcagtgatggcttgaaatggtaaatttgaggagtaggaaggaaaccaaaaagaggaggtaaatggattgctgaggagcactaagggtccaatgagattgaaggcctggtttaaggtaggaaatctgcattattactgtgattttccccagcactgttccacagtgattgtgcaattgagccaaggttatgcattagcagagcagacaggtctaacaaattattaaatattctaccacatagtttaccattatctatataatttcattgacaatttcagatagttgaattctgtacagaacaaaaccacaacaaagaagctccaaacaagcaaaatcaaaaatgcaatctccgaagcacatgggaagtgatccgtgattctgaggactttaagaaaaccactcctatgacaacacagccaccaaatcccaccttctcattgctgcagattggacaaagaattgtgtgtttagtccttgacaaatctggaagcatggcggtatgttcaatgagtcttggtcttctggatgct

SEQ ID NO: 1900 - DNA, 2300 bp, Homo sapien
ttcatatggaacccaaaagaagcctgcatagccaaagcaagactaggcaaaaagaaaaaacctggaggcattacattacctgacttcagactctactataaggccatagttaccaccacagcatggtactagtgtaaaagcaggcatatagacgaatggaacagaatatagaacttagaaataaaccaaaatacttaaagtcaactgatcatcaacaaagcaaacaaaaacaaagtggggaaaggacaccctattcaacaaatggtgctggcataattggcaagccacatggtgaagaatgaaactgggttctcatcttttaccttatacaaaaatcaattcaagatagatcaaagacttaaatctaaaacctgaaaccataaaaattctagaagacaacttcagaagaaccctcctagacattggcttaggcaaagacttcatgaccaaaaacccaaaagcaaatgcaacaaatacaaagataaattgttgggacttagttaaactaaaaaccttctgtgcagctaaagaaataatcagcagagtaaacagacaacccacagaatgggagaaaatctctgcaatctatacagctgacaaaggactaatatccagaatctacaacaaactcaaacaaatcagcaagaaaaaaacaaacagtcccatcaaaaagtgggctaaggaaatgaatagacaattctcaaaagaaggtatacaaacagccaacaaacatatgaaaaaatgctcaacatcactaatgatcagaaaaatgcaaatcaaaactacaatgcgatacctccctactcttgcaagaatggccataatcaaaaaatcaaaaaataatagatgttggcatggatgtggtgaaaagggaacacttttacactgctgctgggaatgtaaactagtacaaccactatggaaaacagtatggagattccttaaagaactaaaagtgggctgggtgtggtggcttacacctgtaatcccagcactttgggaggccaaggttggtggatcacgagttcaggagttcaagaccagcctgaccaacatggtgaaaacctatctctactaaaaaacaaacaaacaaacaaacaaatatacaaaaattagccgggcatggtggcacacgcctgtaatcccagctactgaggaggctgaggcagaagaattccttgaaccctggaggcggaggttgcagtgagccgatatcgcgccactgcactccagcctggacaacagagtgagagtccatctcaaaaaaaaaaagaactaaaagtggagctaccatttgatccagcaatcctagcaataccactcctgggtatctatccagaggaaaagaagtcatatatgaagaagatacttgcacacacgtttatagcagcacaatttgcaattgcaaaatatgaaactagcccaaatgctcatcaatcaaccagtggataaagaaaatgtgatatatatatatacacatatacctacatacatacacacacaccatggaatattacttagccataaaaagaaatgaaataatggcatttgcagcagccaatttcagaaatggaaaaccaaacatcatatgttctcactcatgagtgggagctaagccatgaggatgcaaaggcataagaacgacacaatggactttggggactcggggaaaaggataggagggggaggtgagggataaaagactacacattgggtacagtgtacactgctcgggtggttaggtgcaccaaaatctcagaaattataattaaagaacttattcatgtaaccaaaccccacctgttacccaaaaacctattgaaaaaaaaaaatccctgttgtcaaggagcccttagaatatcaacaatgacaacaataaagaaaacgtgttccaacaggaaaatgtgcaatgcattttataaaatgatctgatttattctgactcttagtcacttttatgtaacatataattaagcaatcaggtgaattagtcatgtattttctcatgtaatgtacctttatacagtcaacatcccataatcagccaatactggtaagttttaggaacgtatataaagagaaagaaaagaaaagcctcttgaacaaaccaacatttgagccaggaataactagagaggaacaatggggttattcagaggttttgttttcctcttagttctgtgcctgctgcaccagtcaaatacttccttcattaagctgaataataatggctttgaagatattgtcattgttatagatcctagtgtgccagaagatgaaaaaataattgaacaaataga

SEQ ID NO: 1901 - DNA, 2300 bp, Homo sapien
aagctttttcactcttatggtacatgtatataagtggggaacagataataaatagataaatacaagaattgcagattatgtagatagtgttgtgaataaacgaaacagggaaaggagaactactttgggtagagaggccaatgagccttctctaaaaagtaacatttaagctctgatttgaaggatgagaagaagccagtggttcagatagaaaagaaatgcaaaagttccttaaggaaaaaggtgagaaaaaactagattattctaagaaattatagaagctagtagcagtggagtttggcaaatgaggggatatgaaatgtggttggagaggtagacaatgactagatcttaaaaaacttcaaaaaatatgaggcttgtattttgtttcaagcacaacaaaaagctcttgaagggttgaaagtatcggagtttgataatcaatttatgttccaggaagatgattccaattgccctgaataaaataaattgtaggcagtaaaagtggtaataggaagacattttgggagcttggagatggattaaattatacaatgtataaaacacagttaatacatagcgaatgttcagtaaactgtaacactacactgttatttctcttgaactatagaatattctgtagtaaatacatattagttttgtcttccttgttcatctctagatctcctcagtctctgacacaaagctccataaacattgtaaaattgaacccaattatttattaatatatgaatgtaggaatgtagttcctactgaatccccagcacggtgactggcacattgtaaatgcttggtaaataaactcatgcaagaaaaggagaggtgaaagagagaactctgcttcatctttggatcttcattttgtacttaaatgcgtgggagaagtgtgatggagatgctacaaatgccataaatgtataaaagcattttcctctctttccgttcggtttcaaggcatgtcagagaatatttcccatatattgcaatatatatattagtcactctttgcttcaaaacatgcaaaaattgtaataagcgtggtcaatttgttccctgataccagctttcttagggatttctacattccaaaccctcttctgcaaatctacacacacaccttcactccatgccaaagaaagtcactgacaatctgtcatttttcacctcttggcctggaatcaaggtctcaaaatggtgctccaagatgccaccaccaattaaaactgtcaaagaaaatgaaatatgttgtcatcctgggctaacttctctctatactcttttacaggcacctagtttcaaaactttgagtttcaaactgtttggcatttaggaaaaggatacaagctacaaattgaacttaataagtataattttaatatattctttaagcatcaccaatatgcttacttctgtgccagttattattagaagtaaatgaaagttgcataacaaagtccctaaccacatgcttagaactttccatattttttctttataagcatactgagggtttactaatttgtaatcactgactttttcaaatgttgaagtggattcttaatgcatctagctttaaatgcaagagactttataaactgaaggcttgtctgtcagaaggtagtccagtcaaagaaaacataacactaattaatgtcacatactgtgattatacctttggtatctggttgacctgagtttcccaggttgagatgttattgtcatttagtctagacaggattttccaaagcctggtcccaccgaattcctttaaataaatactacctgcagctgggagttaaaaaaattcatgtttaactttccccaaggattgttgattgaaaattctttattttaaaatagaggttatctcttctattctgcataactttgtttattttctctgtaaattttttctcatttcccatttgtctatttgatctaggaacatctgttggtaactgtgctctgcattatgtttgcaggtgattggagagctacattcccaactcgatggatccgaagtactgctgctgactgatggggaggataacactgcaagttcttgtattgatgaagtgaaacaaagtggggccattgttcattttattgctttgggaagagctgctgatgaagcagtaatagagatgagcaagataacaggtaaaacacgatccatttattccaggccttcaatagtaatgcataaatgtaaaggctgacagttcaacaacgtctcttgagtttctgccttggaggcactgaagctggggaccagaccc

SEQ ID NO: 1902 - DNA, 2300 bp, Homo sapien
caccatttgcttgtctgtaaaggattttatttctccttcacttatgaagctcaatttggctggatatgaaattctgggttgaaaattcttttctttaagaatgttgaatattggcccccactctcttctggcttgtagagtttctgctgagagatctgctgttagtctgataggcttccctttgtgggtaacccgacctttctgcctgtcattaacattgtttccctcatttcaactttggtggatatgacaattatgtgtcttggggttgctcttctcgaggagtatctttgtggtgttctctgtatttcctcaatttaaatgttggcctgccttgctagattggggaagttctcctggataatatcctgcagagtgttttccaacttggttccattctccccgtcactttcaggtacaccagtcagacgtagatttggtcttttcacatagtcccatatttcttggaggctttgttcatttctttttattcttttttctctaaacttctcttctcgcctcatttcattcatttgatcttccatcactgataccctttcttccagttgatcaaatcggctactgaagcttgtgcattcatcacatagttctcgtgccatggttttcagctccctgaggtcctttaaggacttctctgcattggttattctagttagccattcgtgtaatcttttttcaaggtttttaacttctttgccatgggttcaaacttcctcctttagctcgaagaagtttgatcatctgaagccttcttctctcaactcatcaaagtcattctccatccagctttgttccattgctagtgaggagctgagttcctttggaggagaagaggcactcgatttttagaattttcagtttttctgctctgttttttccccatctttgttgttttatctacctttggtctttgatgatggtgacatacagatggggttttggtgtggatgtcctttctgtttgttagttttccttctaacaggaccctcagctgcaggtctgttggagtttcctggaggtccactccagaccctgtttgcctgggtatcagcagcagaggctgcagaacagcgaatattcgtgaacagcaaacgttgctgcctgatcgtttctctggaagtttcgtctcagaggggtacccagccatgtgaggtgtcagtctgcccctactggggggtgcctcccagttaggctactcggggtcagggacccacttgaagaggcagtctgcccgttctcagatctcaagctccgtgctgggagtaccactactgtcttccaagctgtcagaggtttctgctgccttttgttcagctatgccctgcccccagaggtggagtctacagaggcaggcaggcctccttgagctgcagtgggctccacccagttcgagcttcctggctgctttgtttacctactcaagcctcagcaatggcaggtgcccctcccccagcctcgctgctgccttgcagtttgatctcagactgctgtgctagcaatgagtgaggttccatgggtgtaggaccctctgagccaggcacgggatataatcttctggtgtgccatttgctgaggccattggaaaagctcagtattagggtgggagtgacccaattttccaggtgccatctgtcacccctttccttggctaggaaagggaattccctgaccccttgctcttcccaggtgaggcgatgccttgccctgcttcagctcacactcagtgcactgcacccactatccttcacccattgtccaacaatccctagtgagatgaacccagtacctcagttggaaatgcagaaatcatccatcttctgcgtcgctcacactgggagctgtagactggagctgttcctattcggccatcttggaaccacccccccaatccaatgaatattaatgcctcagctgtcttagaaagtatgataaatgtgttcagcataatccccattgctacttagcaactccaagatattttagcaatttactatacaaactttatgcaaatattttggtcttgattcaaattcctaagttaagcagatacataaatacctttggtacatttccaaaaggtttgtttaacatgcaaaaatggtgttcagtctgaaggtgattctcttcctatccttgcttctctcgcctgtattgaaaagctcactggtaactttgaataacaatggatatgatggcattgtcattgcaattaatcccagtgtaccagaagatgaaaaactcattcaaaacataaaggtaagggaaaattttattatcca

SEQ ID NO: 1903 - DNA, 2300 bp, Homo sapien
ttttaattatactttaagttttagggtacaagtgcacagtgtgcaggtttgttacatatgtatatatgtgccatgttggtgtgctgcacccattaactcatcatttacattaggtatatctcctaatgctatccctcccccctcctcccaccccacaacaggccccagtgtgtgatgttccccttcctgtgtattaaaacataaagatgttttaataacaatagtcttgtcaacattcacggcacgtggaacttgggatttcatttatgagataaataaatgatgttggttagcggaagagattaggatggtagtggaaagagcatacaatttggaattagatcttggtttgtatctcagcatcaccatttactagcttcagtctgaacttgggcaaggtatttcacatctctgaggctcaggtcccagttaattggggttataatacaatgtctaccttgctatgctgaagtaaagattaaatagaaaaatatacagaaaatgctactacagtgattggcatgtgataagttatagttcaatatatcttgttttaaaaatttttgttataaatgtctaaatctaagagcagaagatattaattttgtaaatactatgggttacaaacctctcatattttggtcatggtagatgaatatacaaaatagcaatgtcaaattcatacttgaatggcttaaaatttatctatggacagtttacaaagactaattgtttaattctcaaaattaatgagaacatttccatggaagagttaagaattaagataatatatcttgcacttaatcaacatttttaaagtagcattggtgctttgatatgatagtaaaggaggttgagagagaaaacagattcattcttttccttccatgtttattacttgttatcatttattaatgctaacatattacttctggcctagactcctttaatagcctccaaaattatctctccatttcactttcctttacacaagttttcaagatgaatacttctaaaaatatagctcaaatcatattacaatttgctcaagcatctgcctactaaggaaagtatatatactactcttgttagagccatgtcataggctaatttcctcatttttactatacagtatgcacctgtaagtattcagaactgcatcgagatatgtgggcacaatagctaatgtccctgattcaatttatattttgaaaatatttgtaaatttatttaatggggctggagtgaaatatatttttcttttacatttaagacatttaaaaaacccagaaaaatatagataatagtgtaacaaaaactttcattcttctcatataggaataacaatttttaaaatcataacttagtttttttaagggctaaaacattattgtttaagcttaagatctaggtaactaaatcaacactctcagtctcattcacctttctgcccttcactcaaaacctcccctaggaagagtttaatgtatttcctgcccagttttaaaaatacttttacttatttatatttacagacaaatatagtatatcttatgctgtaatttatgtacatgatagcatattgtacctatcattttgtaatttttttacacagtattatatatttcaaatctgtttaatatagattagatgaaattccttttttttttttttttttttttgagacagagttttgctcttgttgcccaggctggagtgcaatggcgcaatctcggctcaccgcaacctccgcctcccgggttcaagcgattctcttgcctcagcctccagagtagctgggattacaggcacgtgccaccatgcctggctaattttgtacttttaatagagacagggtttctccatgttggtcaggctggtctcgaactcccgacctcaggtgatcctcccaaaagtgctaggattacaggtgtgagtcactgcgcccggccagaattcatttcttttagctgttttatagaagtccatcacatgaatataccacattttatttgtcaatttccttattgctggatgcttagattgttccagtcttcactcttaaaaatatgctatagtgaggggaggagccaagatggccgaataggaacagctccggtctacagctcccagcgtgagcgacgcagaagacgggtgatttctgcatttccatctgaggtaccgggttcatctcactagggagtgccagacagtgggcgcaggccagtgggtgtgcgcaccgtgcgcgagccgaagcagggcgaggcattgcctcacctgggaagcgcaaggggtcaggg

SEQ ID NO: 1904 - DNA, 2300 bp, Homo sapien
gcaaagggtagagactgatggagcaagttctagagggtgacaaattagttctcaaccttggtcacacattaagaacacctagaggaactcctaaaacatcccaatgcccagtccacactctgggactggatccaggcatcagtggttgcttaaactctccaggtgatgctgatgtgcagccaagattaagggagcagtggctctactcagaacacctgagacacctattcctttgaaacatttggcaatgatgcaggaaagagtgtggagagaacaggaggtggaaataaggaaatttggttgaagaggcttctgccaaacagagtgatgatttatattttctctgtaaagaaagcgaatcagctgggtgcggtggctcacacctgtcatcccagcactttgggaggctgtggcaggcggatcacttgaggccaggagttcgagaccagcctggcccacatggtgaaactctgtctctactaaagatataaaaaattagccgggcgtggtgatgcatgcttgtaatcccagctacttggaaggctgaggcaggagaatccttgaacccaggaggcagaggttgcagtgagctgagatcacaccattgcactccagcctgggtgacacagcaaaactctgtctcaaaaaaaaaagtgtcaaaggctaagaataaggatatatgaaaataaggtaagtcttttatggagaatggggaaacaggattacagctacagagggtgcaaaagaaagaagtaacattgttgttttcccaagactgggaagattgaaacacttgaggatgaggattcagggacaccactgtgtccaccattaaagaatttcccctttaatggtggacacggtggtgtgatccttttgtagagacgagcataggttatggcaaatatacctactttaaaaacagtgctctgggaagagagtaagtgcttttccacataaagatctaaaatagacaataaatgagaaatagggttttttattatatattcatttttccatatttctggaaaatgaaacagacatggagtatttcaaagctgggagagatcattatattggagttaccttagaaagagggggctgtttctgccaccacaacaaagaatgaaacaacacaaatatttacgttttcttcttgtcctcataatgcttttactgcactcgtctttcaacctttaacatctactgcatctgtgactgttgtttcagtaaaacacggaagcttgaatgtaagctcatttcattgcctgctgcacaaccacacaaaacagcattttcttattcttgaaatatgatagcaacgtctccttccatgcttgtacctgttttaattcctttcaagcagaggctgtatcgtgaaagatgcttaagaagttacttggaacgacaggatttggaacggatgtcacatcatattctcatttgttattaaaattagtcacgcttaattgttaaggactatcctgtgtcgctcgccatctttgtgtcctccacctggcactttgctttcacacagtaggcacatagcgttgaggtcccggaaggttgtcaagtaaccggccaggagcttgagggcaggacattgtctccgacacttgattcagtgcctggcacacaggaggtattcaattatgctgaatgaatgagcaaccggctcggtgggggacagtaaacccaaccctattccgcgaacgtttgctgagcggcatccaggcctcagggaccaagtgtgtcgcgcggtgccataccgtgaccgggacctgttatttctaatgtccagatattgtaattctatgctgtaactcctatatttcctcttaaaacaaaaagagaaatgtgggtcgtgttcgctctgggttctcgttaagtgcaagcatacagaggcgccgagaccccgcggctcgccctcgccgcttcctccacaggagccgggcggagctcccggcgcgccccggggctgcgccgccgcaatcctcaaggggtcgctgttcccgcgataacctcgagaaaggctccgccccgcggcccgcgcttgtttttcccttgggacccgggtccacacggcggggtcgcccgtccatctccggctcgcccgcggggcccatcgtcgacgttagcggccgttctccgagccgactgacccatccttggcgctgccgccgcgcgcttgttctcctccctcgccccgccttcatcctccccgttcacggaaacgacagctgcggctgcggggctggcgccgcctccctccacctaccacgtctgccctcgccgctcta

SEQ ID NO: 1905 - DNA, 2300 bp, Homo sapien
ataaacatttttaaatattgggatctcaaatccaagcaaaaaagaaaaaaaaatccttaacttaagaagtaacctgaccggctgggtgcggtggctcccacctatgtaatcccagcactttgggaggcggaggtgggcagataacctgaggtcaggagttcgagaccaacctggccaacatggtgaaaccccatctctactaaaaatacaaaatgccgggtgtggtagcaggggcctgtaatcccagctactcgggaggctgaggcaggagaattgcttgaacccaggaggcagaggtggcagtgaaccgagatcacgccattgcactctagcctggacaacaagcgaaactccatcccaaaaaaaaaaaaaaagtaacctgaccaaaaatggttaagtagtaatgttattattgattcattagcctggatggcctattttctaaactccacaaatgggttgggaatataccaagtgttaataatcacatctgagctagtctccatctttggagttcacaaccccagaataccctagataaactgaagcataattctggaagaagttctaagaactctgtcatcactgccgaactacataactacattgttagttatccaatgctacttaatttaaaattggatatttgatctcttaatgaatggctgttgtcacatttacccagaattagaatttctcagagctctctggagaaatattggacccaactaatggatttgaagtttcaggaacccagcctaattctaaactgattacaaataaaatcattagatttgttaagccaagaaaaatgtatgatccagtatgtgattgattctgtgtctgcaaatttatatgcacagcgtattttaaaacattgctcttataccatcattttctcaactattttgaacttgtctgcctccattcaattttaagttcatttgagagtatcatgtgggcattacatacttgttaatttcaataataagctcaaatccccaataaactgtcttgctactaatagatatttttctctttaaaagtaaagtaatttcacttgcttctagtcccagggaggctgaggtgggaggatcacttgaaatcgggaggtggaggttgcagtgagctgagattgtgccactacactgcagcctgggtgacagagcaagaccctttctcatgaatgaatgaatgaatgaatgagtgatttttttaattctcctttttttccgaaatcctgtaaaactcttctccttaaagatttcctttaagacttgtttattgtcatgtctaaaagcctttttttaattactaaatttaaactggattgaattgctttgtcttagatgaggctgagaaggttgtttctgaacagaaagtaatgatgacgtccctcttttttgtagtatgtccgtggttcagaccctgtattaaagcttttggacgacaatgggaacattgctgaagaactgagcattctcaaatggaacacagacagtgtagaagaattcctgagtgaaaagttggaacgcatataaatcttgcttaaattttgtcctatccttttgttaccttatcaaatgaaatattacagcacctagaaaataatttagttttgcttgcttccattgatcagtcttttacttgaggcattaaatatctaattaaatcgtgaaatggcagtatagtccatgatatctaaggagttggcaagcttaacaaaacccattttttataaatgtccatcctcctgcatttgttgataccactaacaaaatgctttgtaacagacttgcggttaattatgcaaatgatagtttgtgataattggtccagttttacgaacaacagatttctaaattagagaggttaacaagacagatgattactatgcctcatgtgctgtgtgctctttgaaaggaatgacagcagactacaaagcaaataagatatactgagcctcaacagattgcctgctcctcagagtctctcctatttttgtattacccagctttctttttaatacaaatgttatttatagtttacaatgaatgcactgcataaaaactttgtagcttcattattgtaaaacatattcaagatcctacagtaagagtgaaacattcacaaagatttgcgttaatgaagactacacagaaaacctttctagggatttgtgtggatcagatacatacttggcaaatttttgagttttacattcttacagaaaagtccatttaaaagtgatcatttgtaagaccaaaatataaataaaaagtttcaaaaatctatctgaa

SEQ ID NO: 1906 - DNA, 2300 bp, Homo sapien
tgatttccaaggcaaggctttagaaggcattgtagcttttgctcttttggagtgctgccctgagagtgccatgaaaagaagttggtctagccgactggaggatgagaggtcacacggaacagaaccaagtcctcgagctgacagcaccaactataaacagtggtaatcctggaacctttcggtttagctgacctactaggtcaacaaaaagcataaatgaggccaggggaaaaccaacataggtggagtagttctactccactgacccagaattatgagaaatcattgctgttttaagctactaggttttagggcggttacacagctatagacaactgacagtcaaagacagagggagatcaaaaaaagacaacctgaaatgttatctcgaatgacctaaagatgtgcaaaaacccttaaacagtagaaagtttagggagaggtgatccagtaattcctagcaccaaatgcctgaataacaagataattggaatgttaattacagaagttaagaatctaccttttggttaaagtagccaaagcaaacagccaggatgctttcaagctctttgagaaaggtaagtacaggtgttcatagaggactccggtgtagtcccttaacaccctcaaccttggataagtaaattaaaccaggtctccttattagagactacccgaagaattaagctaggataaaaaaacgtaaaagctttcagcactgtgcctaaaattttactattcacacagcagaacatggatatgagaagaaataagttaaaagtacacttttcccattcaaaggtcacccatctattctgccaatagagaaaaatgaaataaaaaacgctgccttaaagaagacaacgaacatcatttaaaaaactaacttcaaaaatgaattatactttggtatagataactccttttactccaacaacattgtttaaaagcacaaatcgcactcaagcgcagccagccgtatatgaatagcagaggagaacggaagttaagagactaacagaagtagtgaaaatgagagagcacgcgcgcgagagaggtaaacacaaactgttcgcctggaccaacgacttgaagacttgcctctaagagttggaagtctcgtcatgagtctcttgcatttctgtccatttaaaaacaacctccacttcttgccaagctttattattcccccctcccacctggtgtggtttacagattgtttttagcaagagccgtataagagaagctacgtacccaagacaatctgaaatcaagagaaaactgctgctagaaacccaaggcggggaaggagaaggatcaaccgagaaattaagccacgttgcattctggccgcagcagtcattaaggaagcgcagtcctccccacccttttcaaccaggaccgaatgttgcgtctttctcagctgcaatcactcctactctccctgtggcagctgcgaaggtgatctacactcaccgcttgaagcacagtcgccaacaacaaccgtagcccaaacgccggcaccagacacccactcggcccagccgccatcgctaccattttccgcaggtttctggctgcctagaaggacccctaagctaggggcgtccactccagagcctgatccaaaacagaacgctaacggccgttgcccttacatctctcatttggaagtgacaggtattaaataacggcatatgaaagcttaaaagtcatcaaatacaatcactgggtgctttcgattacccaaatcaggcacttgcctaaactccccacttctttacttctgcggtctcctttcttttattcacgacacttcgtcaagcagccaagaagccacgccttcgccagttttagccccgccttcttctccaagtttacccaattgaatgtcgtcttgattgagctctgtggcagaggaaaccaaccgtaaaccgaaccaagagcgaagcgcaggggctcttccgtccaataagcggacccgaacggggggaggggcggggcttctggttgccgagcagcgtacgcggatgcgtgcgcgtggtggcggagggggatgggcgggggcggggatgagggcggcgcagccgcagcgccggtggaggggcgcgcggccgcgagcaaaggagggagggaaggaaggaagagagggaggcgggcaagcaggcgggcgcgggggtcggggactgaggcagtagagggaggcgagagcccggcagccgcttcgcgctgtttgctgcgcgggcttttggagggggcggccgtttagtcggctgaggagaagcggacaccagcggcgt

SEQ ID NO: 1907 - DNA, 2300 bp, Homo sapien
ttcactcagatttacttgatggtttttctttcaaggctctttaaaatgtcaaggcttttgcaaagccttgtaccaaaatagctactatacataatattacaattattttctggtacatttttcctaaaaattaatcatccactcacagtaacatctatttcttagtctaaattacactgctgagggttttttgtttttgtttttgctggcttctcaaaaggtatttaaaatgattttgaggtgagagtatgcaaaaaacacttcacattacttttccatattcaaattacatcctcttgagctgatttttaagtgccatgtacatttttaaatcaaaatttatcactgtcattcttttaactctcgctctccatgctgagctcttccaaatgccaaagtgccctattaatccgaaagtacctattatctgtgcttttttctggcctgtctttcacaacttcacaccaactttttgtactttagaccccctcatccattaaagcacctgttaaccctttaaggtatttaaccatatggttagctttccgcataatcctacttttcctttaacaaacacaaacttcactacataattccccttcagcgttccctcctcttcgaaattcacatcaacactgccgtgaagcaacatacataggcatccctattctcaagccccaattcatcagtttagcgccactaaagaagaatttaaatctccggaccctcatttccgtactccgatgaagctttgcactcgcgttcccgcactacccggccagcctccctcagctggcaattacaaggtcctttgctgcccggagcacaagagtgcaactcgctacagtgttcacatgttgctctccgtcatcccagcatctcctcccatttctgcgcacctatcccttcatgagcccccaaaagaattcgtatccagatgcccatagctcaaattagaatacccctcatctgacattgccagggcttcctgtacgacttccaagagaacacgcgatgctaagcgcttctgtctccggagaccagcaacacacgctccccactgagttcggtcttctctctcgctctctctccgcggaatgcctacttcggggctaccctttggctagggaagcccaaccttgcaacctctgccccgtgacctcgcgagcccagcacgccgctcaagcttaattcaacccattcttggagctcgtgctctcgctgccccttgttcccggttctctttgaaaccgctttcagcccccgagccagaccccaggttagatgaacgcccacttgctccggcggcagcgcctcctcggccccttccacagcactcagcccggggcagttcagttcctcacctagcttcgagcgggactcctccagtttctggatctggttttccaagaagagcatcgccaccgcgaaggccaccaccgccagcagctgcaacttgggcggcatcataatcctgaggagccccatgaaacccgctgctcgggatcaagacataccgcggggggcggggagcgggaccccggaggcgagagagacgccgggaggagcccgccgagccgggagcgaggcaaagagagagcgacagcgagagaaccaccgcagcgaccccccttctcgcctctccagtccccctcccccaggcgctatcaccaacgccgctggtgtccgcttctcctcagccgactaaacggccgccccctccaaaagcccgcgcagcaaacagcgcgaagcggctgccgggctctcgcctccctctactgcctcagtccccgacccccgcgcccgcctgcttgcccgcctccctctcttccttccttccctccctcctttgctcgcggccgcgcgcccctccaccggcgctgcggctgcgccgccctcatccccgcccccgcccatccccctccgccaccacgcgcacgcatccgcgtacgctgctcggcaaccagaagccccgcccctccccccgttcgggtccgcttattggacggaagagcccctgcgcttcgctcttggttcggtttacggttggtttcctctgccacagagctcaatcaagacgacattcaattgggtaaacttggagaagaaggcggggctaaaactggcgaaggcgtggcttcttggctgcttgacgaagtgtcgtgaataaaagaaaggagaccgcagaagtaaagaagtggggagtttaggcaagtgcctgatttgggtaatcgaaagcacccagtgattgtatttgatgacttttaagctttcatatgccgttatttaatacctgtcac

SEQ ID NO: 1908 - DNA, 2300 bp, Homo sapien
tgacctcaggggatccgcctgcctgggcctcccaaagtgctgggattataggcctgagtgcccagctggaccctgtccagtttctgttgtgacttctgaaccaagttcagataaaaaatttactcaaacctgtatagctcaaaaccgcaaaatcttggattctgaagctccactgagagaacttacccacagtctctggttgttgtgagagaggaatggacagaatgggcccagtgggtatttctcttggtcactggctgctcttggggcttgctagatgctccacttcatgtcccactctgatgccatctgttacaaaaaaagactttagacgaatttaacagagtttaattgagcaaggaatgatttgcaaatctggtagcccccctgaacatgaaacatgataggttcagggtgactctagggttcccacatggtcagataatatttaaggacagaaaaaggaaaatgcgtacagaaaacagaagtgaggtacagaaagtgctgtattggttacaggttggtgtttgccttatgtgaacagggattgaataggtagcctcctgtgattggccaagccttgtaattggtacaatagtaggttataatgtatttacacatctacttaggttatagttcactatatccagaaacctttaggctgaacctaaaataggtgaggaggcagcttcaggctatgcttaatttaacaacataaagagcttatatttgagttaaacatactaagcttatatctcaagtatgccacttcctttggtaagaagcttaaactttccaaggctctgttttctcatctgcaaaatggagataagacttgtacctcacagagttgctgtgtggattaagtgagaaaatgtatgcttagtgtagtttggctctttactactcacattaacatattaatagaagaggataaagtatgtacaaaatgctctttctaagaaagaagacacattttagtaatcagaatggcttaaatatactttaagccaagggtccccaaccccagcgccacggactggtactggtttgtggtctgttaggaaccgggctgcacagcaggaggtgagtggcattatcgcctgagctctgcctcccgtcagatcagtggcagcactagattctcacaggagctgttaaccctattgtgaactgcgcatctaagggatctaggttccactctttaagaaaatctaatctgaggtagaacagtttcatcccaaaaccactcctcccactccccattccaccactacccccacccccaaattcccccactcctccacccctgttctgtgaaaaaattgtcttcctcaaaactggtcctgctgatttaagccttaaaaagagtaggttttaacattctcatcttgaataactcatgcgctgaaaatttgggttacttggagtttgtaacactttaattttctctttcttttttttttttgtgtgtgtgagatggagtttcgctcttgctgcccaggcctggagtgcaatggcatgatctcggctcaccgcagcctccacctcccgggtccaagagattctcctgcctcagcctcccgagtagctgggattacaggcatgcgccaccacgcctggctaattttgtattttagagacggggtttctccatgttgatcaggctggtctctaactcctgacctctggtgatctgcacgcctcggcctcccaaattgctgggattacaggcatgagccaccgcacctggcaaattttttgtttcttttatgcaccgtataggggaagaaaaatatctttttcttttaccagtcttggattcattggctggggccctttacaagacagatgcacaagacaaaaccgtacaaatttagttaacgtaagttttatttgacacaggagccttcataaggaaatgaagacctgaagtagctgaacctgagtgtttttattctagttttgatgaaggggaagattgtagaagaatttaataagataaaaagtatgagctaactgtaataaactgggggaaacttagcaaggcctgtttgttcacattcttcttggcgtctgtgtctatgttcctttcctcccagtgtggggagggtacctctcacagaagagtcttatgactggcatcaggggaaggtcaccaagtctttcctgtacatgctgtttatcaaattcattcatctcgaagtattcagtatgccaggtactgtattttggggtagcatgtcctaaaccctcatcaactgactttcatttcaaaagcttttaaatcccctgtgata

SEQ ID NO: 1909 - DNA, 2300 bp, Homo sapien
tacagttgtgcaggttacctggagcctgggcccagtgggtgctgacatccagctcatctcctactcaccacgccttgctccttgctgtagagctgcacccactatgaggagggagaacctttttctgacttgaacaagggagtcacatggccttgcttggaggctgacagtgtgcgtatggcgtgagtgggagggatggggctgcattcttctttttcttagaacacagaggtgttgtttgggcaagtggtagcctagaactgaaccagtagatactggggatgcaaacctgaacaagactctcattcaaagagctcacagtaccttgaggaagcagacagatatacagagtattctaacacgtggggacaaggtgtacaggacatctctatgggtacccacccagatgggactggacagtggggaatcagaagctttcttggggatgatgtctaaatgagtcttgaaaagtggaaggggttgggatgagggtgtaaagagtgagaaggcactgaaggtaaacagaactgcaagatcaaaatcatggaggatgaaggagcatggtccaagagctctcagggaagacgtggagatcctgtgggggctccccacttcatgttgttgcagttgaagacattttcaagtatgagcagttattcaaatatgaactaagcgggtgatacccattcccttccccagtgaccaagactggagggcttgagaactccaagttcccagcatgatgcttggcgtttgaatgctactttcttccccttcctcacttcctcctgccctttgatttttaatatgaaaacattttaatatgaaaacataaaatatatacatctgtgtatctttcataacattcaaaaaagagctaaaaaatgtgaagtgaagggtaatagcatgatgctttggccatggtcggctccccatgattttgtgtccccgcttctgggctggcttcttacagcggattgcagctgtgccccagcaagaagctggcctctctggatcaatcactccagaagcgcagaggaaaggggagcttgcctcagtaagcaaaagtcaccattatctgattatctttagggattccctactatctggatagctagtcatgactagagaagattctgcatggagacaatatatcatttatttggcttttatttttactgaattcagtgctcatggaaagtggcacattgacaacgctgcttcctagcatgacatcacataaataagtttgaagatactgcttaataagaaccctttaaagataagagaaatggtagaaagaattgaaggatgctgtttcctttttaatatctgccatgaatcatagtccagagagaagacagccgaggcatgcagggacaagacactagcacaggggtcaggagatgggcattcacagtgggtacagctcagatccctgcctttgctttggcctgaggctgggcagacagggacatggaaagctatggggctggtctgaagggtagggtggggtggttaagcctttgctggcacatggctttgcaatcttgtacactgaataaatccatcagagcactgcatccactcacccaattagcctgcacctcatgaacacctattgtgaggccagcaccatggggaaactgaaagaaccagatattctaccaccatggaggaatgacctcaccctgggtagtaactcttcccttctgctcatctacccaaaggtaaaagaaagtgcaagtttcctagtttacattgtgtttcttgagggagaaaaggctcttggtaaaacaatgccttattcctttcgtttggaagttctttctgcagaatacagctcaactgggggtccccaaaaggcccctgaataatttaaaaaaaaaaagaggtggtgtcaggcaagggctttaggacgtagaaggtcacttttggttgttgtcctgttgatccaactgctttactaactggagctattgctcaagctggagggtgagggaatgggtggggctgaggctgggagttgctcagtagttgaccccaagtgatcttgtttgaggaaaactcctgtgatcccccatcagaatattttgaaagtggaagagtctgctggcgggaagggagaagagtgggaggaggaaataagcaacaggcagcttcctttcttgacagatggaaaataaagggcctgtgcacagctcggcgaactgctccgtggacctcccagcggggctgctttctgaggtgatggtctcctcgctccttagccagcctggtggagccagctactgacgttg

SEQ ID NO: 1910 - DNA, 2300 bp, Homo sapien
aataaagggcctgtgcacagctcggcgaactgctccgtggacctcccagcggggctgctttctgaggtgatggtctcctcgctccttagccagcctggtggagccagctactgacgttggaaaggagttggaggatggaggtttgtggccggcaaatgagaggtgtcggggagggagaagagaaaagcaagcgggctgaggaaaaatgtaagggagggagatggttcttcgatgaaacctctggcctcttttaaaccataaagaggtctggctggtttgattccagtccataaaatggctcagtaggatcttagggattatttagctcaaacccctgagaggtgaggaaactgaggcccagaggtcccacttgcctttggtcatggggtgagtatgtagcccagcagggtcccagctcctgtgagctgcgattcatggtgttatctttgctggggaggcctgaagttcctttagcttgtccatgtgaaacagaggaagagcccacaaggaacgcattcatctcagagttaggtgaccttggctttgggatctagttgctcattacttccactttccttgccaacatctttcctaagccttccagatcagggcacagtaccactcccttgctgccagacaggtggcctgtcgtgtgggcaggaaggggagttcaaggcaagcaaggcccactgtgaaccccctgctagaagtgctctccccttccttcttttggaggtggcagttactaggcagcatgacccagaggaggagataagctgcctctgataggaaggttttatctttgaggttattgcaaatatgcctgacttcttcatctggttctgtccggatctgaactggtagccagataaactgttggcggtcccatttcatgtatttatcaagtctaaacaattgtcaggaggcaattatcccccaggaagccaatggcagataaatagtgtcccgcagtctggttccagccatggaatctgtaagttgtccctccttgccctgtgcagattttctcctctgtccctgctgccctaaattttaaaggaggtttgatgttccaacacgtttgctttggtgttctttgcccacagccccaaataaaatctaatggtttttataggtggataaatcctttttaaaggctcttttgttatcaccatggggtttgtgagcactaaaactggattttaagggatcagtgaaaccttagaatcacggtttgctgtatctggaaggaaccatgaccacttggtacagacccttcaagcggtagatgaagaggccaaagcacgaagggatttgatggcttgtgaaggcaacgtgctcttcagagtcgggcagacgtgcagctgaagcttggtctggccactgatctgctgcccggccttgggtaaactcctggagcccctatttccttattgattacatggagataccaatccagactgcacagtattgtgagaggtagtaaaactgtttccctctggtcgaggtcaaacagacaactggggggcagagctaatgccagaaccttagtatcctggctcccaggtctttatcctttccattattctgcaggaggtcttcaggctactgttaaataaaaagtaaagcttctacttcgttccacccaaaattctagttcagtgtttcccagacagagcacctccagcgggtctgaggctcagttctatgtggagactcatgtttatacgatgacagcatctatattttttctggatgaactaataatcgactggccattgtatttaggaaaaaccagacatcacctcatggacgtctcattgaaggggaccgtcagttattccattcattctggcaaattttctttttagctttggttgcagcaggaagagagagacgtctggggggctttttgcctgttggaagggcatcactcgtccacagctggagcccctgggatgacccatcccaaggtcccagcctaagtctgaggttccagggctggtcgcaggccgtccttgcagccctcgccagagcgttgtctgcacctccgacactaggtggcgccataggaacatcctcgcggcccgaggcgcggtcgcagccggggagcactcgccacggtgctgtggaattctctggtttttcacgcaaggtcaggcgtcctgctggcgccctctcgccaccctgccctcccgtcagaagcccggctcctcgccggggaaggccggatgctggcccgccgggacctgggacttgtgccacatggagtgtcgggagtctccattgccgcgagttct

SEQ ID NO: 1911 - DNA, 2300 bp, Homo sapien
actaaaaccacctcctaaaatgtaggccctgtagcctagagctctgttattcaaagttttatccatctcactctccttccttccacaaacaccaccgggatcctctggataatcactcaatgatagctgaacatgtgtctggttaaatttctaacatttccttcaggaattaagatttcgttttagtgcatattcttcaggaaaaatcctgaaaagtaccacaattcgttatacatctatgcattatgtgctctatctaagaaaatcatttttaaaaagaaaaaataaagaccatttggcttaattctctcatttgtggatgagaaaattaaggcccagagacggaaatttacttgcacatgacaaatcataacttaattgtagcccactaagatcttgtgtcatctccttttattataaattatttaaaaagtgaaaatgaaccaggggattcaaatgtattatttgtttatggtgttcctctcctcatctggtttaattgagttttcttgactaaccttcaagcagcattacatcttttctaagttggtcctctttaatcatgcccatctgtagctgttttctgtgtaggacattttaattactattatagttttaatgacttttttttaaaaaaagttttttatatgtgcacaaggtgaattcatcatagcagtgcaactttaaatacaaatcaataaaattaattcatttaattttaaggtgctagaattaaaaaatgagtatttgaattgatatttaaaatgccctctacctgactgtatgggcaataattattctttcttatgcagccttattaattttgatggtttgaaagacagaaatcccccaaatagacactaaaaccctaaatgttcaacatctgcattgtctcgccagattctccttcaggttcctttcctcaatctagcagtactgtgtgtaacacaatatgaaaacttgccccacaaggctggttttacttaatgatacttagcagaagggctttgcactttcatgataatttccaccagaaaaatctctctggaacttactaacaataatcaggcctaatattagcctcagtctggagatttatttaacctatttggcagagtagataaagtcgaatgcctaggtattcaagcatctaggctgtgcttcggccttggaaaaagactctcaggctagcaccctaaaagcattcctcaaaacttgatttatactagaagtgacatttcttactctctagaggctgtgagattgcaaatcttgcaattacttccattgcttttgggggctgtgagaatttccgcctctcatcctccacagtgaggagggtagtcgggaaaggctttctcccttaagttttcgtcaactttgaaaataaggactgtgctccctacatcaccagcaattgacaaggatccaggaaatgcctgctaggcactttcaaactcggaaaaatgggagtatgagggaggctaagtaggcagtatttagctagcaactattatttcctttatgtttctaccttgttaactaagcttccactacggttcataaatctccaatatcgtgaattaaagaaacaacaacaaaaatcctcttctgtgtgcttgtgcgtgaggggatagaagtccactgccctaagatgcaggacttatcttcccaaacaggaagagacccatttctgagaaagatggtaagtttcctaagggtctcctctcagatagaggggatggcagtccccgaggggcgagcgggcgcgggtcctcagggtccccgtgcgctgagaaggcaggtgaggccccgccctgcgtctcgactccggatcccgggtcgcgaagggcagcccaagcgggtccccggccccaggcgcccgggtcacttcaccccacctgattcgggcccttcccttctcctctgtcggccagctctgccgcctcgctctctctcccgccccccgagtctcgtttcagtcatccctttgtccttccccggattggcaggttttattattccgcctgaacaatccggccgcccagtggctgagggtcgctgacgtcggaggcagagccggggagtagttgggattttgctctgtcagtaacacatgtgtaagagccgcggagggagcgagcgagccggctagaggccagcgccgccgccgccgccgcctccgagccgggcagcaacagccccggcagcggcgcaggctccagcgcgccgggcccggccggccgcagcccccgacgcctgggtgcgcctgcctgccggcctccgcaccgtccgccgcc

SEQ ID NO: 1912 - DNA, 2300 bp, Homo sapien
actaaccttcaagcagcattacatcttttctaagttggtcctctttaatcatgcccatctgtagctgttttctgtgtaggacattttaattactattatagttttaatgacttttttttaaaaaaagttttttatatgtgcacaaggtgaattcatcatagcagtgcaactttaaatacaaatcaataaaattaattcatttaattttaaggtgctagaattaaaaaatgagtatttgaattgatatttaaaatgccctctacctgactgtatgggcaataattattctttcttatgcagccttattaattttgatggtttgaaagacagaaatcccccaaatagacactaaaaccctaaatgttcaacatctgcattgtctcgccagattctccttcaggttcctttcctcaatctagcagtactgtgtgtaacacaatatgaaaacttgccccacaaggctggttttacttaatgatacttagcagaagggctttgcactttcatgataatttccaccagaaaaatctctctggaacttactaacaataatcaggcctaatattagcctcagtctggagatttatttaacctatttggcagagtagataaagtcgaatgcctaggtattcaagcatctaggctgtgcttcggccttggaaaaagactctcaggctagcaccctaaaagcattcctcaaaacttgatttatactagaagtgacatttcttactctctagaggctgtgagattgcaaatcttgcaattacttccattgcttttgggggctgtgagaatttccgcctctcatcctccacagtgaggagggtagtcgggaaaggctttctcccttaagttttcgtcaactttgaaaataaggactgtgctccctacatcaccagcaattgacaaggatccaggaaatgcctgctaggcactttcaaactcggaaaaatgggagtatgagggaggctaagtaggcagtatttagctagcaactattatttcctttatgtttctaccttgttaactaagcttccactacggttcataaatctccaatatcgtgaattaaagaaacaacaacaaaaatcctcttctgtgtgcttgtgcgtgaggggatagaagtccactgccctaagatgcaggacttatcttcccaaacaggaagagacccatttctgagaaagatggtaagtttcctaagggtctcctctcagatagaggggatggcagtccccgaggggcgagcgggcgcgggtcctcagggtccccgtgcgctgagaaggcaggtgaggccccgccctgcgtctcgactccggatcccgggtcgcgaagggcagcccaagcgggtccccggccccaggcgcccgggtcacttcaccccacctgattcgggcccttcccttctcctctgtcggccagctctgccgcctcgctctctctcccgccccccgagtctcgtttcagtcatccctttgtccttccccggattggcaggttttattattccgcctgaacaatccggccgcccagtggctgagggtcgctgacgtcggaggcagagccggggagtagttgggattttgctctgtcagtaacacatgtgtaagagccgcggagggagcgagcgagccggctagaggccagcgccgccgccgccgccgcctccgagccgggcagcaacagccccggcagcggcgcaggctccagcgcgccgggcccggccggccgcagcccccgacgcctgggtgcgcctgcctgccggcctccgcaccgtccgccgccgctcccggggctgttgtgtctgcgactgctcccggccggaggtgcagggagctcagccgagccgccgctgccatcccggagcgagcaagcgagcgagcgcgcgggagggaggaaggcggcggcggaggaggaggaggagcgggaggagcgcgggcgggggcgggggcccccgggcgggggaatatacaaagtgaagccacattgccaaacttgcagcagcgattgcagcagttgctgccgctgcgccgcgcctgaagccgcgccgcgcgggccgagggctcctgcagctgctcgcgcgcagtcggaggcggagaaggacgaagactgagactgacacttctgctcccggccgcccggcacttacgcgggggccccccaacccgccccagagcaacgcgatttaaaaaaaaaaaaaaagccgcccttagccccctcctcccctttcctgcttctgcgagaactccctccctccctccagctccgccagcccaggcgccccttccctggaagcc

SEQ ID NO: 1913 - DNA, 2300 bp, Homo sapien
gattttaagtatgagaagtagtgtgtttgggggggtgggggtggggatagtcacgataccccccctcccttctagtaaacactatttttgaaacagtggcaggaaggatctaagtgagcaggattcggtattgctggttcttttaaaaaaattcttcttggcttataagtcttttgttccaatccaggagaaatacggtgaatcacctaattaaaatcaagacatgaattaagcatccatttttgtactacaaattgccagcgttacgtttgtccctcccttggtctccattaaaaaacaccagagacgttgttaaaggggggcagattttgcctctagctgccagttctgctttctatttcactgactatcccaggacctaaattgcttggctatgtaattactagagtataagcctatttaacttaaaagctttcttttttttttttttttttccaactctaaatgaaacttgatgagggcccgtccttagttatcaggggagtcagtttctggtcagtcttcttgattcatctcttttagatttaatcagcattaaggtattgcttgtccttaagagctttagctaatggggttactggatgcttttctcagtgtaatgtttccttttcaaaaaaaaaatacatatatatttacctctcactaaagatgggggcggggaagagcttggaatctcctccctcactctccttttaaaaaggaattcggagcgattaaaacgttgggggaaacagtttaaagatctagggcaggaaatgcagattcatttgggttagggctgaaattgtaacaaaaagcaattcctcgagtaaatgcatcagataaatcaatttacataaaggtatgatgcattcggataaatgcaatgctaatgggttttagagtggtcctgtttccaaagtctcagggttttgttacagcttaattggtgcagttcttattctggtttattgtgcggtcactggacacacgttccgggactctttcggaggaaatgtgtttaaaatcggcctatttaaggaacccgagtccttgtttcgttccttcctcgttttttttgcagcagccaagttgggccgggtacaggcaaagttcgccttcttctgaggtatcagctgaatgtcttgagcagatagccgggagcctcagggggagcccacactctcagcttacagaggacaaagacaatacaggctgcttaattggcagtaaataacttgatctttttacagaataagtgactagaggaacactaggactttattggactcgggattgaaggcaacaaattaatcggtttaggctaagctttataaattgattcctatattatatcccagttgcatctcttgtggcattcattagagtggggaattcttttttaaagcagtttttggtgacagcaggacgggctcgaatttaacttgtgcatcccttaatggtgccttctcgcacattatctgtaacgccgcccgccccccccccccccccgccctttggaggaacaaagctttagcatttaaattgctgatcaagggcagattagtgagaccaaagtggagagtgtttgtataggaagttaacaggcatcctaaagttcaatgatctattattcttgcctgtgtcctgaaaacccagagaaaacactcattgatcttcaaaatgaaatgagatttggaacaataatgggagatggcggtcaccacaatggcatgtgaaaggtgctgcttaaaatacgaaaaaccagtttcgcaactttacacactgcacccacccctcccgtcaccttgccttccctcccatcaccacgctctccgtctcccgtctgccggtccctccctcgttccctttcggaaaaccgaactatttccaacttgtgaactgcagctgcacttcccggggcagaacccgggagggaacgaggctccggcggggccgccgcctccccactcctctcggctctgtcccggggcccggcgggggctggggaggggccgggcgcggcggtgggtgggtttgaccctcatttgctggaggcgggcggcggaggaggggaggagggggcagtgggcggaggcgggggctgggaggaggtgccgcgaggggtggagcgcgcagcggagcctgctctcggagttttgacagtaccggagctgaaattgtcagcggcggcaagcgcaggaaagttgagaggagctcgtggccccagaacaaagcttgagaaaagtaaacaggcggctgctgccggcgagcctcccttcttccctctccccctcagc

SEQ ID NO: 1914 - DNA, 2300 bp, Homo sapien
atactagataattctagtataggagtgatggaagttcattcagatgaaagttaatgcttctggcaacagaatgatagaggtacttttaagctttgagagaaaaatgtaaatttaaatgtgtctgttaaaagtctaagaaaaattactaaaagaatagaaatcctaagtatatattccaaacaaatgggagaagacaaaggaataaaccaaattcaatcaaggctgggctagatggctcacgcctgtgatcccagcactttgggacaccgatgggggtggatcacctgaggtcaggagttcaagaccagcctggccaacatggtgaaattctgtctctactaaaaaatttgccgggtgtggtggcaggcacctgtaatctcagctacttgggaggccgagacaagaaaatcatctgaacccaggaggcagaggttgcagtgagccgagatcgtgccactgcactccagcctgggtgacaagatcaagaccccatctcaaacaaacaaacgaacaaaaaactcaaccccaaaatagcaagaaaggagaaaaacaaaataaaagaaaaacataataaatagaaagcataaaatgaaatatcaataataagtcaatacatgtagataaattctcattgtattttgagaaagaaaccaggtacaagtctctgagacaaggtcaactatcaagaaatataattgaaaagagccaggggaaacctgaggggcttctggttagagatcctccattttcttcctaaaatgtaatagagagagtgaggcgggcaagagtagggttgagacttcagggatggggtgatcttgccaaccgttttgagtcaaaagtaatagacccattgaaggtaactcaagtaacaggcagtctatgtaaataacagaggaacaaattgtcaaaagaaaatctgattgcctcactgggatttgggcatcaagtgtctatcttttgtccaaatacctgtgtcagggttggggcaggggatgggttacacactgaagaatgtagctacctagaggacagttcccagagcacattaggcatgcccaccaaacctgtcttgtacaaacggtaatagcctaaaacagtgtgtcagtaaggaatagaaatggaagtctactagagtcaaggaaaagggccatactgagaactcaacttaaaactggataccataaatgataagtggaattaacagccaaggttattccattttctccagccaatgacaggaacggatgaagttaaagattgggggtgggagggaattaacaaggtagtaggagaaaccaccataggatcctgcccaggtaggatgggaaataaagcccagaaagggcaggaggactgggagagtagacagggtcaaaggaatgactgtgactctgaggcttggtgggagcagcctttgcaggagagaaggaaaggacaaggtggagagtaagagatggtgactagggacgggaatgctgctgctggagttttcaaagcagaagcagctctgggtgtagcagaacagacaggagaccaggaagagagggactggctgagagccggatggaagataatgtaatcagaggtcatgaaagtggtgaacagccagcactttgggaggccgaggcaggtggatcacgaggtcaggagatcgagaccatcctggctaacacagtaaaaccccgtctctactaaaaatacaaaaaattagccgggcgaggtagcgggcgcctgtagtcccagctactcgggaggctgaggcaggagaatggcgtgaaccccggggggcggagcctgcagtgagccgagatcgcgccactgcactccagcctgggagacagagcgagactccgtctcaaaaaaaaaaaaaaaagaaaagaaaatggtgaacagaaaccccaaaacacagacataaactgctttctgggcccaagacccacgttaatgaaaattaacagccttaaaatttatcaatgggtcctgttgcttgcaggatggaattctaactcctcatcacataagacctttatgatctttcagtgtcacctcatctcccagcacaccgccacccaggcccttcactcttctactgaaccactttcttccatgtgcacacgctgatttctcaacctggaatcatttccctacacctttcctcaaaggactgttaatgagttttcagaggtaagccctattcctctcctctggagaaccttccctgagtgcccagtctgagttgaatgtcccccttcccactacccaatatctccccctgaactccaggcatctctgtcaca

SEQ ID NO: 1915 - DNA, 2300 bp, Homo sapien
ttaatctcttatcacagaatcagaaatgtacctgctacatactggtaaattagttatcaatcccttgggcagtatattttaatatcagtattctagggaagatgatataaatcttgtgtacagtattattagcttaggcagctgctgacttaaaaaggccagtttaacaagtcaccactgtattatgtttaattaggtacagtttatataatgaggtgttcagttctaatggaaagacatgctgtgagcagcacatctgcaggaataactattagaatcagcattgcagagacccatggaactgcaaattagacttacttatctagaaataaattacatcccaatgccttcataaagctcattaattaattccactggcataaaggtctttttcttaatttcatgttccattagcataataaacacaatttgagttacaacagtatgatcagtttaatggatgctatttattttagttttttatttaaagtcccggtaatgtagaattaacatcaatatgctgcttggtcctttattaaaaattcccataggataaccaacacagatgttcaatacagcatcatatatttgctgcattttacgactgtactaattggccatatggaaaggtgttgcttgggtgtaatttttaaaaaaaaatatgctaaattatatggattgtaataattacaattagtttatatgtaaagttggataggttaatacatattgcctgttgcaggcaaaataaaagtaaacaaacttttgatgttgtgtaaatacaggtttgtttaaaagaaattttgttatattttaaatcctgttaaaataataaataaggttaattgaagcctgcatagtccccacctgaccgtggtttggggctgctatctgcctcataaagcaaagtgtagggtttgtcttctccgaaaaaggcctcctacatattgggctttgtcatttgccaaaaatagaagggaagagattgaggcctcctgagtctgagttttcaggtgaggtcatgagagaagacagggattgtaaccagagaattcagactgggatgtagttaactctagagctcgtctctgttaactcagtctggccttcatgacagttgtagaaatggattccttaataataataaaaaataacttcgtatcccccaaataaaattataaataagtttaacttagcttacattctgaaattatataaggtctctatttgtgaattgtgcatttttagacccatttaaaaaaatgaattctgttcactttgttactatgtatgactttaacgtatttataatgttcgtactatgaaattctaggttaactatacttactaacatctagtatgcaattatcatatgtattttttaagttaactcatatacagagttttgttaatgtcccaaattatatcttattactcaaaatacattgcaaagtacacataaattttcctttcttcattcacaatatctttcctcatgtcatattttccattttgctcagtgtaccttatctgctataaaatataatctgttttctttattatatttttactcgagtaattatctattttcaatattggatttatcttatatttctgtataggttcctatcactgtgtaacgaattgtcccaaaacttagttactcaaaacaacaacagtcatttattatctgttgtgttttctgtgagttggaaatgtgggaagggctcagctgggtagtcatttgggatctctcaagcaactgcagtcagatgttggctataggattgtgttgctctgagggcttgatttaaccagggggtccaaaatttcaaggtggcttattcactggtgctgacatttggccatcagccttagtttctctgcatgtggacctccccacagggctgcttggatgccctcatgagatggtgactggcttcttttaaagcaagcctgtccaacccgtgactcatgagacacatgtggcccaggacagctttgaatgcagcccaacacaaattcgtagactttcttaaaacattattaacattatgagatttttttgtgattttttttttttttttctcatcagctgtcgttggtgtattttatgtgtggctcaagacaattctttttcttccagtgtagtccagggaagccaaaacgttggacaccactgctctagagtgagagatccacgaggctaaggcagaagctgaattatatattatgatctggctttggaagtcacacatcaccagttctatcctttctattggtcctataggccagcccta

SEQ ID NO: 1916 - DNA, 2300 bp, Homo sapien
gagggtaattacccattgcagtagttgaaacttgagttctgggaaagctgagggctcaagtattatggggtcctaaataacctcgaaaggcagtctagaccacaaggactgcaactctcctactgggttcagacacagtggacctaggggacttgtgacttgctgagacaccagctggggaagttaagggagtggttgtgccatcactcccacaactccaggcaacacacctcatggctccaaaagagatcccttccttcagctcaaggagagggaagagtaaagaagccttttgtcttgcatgttggataccaatatggcactggccagagttgtaaagcccccattcctcaccctagctcccggacagcatttctagacacaccctgggccagaaggaaattcactacctagaagagaaggacccagtcctgacaggatccatcatcttctgacttaagagcccttgaaccctaaaaaccagcaatgatattcaggtagtatgtcgtgggtcttaggtgaaactgtaagacacactggcttcaggtgtgacacagcatattcttaactgtggtggctacaatgagagataccttctccttgacaaaagcaaagagaaaagtaaagaaagctttgtcttccaccttaggtaccagcttggccacgatggggcagagcattaagtgggcttttgggatccctgatttcagtacttggctcttagatggcatttgtggagctcccctgggccaaaggggagtcaactgccctgaagaatgagtcccaggcctagcggcattcaccataagctcactgaaaagcctgtgggcatcaagtgaacattggtgatagcctggcagtactccccatgggaccttggatgtgatggctatggggtgaggctcctctgcctgcggaaagtggtggaaagagtgggaagaattacatattatggtttgagaaccagctcaagcacaatagaatagaacaccaagcagatttctaagatttttaactccagtccctagctcctagaagcatccctgggcccaactggggcctgggggaacatgctgccttgaagagaaggatgcaaacctggctggcttcaccacttgctgattgcagaggcctaggccttgaaggaacaagggtggtagacaggtagtggttacagtgggctttgagtgaaatccattgctgtgctggtgtcaggtctgacccagtgcagtcccagtggtagtggccaaaagggtgcttgtgtcacgtcaccacaagccacaggtggctcagcatgaacaaggagacaccatttgtttgggggaaagtaagaaaagaaaacaagagtggctgcctcttcctgataacccagagaattattccagactttatccaagaccaccaaggtggtacttctacaagtctgcaagaaccacagtgttactgggatttggtgccccctaatgcagacacaacttagatcacaacacccaaatcctttcaaatatctggaaagccttcccatgaaggaagggtacaaacaagtgcatactgcaaagactaaaataaatacctacctcttcaatgccgagacactggtgaacatcagcaagcataaacaccatccaggaaaacaagacctcaccaaacaaactaaataaagaagcagagatcaatcctgaagaaacaaagatatgtgacctttcagacagataattcaaaatatatgttttgaggaaactcaaagaaagtcaagacaacacagaggaggaattcagaaatctctcagataaatttaattaaggaaattgaaataattaaaaagaagcagacattctggagctgaaaaatgcaactgacacactgaagaatgcatcagattctcttaatagcagaaatgatcaagcagaagaaaaaatcagtgagcttgaagacaggctatttgaaaatacagttagaggagacaaaaggacaaagaataaaaaagaatgaagcacacctaaaacacctagaaaataaccttaaaaggacaaacctaaaatgtattggccttaggagacagagaaagacattgagctagaaagtttatcctcagggataataacagagaacttcccaaacctacagaaggatatcaatattcaagtagacaaaggttatagaacactaagcagatttaacccaaagaagactacctcaagacatttaataatcaaaccagcaaaaaccaaggattctaataccagcaaaataaaagaacaaataatatacaaaggagttctaatgcatcagggagcaga

SEQ ID NO: 1917 - DNA, 2300 bp, Homo sapien
ggcagtcctcctcagagcctcaggaggggtttcaactagttgatggaatcaggtagaagaagatattaatttatactgtgtggggtaggggtgaggcgtgggaaaacatcttgtggtagagtttaggataaacctagacgggcatccttaaccattattgtgtctaataaactgttctcaaaataatgtttggaatgtataaaataaaagagaaaggattataattgaaaccaattgtatcaaaatagctcttgaaatataaaaaaaattgtgatataataataagtacacttctttattaaggcattaaataaaaaatttcatttgcaggtgtaataactattgtaattttaaagtagtaatgagcgtaaataataattcaagatatctgtaatgactataatgtgatatggatatatctgtgatttctatttgtgacaaagtcttatgtacttctaatattttcaatgtttgttgcctagattcacaataaaaggaaatactacagttcagttaggagttagcgaaaatggaaatgtaatttttctcccatttaaatcacaaatctcttaattttacctctggacccttgggggtctatggagtacaggttaagaaccactagactagaggatgaataggacattgatagggaaatggagaagaagtgtgagaggggttctaccagtatagaacaacgttgttggggatggggcagcaaagggcgtgtttgaggagtagagaggtatgtctagagggtgtgtgaatggagtgtgcactgtggggcagtatgaaaaaatgatggatgcataggaaaaggagacatcatggggctctctcagaggcctttgcatgccagaaggaggaattgcaccagtgaagagccatcagtgttgtctttgagcaggaaaccgacataaatatgttgttgttttaggaaagttatttgcagcataatgggagttgtgttgaaaaggcttgaagcgggaagcctcttagcagcttattacattggtcaggagaaatatattgagaacttgaactaattcagtagaagtgggaaagagaagaggtaagcaaaagaccgttgataggcagactgaaaggatttggcaacaggagaatagggtgggggatgcaaaagtagggagaaaagctgattctaagtgcttaacttgtcatacagggatgatggtgaagcaatgaaccaatacagagaacacagcaagaagggtaaatttgtgacagaggagtaataaattctttttgggtatattgaaagttgaggcattcatgaacttttcatgtggaaatgttcagcaggcagtgaaagtgaatctagaatctggacaaaagttcaagaatggaaatgcagatttggtaatcataatgagaacagctgaaatcaagggagtgaaagaaattgccaaagaagggcaaaggtgctgaagactgaatgttgtttgacttctcggctgtgcaaaatgtttcaagaactgcttggcaattttgcacatttagtccttgtttctttagttgcatgaagtgaataatgtgcctattatgtttctgatactctgctttttcaaagatcaataagatattggcctgctttcaaggaattaatattttgaatagagaagctgacatatgaacaaataaatataattaaacacaataatagaattaggtacaagtagagaatgatacagagaagggcaggattaacttcaactggggtgggagtaaggaaggcttcctagagaaggtgaccactgatttgggttttgagagttgaatagtagtttgccaagtgggaaaggtgttttaattagtggggatgaactgtgcaaaagactggtatatccagtgaactgctttccttctgttgtttcttgtgactaatccccaacttgtgttatacaagatttaaatgtttgcaagatctgaaatcctttctctctgtgagtagcgcctctcctcatcttaatgttaaacaagacccctcaaatttggccatgaaactattttgttcttgatctaatcttttaagttgaagtttaacttcattttttctggttttgttctttcaaaaacgaagataattctgtaatcatcctctgttgaaaataaaggtctacaaagtgtccggtaagtacaacattaaaaataatggcatgtttaatggaacataatttatccaaagttctctgtttgctagccctttttttgcctctggattatgttcataataatatgtattctttcatggaaattaaggcttgttggggcttatgttt

SEQ ID NO: 1918 - DNA, 2300 bp, Homo sapien
tggcttccccaaagaattctccagtcaccccaaggataagtacctttttttttttttttttgaggcagtgtctcactcttactgcaacctctacctcctgggttcaagcaattcccctgcctcagcctcccgagtagctgggattacaggcgcacaccaccacgcccagctagtttttgtattcttagtagagacagtttcaccaagttggccaggctggtctcgaactcccgacctcagatgatcggccagccttggccttccaaagtgctgggattaaaggcgtgaaccactgcgcctggccggataagaactcctaatcctttctgtaactccaaagcctaggaaaccatctggcttttagttaccagtaaaggtaatcatatcccggcctttccaagtgttctttcatgtatttaattatcatcttcaaccaaggcaatatactagacacataaatagttgtaagacttgtgaagtacacaccagaaaaattctttatcacacatatgataagttagagttcagaaactgtggccacagaactccagatcttcaatacatgtttgctgaattgatgtatgagacttgagaaggcaaaaggatagacgttaagtcctggcatcaggccaacagagttacatggagcgtgtgagaagtacataatgttacacttcctaagaaatatgtcaacgaatgccctttctaagtagcaacgtacctaaataacccttaccactctctccaggtagttttaacaaaggtattgtaccgcagcttcaaaaaatcaaaagttacgcgtttacctatccattcactgctcagacaaaacaaaaacaaaagctacctgtaggagacttcgaaattccttaataccatagtgtcattaaaaacaaacacctagatttactttacttagctatattttactaagtagtcaggttagctttaatgcttaccacgccaaggaaaggtggcttttttcctttcccgagggtaatcccgtcccacctccccctcccttaaataaagttaaaacaacccaaaaaaacccagctaattctcagctctgtacagttctccagtacaagcaacagtagttcaacctcaagaaaaagacatcttaaaggccgtacattaaaagttgccagggatccagccgcttacatttcatgaaaagtacagaccatacccgtttagctagctgtgcaccttaactggtcgagaaggcgcgctgggggctgggtttgagggtgagcaaaaggcaagattattagtttgggttgacgtgggggtcaaggggagagcagaggaataatctgtaagatctgagtcccgaagctctttgggttatggaggttagaaaagggcctgttaaagttaggcccaagtttcggcaaggtggaactgggaaaaaaaaaaaagaaagaaaaaaaaaacgaaacccgaaaaaacaacagcgagcaggctcccgagttctagcgttcacagtgaagccgttaaacgcagcaggaaagtaggcgtgtgttttcttcctcttcccgcctccccagagactcgagcccagtcctttcccctcattttcaccccagccgagtccaatggctgccctcgccgcggagtcgggtcggaagacgccccgccccctcgccgcgttcgccctagggaacccctccgccccaccttccctgcccgatgaggggcagtggctgccgccgtcacgtgtgctggcagccgccaagtgaggccgcttttgcgacgcggtgacagccaaatggtgcgacaggaggagctgcagccgcggccgcagcgcccgcacggagaggcttgaggcggctcctggcgtcgcccagagggagcgactagacgaacagtccggtgagggcggcgagaggaagcccgctacgagtgccctagctccccgccgctctcgatgaaccggacggaataagccgcgcctccagcaggggctgcgcctccatgaatccctagttgtttttttttttttctttctctcccctctcctcacccccaccccgagccccgtcccgccttctcccttcgccagaggcggccgcgtccaggtgcggagtccataccggagcgcaatggcgtccaaccccgaacggggggagattctgctcacggaactgcaggtaagggccgcggccctggtgagaggcgctggcggaggagacagggagagagccccgcgcggcgtcggggaccgaggaaagccctgcggccgccgcgcccctagcccgctaagtgcggaaactccgggatgtcactcgggaaat

SEQ ID NO: 1919 - DNA, 2300 bp, Homo sapien
ctctagccaccaaagtttacatagtttattaatgcttccttgttgaataagcctcctgaattactaacaatacttaaaaacattactccatgctattacagtaattaacaagacagaatactgtagtttcagattttcttactttgcctttccatgaccaaaagccaattccagctcaagcagtggagtatttcaaattctacaatttgaaaaaataatgaaaagctggatatatttctaaataaatatcaattttattaaagccaggttgtaatatgtaactttcagagtaaacaagtattcctgagacaggatacatagcaaagtaacagttttaaccattaaatacatcttaaaactggctacaaaacttcttaaatacttaaaatctgtatggcagagaagaattaagaacttcatattaaacagtatttcagtctaaattcaaacaatttagaagctttttaaaaaagtgaatcttgaaacaaaagtttaataaatacttggttgctgtacactaagtttcaggacccaatgaaataaaaagtctgaatagatggaaatatttggagaagcaaactttatgactatttatctttaagtgttgatataagtaatagtcgcaaacattttaataaacacgataaagtttaaatgcaataacttttatcaaaactgggagtcaaataaaccaagaaaatgacttggatatatgacaacctataaggtaacacttaataaaaactattctttttctggaaggggttatatttcagtttatctagaagcttaactttaggtattcctctattttggtcgtatttctaggtcatcatatttaaaatttcttccttctttgcttgcttccttgttattatcaaaattgatcttattaattaaaagatcctaaatgttattaatacacatgaaaatatattttcagttccagtgccaaagtaggtgtcttttatgccaactttctataacatacaagtaccaatgccaaatatattgtaactctaacactgctcaattcaaaagaaaagtgaccctatcatctttctcaatcaaaaccaaagtatgtttttcatggttcaagaccaggcaatgtaaagtatttctgacttgcctcacatcatcttcattttaaaagctcatgtaaattatttactattaataaaatagtaaattccattcatttagcaaatgtggtatgctgtaagatctgcttataaaaggctaactgtaattaaaatactacatagcaacattttcaattatatgaaattcagctttgcattaccaaaggattctaaatgtgcaacactgcattgatatacattgttaaagtctctatttttgtggaggaaatatcaaccattataccaaagttttcaagcttacgtctgactgcacaagaaaccaaacttataaagagatttcttaaaaagtatatttaaacaagaaatttagatgcagttgcaatacttaattttgacatcaactcttcagaatttcttgatttagtcttttttttaaaaaaaattaactgtccaacacacaaaaagaaatgcaggcatgctatttttttctcctaattcccatctacaatctttgagtagctaaaagataactatattaaaataaagcaaaataacttttaagtcaaaaaacaaacatctctggaacactcccaagtaatgaaaaacccgacagggtagcttaagtccccatgtacaccatagagatctaaagaaaatcgtgcctacattatcaaatatttatctggaaatgggaaataacattgctactcgacatgacttaactaagcgatctactttgctctcatcttttgcagacatgtggtgcccaatgttttcccttagtcgactgctttctcattagtaaacaacttattagctctttctctggtgctcaaatgagagggaaaatgaaagtctgaaaagcatcagcatctgagctcccggatctgggcaggggtagcagagaaaggcaccctgtatttatcactcggttaaaaaaaaaaaaagaaaggaaaagaaaagaaaaagataaccctcaaaatagaggaaagaaactctgtcacctgaagagggctgctgaagtgaagcaaacatttggtgagactcgttttttaaaaaaacttgtctaggggctggaagttatgggggcgctctttgtgcggagtctgaggggagggggagggacaagaaaacagcttgggagtcattcaaaggagtttaaggagcggtgtacggaggaaaggcggggcggggccc

SEQ ID NO: 1920 - DNA, 2300 bp, Homo sapien
gcaccactgcactccagcctggaagacagtgagactctgtctcaaaaaataaataaataaataaacaaaaaataaaaaaacaattgtataagataccacaacttactttattagacccagacgttagggtcaaaaaacatgtttttaaaaaaaataaaaggaaaaaaataagataacatattctgctttgtaaaatactttaaaccattccattaactgtagattatttgtaaatgactttgtcatttccattaagacagaatgaaatatagccccacaaaaccacagatgaataacagtttctattccatataaacactttaatatttccatatataaaaaacttaacaaaattagttcaaacatttcactatctttttttggtatccattaaccagttaattgtcacaagaagggtaaaaaggggcaaaaaagaaaaactaatgtctaccttatgtcaaatatagatacattatatttaatttcttcacatattactgtaaaatcataaagttttgctgttgtaatacatatatcatttctcttaacttacaaattcagaaaaataaacaatttcatttttaaaaactaacctgtctacttcatctcgagccacaatatctcctttctttaaggcttttatagcaaacatctcatttgtgtttttatattcagctaaaagcacctgaaataaaattaaaataattattttccacttgagttattaatgttgtagatattccaaaaaattccaaaaagattacctttccaaaatgtcctcttcccaagacagcacaacacctgaaatcttgtagattaaactgaaacctttgctgagatctgaaaagagaaatttcaattaataataagacaataaagtatggtaccaaacatgtagtcgcaaaatttggtatatattctttaccttctgtcctcaagttcttgaataccactatattctaggcctgactgaggagtatcaggcttgtattcagattgagattttggaagtatactatttctgtcattctgaatatcaaaaacagtctctgaatcctgtaaaatattaaatacacgtgaatccatagaaatacccagaaaacaacttatttgataatgataaaattaaggaaaaacatttcaaaagtcaatataaatgttggagtgaaaagtaaaattcagatactcattctttaaaaaaatttttttttctttttttagaggtgggtctcactatgttgcctagagaggtcttgaattcccagccacaagcaatcctcctacctcagcctcccgagtagctggagccatcgcttttatattaaacttatctaaaaaatatgaaaaactgggctgagcacggtggctcatgcctgtaatcccagcactttggtaggccgaggcgggcggctcacctgagatcaggagttcaagagcagcctgaccaacatggagaaaccctatctctactaaaaatacaaaactagtgggcgtggtggtgcatgcctgtaatcccagctactagggaggctgaggcagtggaatcacttgaacccaggaggcggaggttgcagtgagccaagatcatgccattgcactccagcctgggcaacaagagcaaaactccgtctcaaaacaaaacaaaaccaaaacaatgaaaaactaacacattattatgtatgttaatcaagttagaagaagaatagtatttcaggcagtatgtcatgtagtatcaaccacactcctatattacctctagtttaagcagcctattctatctcttctggaccatgagcatccagaggctaatgacaatttcatgccaacattaagaagttggttgtctcctaccaactcagtctaatttagctgagactagaccataagaaacataaattcggctgggtgcagtggctcatgcctgtaatcccagcactttggaaggccgaggcgggctgatcacccgaggtcaggagtttaagaccagcctgaccaatataatgaaatcccatctctactgaaaatacaaaaattagccaggcatggtggcatgtgcctgtaaccccagttattcaggaggctgagataggagaatggcttgcaggagaatcgcttgaatccgggaggcggaggttgcagtgagccgagatcatgccattgcactccagcctgggtaacaagagtgaaactctgtctcaaaaaacaaaaacaaaaacaaaaaacaaacaaaaaaccataaattcacagttcagtggcaattttaaatggaaagacacgccttattcactatgatgctttta

SEQ ID NO: 1921 - DNA, 2300 bp, Homo sapien
atattatacatgttcagatttgtatacttctactagttttgattactggaaagactccaggaataaacaaacatcgcaagtcccctttttcctgtctcagatgggagtgaagataccagagagattgaacagaatgctggacatggttttagatactgtcagtgttgacatctgaacagactattggtttcctttaaatgtgctgaaaacacatttgttagctttcagttgttagccctgtttgcttacaatctatttgcagaaaaaagatactacatattttaacaaatgtatagatatttctttgctgttcagacttgtagaatgagttttcaagtaaaaattgttcaagcagaagaccaaagtgctgtctttgtattatccattgaaattcccattgagaatcctagtaaaataaaattttcttctgacttactgtttcagtccccagaagaaattagattgtccatgtagtacatttgatttatgtattttgagtgtactacattgtcccacgtagtatattttatttatgtattttgagtgagtgaatgaacaaactaaggttttggtaactgtaagctttgaaattttcttagctgtgagcaagattagaagctcagccttaagaagttggattctgaatttattttcacagattcttaaagattgctcactttccctggatattgctttctgcttattattctttaaaacttaattggaagcaagcagccaaatcaaatctaacgaggctaagtaagcctatatttcttcaatagccagtgagaaaataaggttcaagatactaattcatttcagtgattttaaggaattaaatgatatttagacatttgtttcctgatttaaaaaatgactgagtgatttttaagccatctgaaattctgaggcaggcagtcacatttgatagacacgtttttagcatagttgaaagtttctctctttgtgaatcaaattgtcatactgaatataatgtaactacttttttatgtctcagggtcattatgaaaaatgattttaatactgagcttatggaaatgccctaaaactttttgtgtttagaacattaaaaatgcctggcaatgtgtgctttttgggttcctttcagtctaattttgttggcagctgcttcttaatacagtcattatgcttgctaatccatgattgtgttttaccaccattaatttactgttgactttaaaatccaaagcacatttatatctgatgtatttccgcagattgccttcctttattataacatttattaccatattaaccttatccattttcttctgtttttccacaagattgaggttcttcaggatttatctattatctaaatattccctactgtctgttagacactaaaaattgactgtctggccaaataggtgattgagtgaatgaaataaaatggaatggagtggaatgaaattaaatgaaaagtcatatcatatatgagatagacaagttttttataagggtctataaaatttaaagatttcagaaagagtatatggtgtattccctctgtaatagatacatatctgttgtcacttcttatagttcttttgttgttgttttggtaggcatgggtttattgttgttgttgttgttgttgttgttttgtctgttttttctttttcactgcctggatcttggttgtactttgaatgggtgataagattttactgccttaaaacttgctttaacttactcaaaggtatttcttctagtctccctttcctggtgatgatgaagaggaagtttttgacagtattgtaaatgatgaagtaaggtatccaaggttcttatctacagaagccatttctataatgagaagggtaagaattaaaataaggataagaattttttaaagactactttaattttttatactaaagaaaatttcccagtagaactttaaaagctgtttttcagttcataaatgttgcatggcttagacaaaaaaagacaaaatatatctaagttttttaaagtaataatccttatcagtgaattttattctattggttttattttaacttttttattttacattatgctagctgttaagaagaaatcctgaacggcgccttggggctagcgagaaagatgcagaggatgtaaaaaagcacccatttttccgggtaagtgtgactatttaaaattttttatgaaactagagcgattagatttaacaaactaaactagtcattttttattttatgatccagctaattgattggagcgctctgatggacaaaaaagtaaagcca

SEQ ID NO: 1922 - DNA, 2300 bp, Homo sapien
tgaaacctctactggactgaggtgcagcacccccaagccctttcctggttgcacttgacaaaaatattgagggaggaaaaaacccccacaagagtacagtcaagtttttaaaattacagaattacaaaatagaagattgggattgggaaagaaaaaagaaatcatgctccccggttcccacctagatttgagttcctaaaatcctgcctctcgcacccctttttctttctaaggaagctagtatctcccaccttctcaagaaaacagtgagtgctccattacatttaaatcccatccccagatgaaggaagcagtcattatcttctaagttctcagccccatgaaaaccaccatgaaaataccaatccccgtattttcaagaatagttgtcagcaaagtgttgccgcaggagaatactgtctgaaggcagggaacctaaggcagattcacactgatttcctagaactaaatcaaatggaaaaccccggccgggcgcggtggctcacgcctgtaatcccagcactttgggaggccaaggcgggcggatgacgaggtcaggagatcaagaccatcctggctaacagggtgaaaccccgtctctactaaaaatacaaaaacaaaattagccgggcgtggtggcaggctcctgtagtcccagctactcgggaggctgaggcaggagaatggcgtgaacctggcaggcggagcttgcagtgagcccagatcgcgccactgcactccagcctgggcgacagagcaagactccgtctcaaaaaaaaaaaaaaaaaaggaaaaccccaactttccacacctaagtaacaaaagaaccagacgttactccctttgcaaccccctccccactacacaaccacacacacacacacacacacacacacacacactttagccgtgtggcagatgtgaaattgaaagtatctctgattcgttgctttctgcaaccaatcagacgcttgcataggagtgtaactttgtaacttcactttagcctctgattggttgctttccacaaccaatcagactgattgtggagccactacttcatttacatagggtgtacaccatgtaaccaatgggaaacctctagagggtatttaaacccccgaaaattctgcaaaaggagtcttgagctggtattaccttttcgttttcaataaatctctgcctttattccttcattctttccttagtttgtgcgttgtgtccagttctttgttcaaaacgccaagaacgtgaatactctccaccggtaactgttattgttgttagtaatagtggtattacaattttgacgttagtttggctaattaataaatctagggatattttgcaatatctagatgttctcgcaagttttctatatgtagctatcagccaacgttacaaaggccgtgaaaaaaaaatgatcagagcatggcccatatcgtcgtgcctcttgtgtacacattggtttcacgtagttttgtttcatcttctgccaattctaaaagggtatgcaaggcaagataccataacctatataaacttacatgacctgtataaaggacgtgcctaagaagacaacatgctagctgatgacagatcctgaacagacacctgttctggatgacctaagtgagtttctccttttatttcaaatttcttagaaagaatcacccttggggcacgtaagaactggctcaaatgggagtgcctgacgcggggtggggggctgggggcggggtaggtggtggccgtgagaaggtagccgtgagaaggtgggagaggaaggggtggttaaactattagggatgcaggctttggcaccactacgaagccagggttttctttgtgttttaactgtcagattgagagtagctctgttgtagcccctttgcagggttcccatgagacttttcctaggtagttacgttgactcgcttagcaacatagcaaattacagaaacggagtaagaacgtaagaaatcgcaaagcacgtgacgtatgggatctcactgttcttggcccttctcccgacccgtagccctgctctgctacgactgcgtgggtgagtcgtctataaaaactcatctctgcgcgtctcttcgccacattcgcttcctgctttcggtgtgtctgttgtgtcttgttgcgggcaccgcagtcgccgtgaagatggcgtctaccagccggttagtatgtcccgccgagcccggcgagctgaggggcgggcgcgagcgccgccggcttttaggcggcctccgggcagcctcgtagggctgagcgcctaggggtatgggaga

SEQ ID NO: 1923 - DNA, 2300 bp, Homo sapien
acattaatattccattagaaaattctctgcaaaaatgctgtcaatcatttttttatttctaccagcttgttaacaatgaactcaaagctaattcaatacttttgggagatagtataaaactcaattttagaatctaaagaactaaaaaattgtatgctatgtgataattttaattcctatttttctactacagccttagcttgcttggtattagtaggcttatcctaaatttataatatacttttaagaggcagcattctagtaatatttttagaaggtcttattatataaaacacagtataaaattatataatagttctgagtatggattctggagtcagactgtctgggttcagatcctgagttgaacctgtttgggtttaaatgttactagctttcataaacttgagcagatgtgaaaagttgtgtgatcttaacctctccgtacctctgtacctcatagttctaactatgtaatagaactactacatatttttgtaaacatacagtaataatgagttcattatgtaaagcacttagaacagtacctaggacatactcagtactcaataatgttagcaataattatggaaccccttactgagtagctttaaaaccatttgttgagtctttcctgtatgtcatacaaggaacttacttgtgaaactcttagtacatcttacctaaaatgatgttcagagcatggcttaagatattttttgaaactaactttttaaatattattattgttctctttactacattacaagccttaaaacagattagctttctagggtaggatgatactttttgtccttaggtgagaagatgaacatctaaatttcatttgaaaaagcattccttccagccaagcatggtagctcacacctgtaatcccaaactttgagaggccaaggtaggaggatcccttgaggccaggagtttgagaccaacctgggcaacaccacaagaccctgtctctataaaatatacaaacaaacaacaacaaaaaaaatagtttggcacagtaggatatgcctatagtcccacctgctcaggagactgaggcaggaggatcacttgagcctggatagttgaagctgcagtgagccatgatcacaccactgcattccagcctgggcaaccacgtctgagaaaaaaaaaaaaggcattccttcagtagtaggtgggagatgaattcctcttcagaattttgtgttggagtctaagatttatctttatggaactactatttacatggtaacagtagggaaaaggaagaagagtgacccatgatttactggcttttaaaattttgactaaggcaattccttttcaatatttatatatttcagaaaatgtcactgaaattcacaaatgcaaaacggattgaaggacttgatagtaatgtgtggtgagtatcttaaaataaataataatttagtgagggtttcctacatattttcgtatctttagatgggagttttttttgcctcatccatggtctataaataaaggtcctcatttaattcatccattaaatgaaaatggaaggaagttagcaatccatatactgaattgttcatttggcacatgtgccatgccctttgctggacactggacatatggcagagaaaaggacaaatgttaatgccctcatggaacttaacctccaatccaggaacttttcttattagttctgttctctaatagttgatgaaagaacttagcagcagctggaattgttgagaaaatatatatatgtggttaaaatatgggtagcgtgaaactgaggtttgtaagggacattgggttcataaattcagccatcattctatttggtaaactgatttgtggttggtaaatttttgttggaaactcattttttaaaacctataggactaaactagggtcttatttgtctgttttgtggtaagactataagatataaaaaagcgaactttataattgtagaacttattaatattagtatttttttcaatcttaggattgaatttaccaaattggctgcagacccttctgttgtgaatcttggccaaggctttccagatatatcccctcctacatatgtaaaagaagaattatcaaagattgcagcaatcgatagcctgaatcagtatacacgaggctttgtaagtatatcaagaccatatgggccatgagcttttattttatactggggtgtgtgtctgtgtgtgtgcatgtgcccttctgtcattcatatataagtgactttctgggaccagctgtcccatcctagcaaccacagaaacttctgc

SEQ ID NO: 1924 - DNA, 2300 bp, Homo sapien
aagggtaaagggcaatatacctattagctagtaatttctttttcttttttttttttttttttttttgagatggagtctcactctgtcacccaggctgaagtacggtggcacaatctcggctcactgcaacctctgcctcccgggtcgaagcagttctcctgcctcagtctcctgagtagctaggattacaggcatgcaccaccacccctggctaatttttttgtatttttagtagagacagggtttcaccatgttggtcaggctggtctcgaactcctgacctgatgatccacccacccaccttggcctcccaaagtgctgggattacaggcgtgagccaccatacccggcctattagctagtaatttcaaggactcacttacacggcctttttgtacattcagggccttttcaactcctatttccctttccagaatcatttttgcaaggctgcttccttaccattcaattctgagttctaatgtcacctcctcaaaaaagacttcctgaccatcctatttaaatttgcagctatctccacccatcactgcttctttcatagcacttaccaccctctaaagtcattttttatacttacttgtctattgcttgtctctccctaccagaatgtaaggtttaagacacatgttttctctacctcattcttcccagttgcctcaacattatatgagaaaaagaaaaacagcccttggtgtcacgaacagaactgacactttagtgttgttaggaattgactgcggtgttcccctgttaaaacataacactctcataaaacactaacatcataccaggtcattctgtgatcataatgaagtgagacaacaaacaagatcacactatttttgcctaaccagatttttaaaaaggtcactgtgcaaactacaaaaataccaaactatcctcctcccccagctaatatgattgttgcttctttgccgattacagctttagccctacacctttcctcctcccccagctaatatgattgttgcttctttgccgattacagctttagccctgcacttttcctccctcctaaaggtgagatgtagtatgatcaccaatcgcgggggaccccacagccagtgcgcgctgagtcacactccacagccaatcccaggccacatccaggctcgcccctacctgtacacaataatttctccatgcacctaaccgtcttctgaaacttcctgtacctagttgaagagtatattcctttaatcaatgtatacttttgttccctcctttagaactgaataacaatgctaacgcctctcccactccctctagcctctcatcctcttaaaatagaagaggaaaaatatccaaacataaaattcaatttttaacaaaaactctcctttcgctgacactgccctccccaaagaagtcaccagtggtttccttgttttcctagagaattttctttttcgctttttagtgtcatttttcttccttcttcagtctcacatgtccctttcattcttagtttgctgatcaaactcatatccaggaaagtgaagttcctttacgctttttaaccccacacccccatctcaaatgacaaatgcatctaggaaccccttttcacactctctctagccctgccctctctcaggcaccttccaaagttattccaacccgatccctccacttgtacaagcccagcggccccacagcttgcccatccttgcaaaccagtcctcgtcctataacctgccccaacccgatcagtcgcatacatccgattcgagccctggggccaaattccatacccatatccaagtccccgccccactaactcgagcccgcacctacgcatgcctgaaccagcatgtgatcccggccgactccacagccaatggagttccctgagtccacacccatagccaatccccggccacgtccaggccatcctccatcttgtccccttcctcactcaagcccaacccgtggcccccaccccttccctcctccatttccatccattccgcgatcgcggcggaccccaccgtcatcgcgcgccgtgagtcacactccacagccaatccctggccacatccgggctcgcccccgccccgcccccttgttcccgcaagcccggaactgcccaaatcccgcccctcccctcccaaaaaaacacccctcatccagtctcttccagcctagagatcctggcctacccctccgccaaagcgcgcactgagtgcaaaccccagagtcaatccctgtcccggctccgccccccgcgtccgaatcccgcccagccgggccctcaa

SEQ ID NO: 1925 - DNA, 2300 bp, Homo sapien
agataaggagcccaactgtgaatggaaagttagcttattcccagtgccagctttctctcctcacatcctcataatggatgctgactgtgttgggggacagaagggacttggcagagctttgctcatgccactcacccttattcttcccagctagcttgttcatcaggtaggattttcctgtgcggtagaggcccacaattgccaccaccaccacaggctgtgtaatggcagacaggattttcagagcttctggattcgccaccagttccccattagtgttctcaatgaggcacattgggcctgtcatgtggatctctggagccatgtccagggcattgttctcttgtctgcaagggaagagttggaatgaattagaatttccagtcttttgcatttagaggatagagtcacagaattccccaggatggccaaaagttttgtgtgtgtcagtgagagagatgagggaaaatgtgtatcattttaaaaaattatggaagtattatcatcaaattaaatattggtatgacagtaacttatcaacagtcaactactcttgcaacctagaactttcatttaatttattatggaaaagcttcccttggattctcattaaaaaatttacactagacaataaatggaagataaaataggatatagagaattttttttacatcctggctatatgtaagaaattaaatattgatttgtttattcatgaattcttatgatgaataaagacccccatgagtaaatgtttcattgtttgacatatgcccttaggacaatttccagagatttataaatgtgttccttcctccattttcaactggttatgcttatttcactgtaatgaggatccacaaaacttctcacagtgccattctggaagtggaaccaatgtaacatacttttgcaaattctatacaactacataaccatgtgaaacacatggctagggacctttccaagggctttgaaggggcacgtgcaagagaggggccctgaaacttaagcttcattagcgtcatgataaggtagcctctaactcagtgtgggtataaatgcaaaactgccaatactgaatgttgctaagaaacacgcatgcgcgcgcgcgcacacacacacacacacacacacacacacacacaccccaaaaaaaccaaaccaaacaaacaacagcaacaacaaaaaaccccatgaaataaggactgaaagaccaggaagcacataaagagagctacatgggaagatgtgaaaagaaaataaatttccagcaatacagctttaggttttctgttttgttctgtttttccattttgtagagtaggagaaagagaaatgggaagaggagaaatagaagtgaggaggacgaggagaaagggctggaaagatgagagagagagagagagagagagagagagagagagagagagagaaagtgccagcaagggagatgtcagacaaggtgatgagtgaagctagtgttttgccaaggaattcaggggaggagttttcagaaggtgggatctaagtcgtctgagtgcgtgggagaggttaaagtaagcaaagataccggctttagtagtgatgcattacaggaaattctcctgtaaattctccagaggaaaaactaggccaccgccctctctctctctcaaaaaaaaaaaagaagaaaaaaaaggagaggaagctctttagcctggattatttctagagaaacaatctgaaacaaagttcaaatgtgtaataaaaagtatactgttttcatgaatgttcctctttgatgctgggtttcagttttttctttgtctataaccgtgtcagtgggctgctagtactctgcattacctttgctgttctttccttctggtgaaaagaacccatttgtagctctttccatttcttagctgcataggagcaggattcagcaagctccatcactgacaatggaaatgtaatcatgtccctagtcaacacagacaatgtcaacaaagagaaagactatcctagtgcatttcaaactctcagtttagttgctgtctgctggtgcctaattcaacacaagcactgtagtggcacttagagccatggtacttctgataacaccatgattttatctgacctgtgtctcacatcaggctcagctgcagcctaatttggtcctggtcatttttaagaaaatgaactgacttataaattccttcccatccttgccacaacgttataggctccacgtccctgagctgaggtacttcagagctggagaggaagcaataggagttcttacctgtgcttttatc

SEQ ID NO: 1926 - DNA, 2300 bp, Homo sapien
aaatatacatttatgctgtcttttataattacataactcccttactatttgtccaggtggatttgtattaccatttgaaaaggtcacttgctttctgcttgaaatcagcttttagtattgctcatagagtagatcagctagcaataattttcttcaagtttctatgcttgaatttttccacatgttgtttcaaccaaagtcggtattttggggaatagctttcaagccctttgattttatggatggcctcttttcctgggcaaaacctctgagccatggccccttccactggacaggggtgggagcctctggtcttctttgcttgtctctctcagcatggaaactccactctacacatgaaccacagtgaagagatcccgtgttcttaggctgacaagcctgggttagaccttccactgtatgaatggggcaggggaggttgaaagcccttgacttctggtcacactcaccaggaatttagtttctacaacttggtgttggacggaatgagaaatgctcatagactgcccctcctaatgggatattttatccctgactggaagatgaaagaagagggaaaacaggcttcttggccatacccagctgtagtggaacgtttgacaatctgaattgaagatggggaagaagcaggttgtggaacaagtaccatcgactcttgctattgctaccataattgtaggggtcttcttgaatagatgttttgttgtttgatatatgtttttacaacaatttgcagagattttaaatggttcaaatgattatgacaaaagtaacaatgatatactctgaaaaaataggttaaaagattttgaccaggcgtagtggcccatgcctgtaatcccaacactttcggaggctgaggtgggtggatcacttgaggtcaggagtgtgacaccagcctggccaacatgataaaaccccatctctactaaaaaacacaaaaactagccaggcctggtggcatgtgcctgtaatccccgctacctgggaggctgaggcaggagaatcactggaaccctggaggcagaggctgcagtgagccaagattgcaacactgcactccagccttcagcctaggggacagagtgagactccgtctcaaaaaaaaaaaaaaaatactctaaagtagttttaataatgatgaagctacagtgttcaggaagaataggaagagtttgaataaaactattttataaaatatgagtaagatagaacaatatatttcatttcatatatacataatgtataattttttatgtgtgtgtaactaaattaacaaataaatgctcacaagggttttttacaatttgtttttactgtaaaatagagttaataccacctattctgcatgtaagtagtcatgaatgaaatagatacataacatatgacgctcttagaaaacaatttatgaaaaatcaaattataatatactaaataaaaagaggaaaaacatctataaattaaatatttttacaattattcactcaccaaacagaggcagcacagtaaggtggttcaagaagagagtttgggatcaggaatccctgggttcagattagttatagtgctatgagtttagacaactgataaagtctttctgtgccttggtttctataaaatcatagggaaatacttgttatgagatttaagtagtgtaattcatgtaaagcagtcagcactgagcctggaacttgagtacaatgcatggagccccctcctgactgtgtgctgggcattaagtgccagggactaggtgttcatgagtgtgtaaaacatgctctttcctcacctactgcacctctaaaagaataggcagctccattgtgaattgtctcctgttataggaaattatatctaagaattaatgtgatgcctcctaattctacaattctcaaacagatctccaatcttaaaatatattccatttttttcaatacctaatggacatgtttttaaaacaataaatggtctctaagatctcttccaacaaaaaaactttgaaacttgactttaaaccctcctactagcagaatccagaaattgcatttatggttactgagtcacttccttgaaagaagtactttcagtttcattaggctctgaagccattacaaaggttgcttaacttctaattatttgatcactgaggaaaatccagaaagctacacaacactgaaggggtgaaataaaagtccagcgatccagcgaaagaaaagagaagtgacagaaacaactttacctggactgaagataaaagcacaggtaagaactcctattgc

SEQ ID NO: 1927 - DNA, 2300 bp, Homo sapien
ggccttgtgggaagggaaagacctgaccgtcccccagcccgacacccgtaaagggtctgtgctgaggaggattagtataagaggaaggcatgcctcttgcagttgagacaagaggaaggcatctgtctcctgcccgtccctgggcaatggaatgtctcggtataaaacccgattgtatgttccatctactgagatagggaaaaaccaccttaaggctggaggtgggacatgcgggcagcaatactgctttgtaaagcattgagatgtttatgtgtatgcgtatctaaaagcacagcacttaatcctttaccttgtctatgatgcaaagacctttgttcacgtgtttgtctgctgaccctctccccacaattgtcttgtgaccctgacacatccccctctcggagaaacacccacgaatgatcaataaatactaagggaactcagaggctggcgggatcctccatatgctgaacgctggttccccggctccccttatttctttctctctactttgtctctgtgtctttttctttcctaagtctctcgttccaccttacgagaaacacccacaggtgtggaggggcaacccacccctacacttccaggacaatctgcagagattttaaatggttcaaataattttgacagatgtaagaatgttatgctctaaaaagtaaaagactttaaagtagttttaataataaaggagctacagtgttaaggaaggatgatagaaagagtttagataaaattattttacaaagtatgaatgagaaaagacactgtatctgcaatttatatacatctaatatataattttaatgtgtaagtgagaaatgcttggccaggcctggtggctcacacttgtaatcccagcactttgggaggccaaggtgggtggatcatctgaggtcgggagttcgagaccagcctgaccaccatggagaaaccccatctctactaaaaatacaaaattagccaggatagtggtacatgcctgtagtcccagctacttgggaggctgaggcaggagaattgattgaacccaggaggcggaggttgcagtgagccgagatcgtgccactgcactccagcctgggcaacaagagtgaaactccatctcaaaaaaaaaaaaaaaaaaaaagaaaaagaaaaagaaaaaaaaagaaatgctcacacaaggttgggtctggtggctcatgcctataatcccagcaatttgggaggccgaggcagggggatcatttgaaggaaggagttcaagaccaacctaagcaacaaagtgaaaccacatcactataaatatatttttaaatgaaatgttcactcaggctttttactattttatttgcttttgctgtaaaatagagataatgccacttattctgtatgctagaagtcattactgaattagacataaaacacaaacagctcttagaaaacaatctataaaaataaaatcacactataataaatttaaaaataaaaaacctataaataaaatatttctacaatttttcacttagtaaataagcagcatagtgaagtggttcaagaagagggtatgggatcatgagtgcttgggttcagattagttacagtgttatgattttagacaactaataaagtctttctgtgctcagtttctataaaaccatgaggaaatattatgagttttcagttgtgcgattcatgtaaagccatcagtactgagcctagaacatgagtacaacacatggagccccctcctggctgtgtgctgggcattaagtgccaggggttaggtgttcatgagtgtgttaaacatgtcctttccttatgtactgcacctctcaaagaataggcagctccattgagagtgtgtctattattttaggaaattgtagctgaaaattaacatgatgcctcctcattctaggtttctcaaattgactcaatccatgagacatgtatcattgtattcaaaacctaatgggcattttgttagacaacaaatggtctctaagatttccaacaacaacaaaaaaaatttgaagcttctggttgagaaatctttaaaccctcccactggcacactccactaattccatttatggtagtggagtcagtgatttgaacgaagtactttcagtttcatattactctaaatccattacaaatctgcttagcttctaaatatttcatcaatgaggaaatcccagccctacaacttcggaacagtgaaatattagtccagggatccagtgagagacacagaagtgctagaagccagtgctcgtgaactaaggagaaaaagaaca

SEQ ID NO: 1928 - DNA, 2300 bp, Homo sapien
aatgtgaataaggagtgtaaattagttatcactctaccaatgttaaaatccttgttctatggttatggaaaattttaactttaggggaaatgatatatgggaactttccatacccattgtacatcttttctgtaagtgtatttcaaaataaagttatttttaaagaaagccagtgacccaatttgtaagacagccttaaagagaaaccaggctttaaaaaacgtatatgaaaaaatgttcaagcatagaaaacaaaaatttaacccatattgtaaagttcagcatagctaactacctaaaaactgctttccatttcatctttttccttgcacacaagggaacaacaccctggacatggctccagagatcaacttgccgggcccaatgagcctcattgataacactaaagggcagctggtggtgaatccagaagctctgaagatcctatctgcaattacgcagcctgtggtggtggtggcgattgtgggcctctatcgcacaggcaaatcctacctgatgaacaagctggctgggaagaaaaacggtgagtgacaccagcaaagctctaagccccttctgtccgtacacacggcgaacatccagcttagggatgtgagcatagaaagagatgagaatgaatgttgaaagctaactttcagtccattaatgggctctttacattgactttggaggattacagtcaactgactcttcccactttacttttattttatactaagggtataaatgtgcctttctggaaggaacacaatgttaataaagaaaattaacttctataataatgacttataaaacatttattaaaatgttcatgtagtgacagcaagctttcaatgaactttaagaaaaatatgaatgtttcagtgtgtattaaatatctaattttcctgtttccaggattgtaattaagatttatgccagttgtattttcttttatctcttttaacttcaattatgttaacttttatctcaatttccagaaacacctactaagtaatttcttttcccttttatcctctccttctacaggcttctctctaggctccacagtgaagtctcacaccaagggaatctggatgtggtgtgtgcctcatcccaagaagccagaacacaccctagttctgctcgacactgagggcctgggagatatagagaaggtaaaaaaaataagtattttaaaaatttcacttaggtagattaaaatctacataaaccaggtcagatcgataaccatctttgcacaatcactcctactccttgatttagggctctagttaattatattaatatattatttcttaaaatttgtgtggtataagcattcagagtacacaataagttcaattgattaattatgggtaaacctatgaaataatggctaatgatgttttcagttatttctctttcatattatagtaaaatgttttggtgaggctgctgaaggtgcttataaacttcagtagacgttttacaaacatgtctgactttttacagtgggatcccacaaaggtagtaaaaatgttcacatccacaccagcaccagtagaaagagaagcaaagtgtaaaatctaatgataacatctttgctcattaaggataatatattactactgttataaatcttagacatagaaagcttttattaaaggagcttattttaactactgtgtaaaaaatatcttactatgatgtgccatggaaatggaatagggtcataaactaagtttagggtaccagtttgaattttagtagctgatcaaaatagcttctcctaccaagtgctcatgtgtttcctgctgacatatatttatatataacaccttaaattatacatcataaatattataaatttgttctacaggtagaaaaaaatactgcataaggaagtgagttacctaagttttcagaactaatgagagacagagttggagttcagtcagtcttcagctatctgaattgattgtacattctgctagtcattcttctttgtggcttctacaatgacttacagggtgacaatgagaatgactcctggatctttgccttggccatcctcctgagcagcaccttcgtgtacaatagcatgggaaccatcaaccagcaggccatggaccaacttcagtatccttttttgtggtccagaacagcagtaaacctagaaaataacagcttcattttttcaccaagtacagaggcagacagacaggtactgaagaattcataagtcctctctttaataaatctcattatgctgaacatctcattctatctcaatctcc

SEQ ID NO: 1929 - DNA, 2300 bp, Homo sapien
tttctcaccgagccttagctgcgttcccgcagggcagggctccggacctgcagcccgccatgcctgagcctcccacccactccatgggctcctgtgcggccccagcctccccgacaagcaccaccccctgctccatggcgcccagtcccatggaccacccaagggctgaggaatgcgagcgcacggcaggggactggcaggtagctccacctgcagcccctgtgcgggatccactaggtgaagccagttgggcttctgagtctagtggggacctggagagtctttatgtctagctcagggattgtaaatacaccaatcagcaccctgtgtttagctcaaggtttgtgagtgcaccaatggacactgtgtatctagctgctctggtggggccttggagaacctttatgtctagctcagggattgtaaacacaccaatcggcactctgtatctagctcagggattgtaaatacaccaatcggcactctgtatgtagctcaaggtttgtaaacacaccaatcagcaccctgtgtttagctcaaggtttgtgaatgcaccaatcgacactgtgtatctagctgctctggtggggccttggagaacctgtgtgtccaaactctgtatctaactaatgtgatggggaggtggagaacctttgtatcaagctcagggattgtaaacgcaccaatcagtgccctgacaaaacaggccactgggctctaccaatcagcaggatgtgggtggggctagataagagaataaaagcaggctgctggagccagcattggcaacccgctcgggtccctttccgcagtgtgggtgctttgttcttttgctctttgcaataaatcttgctactgctcactctgggtccacgctgcttttatgagctgtaacactcaccacgaagatctgcagtttcactcctgagcccagccagaccacgagcccactgggaggaacaaacaactccagatgcgcggccttaagagctgtaacactcaccgcgaaggtctgcagcttcactcctgagccagcaatactaccaacccaccaaaaggaagaaactccaaacacatccaaacatcagaagggacagaatccagacgcgccaccttaagagctgtaacactcaccgctagggtccgcggcttcattcttgaagtcagtgagaccgagaacccaccaattccggacacaataatatgggttttagaggaagacttgggttcaaaccttacttggtagctttgtaatattaacaagttgttaaatttcttggtaacattgtggtgaaattactgtagaatgcaagggggaagggtgcagtgattcaaacctgtaatcccagcactttgggaggacaaggcagaacaatcgcctgagaccaggagttggagaccagcctcacaacatagtaagacttcatatctcacacatacgcgcgcacacacacacacacacacacgctggtatgatgcctcatttgtagtcccacctattcagaaggctgaggcaaaaggataacttaagcccagaagtttgaggttagagtgaactatgattgtcattgcactccagcttggacaacagagcaagaacttgtctctaaaaaataaacaaatacaaaataagaatacaatggtatgatttatataaagaagttatcactgtgtctgtatcaagtgtgccataaatgagagttaccttcatcattatttattatttattaaatgttaagtgtcaggacctgggttaggtgctgataattcaaaagtatataagacatagatattccctcagggcacttaacagtgctcaagctaatattcaaggtaattggacctaagaaaatattatatgaggctttctcatccacatgcttctcaaactggcccacaaacatgagataaatagcactattttaaatgacccaatgaaggggtttttaaaacttaatatagcaagcagtctctaagatcttttccaatgataaagtggaaagttcctggttgagaaatcatgacaaaccctcttaccagcacagctgtcaacaattccttttatggtgaatgagtcactgctttagttgatactttgtttcatattagtgcatttctttgcagaggttacctctttttcttgtctctcgtcaggtctctgacattgacagagcctggacgttggaggaagccccaggacgttggaggggtaaagtaaaagtccacagttaccgtgagagaaaaaagagggagaaagcagtgcagccaaactcggaagaaaagagaggaggaaaaggact

SEQ ID NO: 1930 - DNA, 2300 bp, Homo sapien
gttgaccaggctggtctcaagctcctgacctcaagtgatccacccacctcagtctcccaaagtgctgggattacaggtgtgagccacctcgcccagcatttacactgcactatttttagctggtttatatataacatgtttccctaggatcaatgccatcctgttttcccattagagaattgacaacacaatttgctggtacatcctcaaatttgctataccttccttgtattcttcatcctatgctcaccttggaaatgtggtagccatttgcttatctaaaagaatattaaaatttatctcccttggaagaaatggctatagacaggataggcaccgggcttaagctcccaaagtgtcaggaagcctgggtctctgtctttctggatatttccatttcaaaaggcatggagcccagactcttgaagacatctctgggttgtaaagctggcactgatatttagcccctagaaagctctatttgtattcaaaaggttaaagaaaggactctggcccacttgtctctaaagaaacactctaaaaacaagctggggtctggcatggtggctcacacctgtaattccaacaccttgggaggctgaggcgggtggatcacctgagattgggagttcgacatcagcctgaccaacatagagaaactccatctctactaaaaatacaaaattagccgggcttggtggctcatgcctgtaatcctagctactcaggaggctgagacaggagaatcgcttgaacccaggaggtggaggttgcagtgagcgaagattgtaccattgcactccagcctgggcaacaagagagaaactctgtctcaaaaaaaaaaaacacaagttgggaaagtgggatctttttttcttataaatttatgtacccttaaattatacatgattcacaaagattcaattttgcctggggctattttttgtttgcatgatataaacaatagattttattacttagaagcaggtgatttcctagcaatagttctgttttgaaataaccctgccttactttcactttaaatctcatcaatattcacacacacacagagaagtcttactctctgctctccatttctctctctctcttccccgcttcccaccttcctctcttttagagacaatgtgcagtagagaatcaatgtggttttaaccaaatggattttcaagtttgaatctcgctcaattacttgctaccttggtgtgtagctcaatggctttagttagacatattaattacccgttttctgattatttttcccccttggacaatggggataataaacaacctttatcttgaggtattttgatatttaaaatggtatgtgtaaagaatatggcctagaatggaactgataaggagaaaacattgttattgtacactcagcaaacacagaggtattttaatgaagtgactgacagcaagacttcttgggcccaaatcttatttagtagctctgtaattgtaataaattattaaatccctcttttaacattgtggtaaaagtatttgtgataagaatacaatgggataatctatgtaaacaaaacgggtactatcttcattattatttattaaatgttaagtgccaagacctgagttaggtgctaataattcaaacatgtataagacgtggacattccttcagggcatttagagtcctcattattaaacacaaataatgagttccattttaagagtctaatattcaagccaattgaacctaaataatattatattaagctttcttattcctgtacttctcaatgtggcccacaaacatgagatgaatgtcattattttaaacgattcattgaagtttttttaataatcgcaagctgtctctaagatctcttccaataataaaattggaagattctgtttgagaaattatgtcaaatcctctcactagcacagctgtcagcaatttcttttattgttgctaaatcatggactgtcatattactctatttatttgcagaggttgcattgttttttacatgtataaatacaggtctctagaaagtctggaaagccccatgacattggagaggtaaggtaaaagtccaaagttccagcaagaaaaaaagtgggagaaatcagtgcagccaaattcagaactaaagagaagagaataaagactcataactttctcattgaagctgccttcttaccaagtccagaggatctctactctgggtaagactatgacttataaggatttcatgatttataaggatccattagttttctctaagttgaccatccccaagataggc

SEQ ID NO: 1931 - DNA, 2300 bp, Homo sapien
tggtgttattattacttctacatcctttatgccagttgataagaatttggtgttgacacagaacagggtacctcttcttcaggagatcattccagattgggccattcatatgcttatcactacctccagaatgtcaatttgtaaaaacacagacacacacacgacagtgactattctgaactatattaaagtaagtacacacagataacattatcacttgccctgtatgatctactaacgtcataactttctgtctccttgccttgctcagtgagattaaaaacatctgcaactcatttcctccagtttccttccaaaatcagtgagccagtaaaacaccctcatttcaaaaaactgttttatttgatacatcttgtaaatgaattacaagttaaccacaaaatacaaaaacatatagacattgcactttaaatattcaaaaaatgtataaataagaagctcaaaatctgatatggaaaaatattcaaaaaatgttcagagtctttttatcaaaataaaagttatttcctttttatgagtatgtgtgtgcatatctgtgattataaaaaaagtctttaaaaattcatataattcagaaagacattttaaaaaaatcacctgagctagaagtactaattttaaggaggtagtggttgggggaacacttatagacttttatctgtgtaacacagacatattgctatgtatattttctatgtgcatagacatattgctatgtgcaatcattatacatacaactgtgaattaacaattttttttgagacagtatctcactctgttgcccaggttggagtgcagtgggaccaccatggctcattgcagccttgacctcctgggctcaggtcatcctcccacctcagactcccaggtaactaggactattataacaggcacatgccattatgcccagctaatttattattattattatttgtagagatggggtttccccatattgcccaggctggtttccaattcctggactcaagtgatctgcccaccttggcctcccaaaatggttggattgcaggagtgagccaccacacccagcctaaatttcttcttgattaacatttccatgattatctgaagtcagtaacattggattatctggaaaggggtgccactggtgaaattcaggtgtttcaaacacatttacctggattcagtcatccctgtactttttcttcttcttctttttttttttttttaagagagagggacttcctgacattaaaaaatggtaagagaaaaaagcacctgatttcttattactggtcctatttaaaacttgacttagctttattttcactttcaatattgcttataggaaataaatgttaagttttgaatcaaaatcggcaccagtaattttacctgattaagtgcctaaaattttgtacttattaatttgcaaatgtttaatcagacattactaaacaaataggaagatctaagggataggcacaaatggggaatcattacccatttatttcagatagatttcccaaactctgttaacaaactggctagtcattttaggaactgagtccatttttctggtagcctgggtaagactcctaattataaattatgctttttatggtccaatcatcctcctgtcctccaaaagatccagtttcaatgagatgtttgtgttttgaaagagaagtatttacttgccaccaccgcacctctgggcaacaacgttagaggatacatagatatccatagacacacacacaaacacacacatattttatggttaatgaaaaaataaagaaaagagatgagaaacagaaacatataagcatgtaaaaaaaaataaaagcaaacaaaaactcaaatttcttccctgacaaaattacccctgagagacaggtagatgaaacaacattcatgtctgctgctctatattcattttggaggcgaaagatacctaagctaagggtggaagagggacaaacaaacctgagtttcaggagtctggtgtggaggaaccagcactttcaagctcctttagtttcctgtcttgataaacaggaaaatccccaacagtcaactccccacaaagtgcatgtcctttcaatttcggttctcacagactcttacttggatgtctgtaaatccggctggactttcagcttctaagaacagtccgtttctcgaggatccaggcgcaggaggacagagcaatgggtgagagaactcttcacgctgcagtgcccacaccaggtaagtttgctcttaagctttacctttcaagtatatttgggtta

SEQ ID NO: 1932 - DNA, 2300 bp, Homo sapien
acaaacaccagaaattccagcctatcccatctgttcccttgcaggcaaagtaacatcctagacatggctttagagatccacatgtcagaccccatgtgcctcatcgagaactttaatgagcagctgaaggttaatcaggaagctttggagatcctgtctgccattacgcaacctgtagttgtggtagcgattgtgggcctctatcgcactggcaaatcctacctgatgaacaagctggctgggaagaacaagggtgagtggtaccagcaaagctctgccaaacccttctgtccattcacacagtcaccatccagtacgaggaagcaaggagagagtaagacatgaggatgaatattaaaagccaatgtttaggctacagctggtctttttatcttttggaagatgaagaccagttctctgttcctgacatatcacctcttttttttttctttgccttgatttcttcttgtaaaatgtataatatattctccttgtaaggagtaagacatcaatgaagtaattcccgtatacataattataaactagcaacattttagtagcataatatttttttaatatcaaagttccaacctatggtatttgatattgtttttccatttctgcatcatcattcaaatcaatactggttgtacattctgctatctcctcatcttgctttccttaaactctagctgaatgatcaagcaaatccccaatttccagagtttctcttctattacaacctctcactccccctgacaggcttctctgttgcatctacggtgcagtctcacaccaagggaatttggatatggtgtgtgcctcatcccaactggccaaatcacacattagttctgcttgacaccgagggcctgggagatgtagagaaggtaaggaaggattcctttttttaacctcctaatctctgaactgtcttttcacagggagattttaggtttatttttctaaatttgtagttccacttgaccaatgtatacccccattgttttcctttgtatttttaatattcagagtttggaagcctgacatgagaaaatacatttataagccagaatcagtattagaagagcagtgttgatgttgagctaggcaattaacgcaaatgcataaacatgatgcatataaaatcactgttacaagcctgatcctgtagattatactagttaatagtgggttctgttcttaaatgaacttgtgttccaatcagagctctagcacttgtagctttctgactttgataagagaagtaagtctctccaaatgttttattttttctttggtctttcttattcaactcactacttaaaaacagtagatacatgggcctttcctagttatatgctggtaagtacttaacaaccagctcaaggacaaaataacaaaaacaaaaacaaccatgatttgtagcacttgactattttctgaatactcccatcataattgatttcaagctaccaaagttaattcactaaactcagacttgggaagacatgcacacaatttgctgtcatgagttggtatgagttggctccagcacacaactggatctttctcttgaacttccattgttttttttctgtgtgtgtgttttttgtctttgtttttgatttgccaggacttaaagatgacaagccacaatttgagcctcagtttccttacctacaaaatggagatagtaactataaacccatctcacagcactattttttagaattcgataagatcattaatgtgaactgcattattgatactggttattcaataaaataggtatatgtactgggtatataggccaattttgttttatgtgctggaaaatgttggttttaagtactctgatcaccccactaattttaactatccgttttgcaaatatgtagagggactggtgagttaataagatatggatgagtataaaattatcaatgttaacaagagaactattcaaagttaatatttctaacaatctttttcttttgtcttgttaaacatttatgacaagagcctatttttaaatatcgctcatctgggaatcccatgagacatgacttaaatttggtctgacttctaggctgacaacaagaatgatatccagatctttgcactggcactcttactgagcagcacctttgtgtacaatactgtgaacaaaattgatcagggtgctatcgacctactgcagtatccttttgtggtatgggatggcaccaaagtccgacagaactcctctatttaccagctgcatgtctgtgagaccttgtgaatcacaaaaatggaaa

SEQ ID NO: 1933 - DNA, 2300 bp, Homo sapien
ctgtccagggcattacaaatgtctaataaataatatccttgttatcattcatcatgtactaagtgccaaaaactttgtccttgcctgtgagttaaagttctcagctactgaacctactgcgaaagtaataaacttagtcctgtgtgagcagctctaacatttcacaacaatagacctcaaaaatcatatgagctcttcccctggcctactcccaaactggagatgaatgtcaacgtatttcaagctaggtttgaaataccacatactttgaacaactgtgaaagatctcaaatttctcttctagtaacaacaacaatggaagcagggaggagtatggctggcactgaaaggattctctgcagtttctaggaaacatgcagtttcaaagaagtcaggtcaaatacatccagcctatctacactaggtaacagttgggcaattccctttgtcatctggcttagtcactgaatttcctttttggtttctatttcctacagagaactttcaaaaatccccctttctgttattccatattttgtattcaaattgtctcctttttcgagcagggaaaatggggtgggaagaacaaaaaccccaggactgagtgaagaaaataaatgagaaatcaccacagtgaaagtaaaagacgagagttcgaactcagcaagttctcatcgaagcagctttcttttttcttttcttttctttttttttttttttttgagacagagtctcgctctgtcacccaggctgaagtgcagtggtgcagtctcggctcactgcaagctccgcctcccaggttcaagccattctcctgcctcagcctcccgagtagctgggaccacaggcgcccgccaccatgcccaggtaattttttgtatatttttagtagagacggggtttcatcgtgttagccaggatggtctagatctcctgacctcgtcatccacccgcctcggccacccaacatgctgggattacaggcgtgagccaccgtgcccagtccctcatggaagcagttttcttactagctctaaaatacctcttctcccgattttataatcaaggtaatgagaggtgacggcgtgctggcagcccttgcagccctccctcgctctcggtgcctcctctgcctgggcacccactctggcggcacttgaggagcccttcagccctccgctgcactgtgggagccccttcctgggctggccgaggccggagctggctccctcagcttgctgggaggtgtggagggagaggcaggggtgggaactggggctgcgcccggtgcttgagggccagcgcgagttctgggtgggcttgggctctgagggacctgcactcggagcggccccaggcagtgaggggcttagcacctgggccagcagctgctgtgctccacttcttgcagggccttagctgcctcccggtggggcagggctggggacctgcagcctgccatgcctgagcctcctcccctctcccgctccccacctcaccccgccatgggttcctgtgctgcctgagcctccccaacctgtgctgacccctgctccacagcaccctgtcccatccatggcccaaggaccgaggagtgccagtgcatggagcaggactggcaggcagctccacctgccgcccggtgcaagatccactgggtgaagccagctgggctcttgagtctagtgggaacttggagaatctttatgtctagctaagggattgtaaatacaccaatcagcactctgtatctatttaatctggtggggacttggagaatctttatgtctagctaagggattgtaaatgcaccaatcagcactctgtatctacctcaaggtttgtaaatgcaccaatcagcactctgtatctagctcaaggtttgtaaataggccaatccacactctgtatctagctaatctagtggggacatgaagaacttttgtgtccagctcagggattgtaaacacaccaatcagcaccctgtcaaaacagaccaatcagctctctgtaaaatggaccaatcggctctctgtaaaatggacccatcagcaggatgtgggtggggccagataagagaagtagccagcagtggcaacccactgaggtcaccctccaggctgtggaacctttgttctttcactctttgcaataaatcttgctgctgctcactctttgggtccacactgcctttatgagctgtaacactcactgggaatgtctgcagcttcactcctgaagccagcgagaccacgaacccaccaggaggaacaaacaactccagacgcgcagccttaaga

SEQ ID NO: 1934 - DNA, 2300 bp, Homo sapien
cctggagagactgaccctccctgggcttgccagttcttagagatactacaggattctcctgcaagtgtgcctttcatatgcaaaccaaccaacctggagcccacaccccgccactttctctgttggctctcattctctgggccactatccatctgccctactcaccgaaaggccaaatatcaaaagtaagaacaatccctctgccccagagcccactgaaattattccagctagccagtcctaaacctgcttgccctgctagttctagttcacagttgctctcgacatttactccagttctttgcctccttgactgcaattggaaccacctggaggtggggcgaggctttaaaaaaacactcacactcaccctcaactctagacttactaaatcagagtctctggtgatggatcagagctcaagtttttaaggagaacctcaattgatgtttatgtgcagcaagtattaagaatcactggtttagtcttataacatctaaaggaggcctcctactagactctttactttagacaagctctggtctttgacttttggcctcttcataaatgccttccaaactgaaggtcacattcccttggttggcaaatgctattagaaaaaaaacagcttcaatactccacttaactctttgggcgttcaccttcccttggaatttggtctttaagatcattcatgacaaattagtcaatttttaatattgcttttgaaaatattaaacatttttgaatccagaattttcctttttttttgagatggagtctcgctctgtcgcccaggctggagtgcagtggcacaatctcggctcactgcaagctctgcctcccaggttcacaccattctcctgcctcagtctcctgaggagctgggactacaggtgcccgccaccacacccggctaatttttttgtatttctagtagagagagacagggtttccccctgttagccaggatggtcttgatctcctgacctcgtgatccgcccgcctcggcctcccaaagtgctgggattacaggagtgagccaccgcacctggcccagaattttacatttttaacacaagtctttgtctgaatagagtattcagattagtctaccacactccccaaatcctcagcctaagttattgccaaaactcatgtctgctcattctgccacttgcttctgttctcaaatccatttagcagtgcagccatggtagacagtcccagcatgctgctatgtcctctgtagagagtctttctccttttctcactcagatgtttctccaagctgtgaaagggtgtctattttgcccaagggcagcttgtgaattcaaaatagttaaagtccctggggataagactcaaccaatggaaactgtgggttgttggataaatagtccacatcaagggtcccaaacccccagagcatggtctgttagaaactgggccacacaggaggtgagtagggagagagcactaaggcctgagacctgcctcctgtcagatcagcagcagcattagattctcataggagcttgtacactgttatgcactgcacattccaccttctatgtccatgtatgcagattttttagcttccacttatgagtaagaatgtggtatttgactttcggtttctgagttgtttcacctaagataatgaactccagttccatccatgttgctgtaaaagacatggttcattctttttttaaaccagtaatatctttagctctctctctttctctctctctcttctgtgtgtgtgtgtgcatgtgtgaacacatttaaaatatcaaaagttcttcactaacaaaagaccccagaactcaagaattcccactaagagaaaaatgcttaaaatattcttggtttctaaggctttgcttatgtgactactgtagatttcctgtttttcttgtgtgcctaggaaactaaagccacctgggaacggtatcaagaagaaagcctgtgaagccttctaagatgggaaagacaaaagaaagctggcaggattgtgcttgctaaggtgtgactgtgcagtatctgtggctttttctgacctcctcccacccctgcacccaacacccatcctcaaactcacatcggatgattcaggcatggctctgctaacactttattaaaagcatggattaattttacttccaagtttatttttactgcaccatcccatttgtggaaacaactagcttactcagcttttttttccttttataaaggaaagaacagaaaagtaaaaggaggaaagaaaacaagaggtgagtgaggcaactgaa

SEQ ID NO: 1935 - DNA, 2300 bp, Homo sapien
ttcccagactttctttggacagtacgggatttcactctggagctgaagttgaacggtcaccctatcacagaagatgaatacctggagaatgccttgaagctgattcaaggtatcagaatgtggcctgggctgtgggtggtccactgggtgtgtgatctgctaaacactgcccatcatctctggggtttcatttgtatttgagactagattgaggtctgtagaaacggggactgaggggtatgttgaagagctctaggaatggagcctagttcacttaagaaaagtagagtctaaagtgcagataaattattcaagacagatttgttctttgtacaattagtacctcagcattcagattacaatgggtgctaagactttctaataacaagatgcttgtgatctgtgttttgccctctgcttttctgtgtttagaaaatgattgaccagataattgttagacatgaaattacaatgaaaagcctatctaataaaaatataaatgtgtgtgttagtccattttgcattgctataaaggaatgcctgagcctgggtaatttataaagaaaagaagtttatttggctcatagttctgcaggctgtacaagcatggcaccagcatctgcttctagtcaggaccccaggaagcttttattaatggtggaaggtgaagggggcagctggtgtgtcacatggtgagaaagggaacaacagaggggggtggtctcagacttttaacaaccagatcttgtgtgaactcattaccacaaggatggtaacaaggtattcatgagaaatctgcccctgtgacccaaacacctcccactaggcccacctccaacattggggggggggggtcatatttcaacatgagatttggaggggacacacatccaaaatacatcaacatgttacacagatattattcttctcatggagggatataacttttcaatatccatatagttatatcatctacaaaaatgattttgttttctaaagcaacctgaagaagcacgtctttacaatctgtgccttttcaaaatttctgataattgtcggaatattcattttactttctatgttatgatttttctcttaaacccaacatatgtatccatgctagaatttcataataattgttttaatgggttacatttatctgagtgtgtatctgataaaaccttatgagaaatatcaattccagtgaactcgttgttgctttcatttttctatttatgctttcttgaaacatttcttaaaaattcataggcagaagagcaatactgtcaaatcgaatacagtcttttaagagtttataaagaagtgatgattatcttaaaactaccttcttggctgggcaaggtgacttgcacctgtagtgtcagcactttggaaggaagaggtgaaaggattatttgagctcaggagtttgagaccagactgggcaacatagtgagaccctgtctctataaaaactagaacaaatcagctggtgtcatggtgcacacctgtagtctcaactactaaagaggctaaggtggaaggatcacttgagcctaggaaatcaaggatgcagtaagccgtgattgtgccactgccctctagcctgggcaatagagcaagacctcgtttcgaaaaaacaaaacaatacaagattatattcttgttacatttagtcttcagaggattttactaaaaaatagctaacattatacaaattcttttagcatcaatgtgcacagaagtatttaatttttatgttaaaggaggtctgtaagcatagaagatggcaaaaagacaatacaccctatcaaaaatacctttagctcccttataccaagactgttttcactatattctctgtttttttttatccctcaggcaataatcccagagttcaaacatccaattttcccagggagtgcatcaggcgtttctttccaaaacggaagtgtttcgtctttgaccggccaacaaatgacaaagaccttctagccaatattgagaaggtgtcagaaaagcaactggatcccaaattccaggaacaaacaaacattttctgttcttacatcttcactcatgcaagaaccaagaccctcagggagggaatcacagtcactgggaatcgtgagtctcctttttacttttctgtggggcctcatgtgtgttgaatatattgtataatgtgtttctcagaatttttgttagattccatatagaaaaactacgtgtatacaggtattcacactcagtgaagaaatgtgtataattatcacacttattgcaatttacaaattcct

SEQ ID NO: 1936 - DNA, 2300 bp, Homo sapien
catccctctgcccaccccaagacaaattcataattgactttccccctattttcacatttatcttatgtaaaatgtagatttactgagcatgagaggaacacataatcagtattcctctacccactcttcacacgcaaaatgtgaattcactgggcactaatcaaagcctcacaagaatgtaacttcttccctcattgcctaccttcccatttcccttttttttctttcttttctccttcccctcctgctggctctttcccctttaaatactgaagtcctcaaaaactctctttgcaaaaggcacagatcacagatgttcctgtatttgtgctttctcctggggaatgtccttaaccttggcaaaataaacctctaaaacgattgagacctgcctgtcatttttttggtgcttaaaatccatgatggaatttttaatcactattttagacttgggtaaatctggctgtgaaagtagtgacagagtcttttagaattttcttctaccaaaaataattaatcagaaagtccctgagagaatttcagatactcctgtaaggatcaaacctaaatttaaattagacttgtagatctgtgcatacccagtgtctcacacatataaactcaataaaaatttatcgaatgaccaagtgaagaaatgttctttcagcttttccttcaagactcagaaaaaagatatctgcagttccagaatggactgagtgaacaagaaaagaacagatcagtgacacaaagacagccttctttttccctttcagggtgactcaaattgtagtcctcatctgaacagtctgagacacaactcttgtctcatattaactcgatagggcatttgctatactcccatttacacaaactgctcagatgccccaaatgctgagtctgttcgtcttcattttattcctttgggagatgccggtacaaacttgttttttctttctttttttaaatggagatgtgaccaccatagcaactaaaagacataaatcttgcctaattgaatcagtgtgctcaagataatagccagggcagagactgagttaaaactggggtaagggtgagagtggggaaatggatgaggatgataaaaatatttatgtccctagaatttgtgggtttggattaattctgtttcgtaaggaatattgttggccttcaaatgcagtgccacttgggagagaagcaagcgggcagtagttgaggtgtctctgcagttgaatcgcagtgaaaggcaggttatgagtatagggaccgcccctcggccatgtggtcccctccctatcctgaggataacgacatttgagagaagccaatggtattggaaggccagaatcgaacttaagccgcttagttggtacaactgtaaaccctccctcacagaggctgggccctgcaatctttctaagcagggtaaagaaaagtaaggggacttccttttcgaagaggaggttcccgcgtgctgcacccgacctttccctcagggcccaacacgcgttatataaatgccaagttactcagggacgcacacgtgagaaggctggggcccgacacacgcggtgtagtgccgaagtcaccggtgtggcgcgcctgggggacacgccgaagcccatttccctcccgcttctggaaagcagtccccgctctttccagctgctccgcggggcgtatggctgtgcgctacctcctgcggaccccaggctgggcgagggggcagcgatggccacatggcgcgctcggggagatggcagctgcgctttgtttccagcagtgataggtgagtcactggctcccgcagccccagagctgggcaaacactcaggcccaggcagctgaaaaattcacagcaggagcagctaccgaagcgactgcagcctcttcctcctcttcctcctcctcctcctcctccgccactgctaccgccaccaccgtggtagccgcctccgcgccctgcctccgccccgtcccctcctcctccacccgcgaacttagtcagcggttcgcgccgccgagcgcccattggccagcggaacgcgtcgcgtcacaatggagccggtcggaggcggcgagccggacagcgccggggcttcccgctgagcccgcagcctccggcagccgggaaagtgcgggcgcggggccgcagcctgcccgcccggagcggcccaggagcacgccgcggggagcgcgggcgtccggggctggagtcgcgcaggtaggtcggagcgtgacaccccggttccaggagggcgagccgcgccgaccgaggtggtggaggaggaggaccg

SEQ ID NO: 1937 - DNA, 2300 bp, Homo sapien
ttggtgttacagggagtgatatcagaaaaaaagacatctcactctgcatttaccctaaatgtaaaccagacattctccctctccagctgaggagcaaatggcaaccagtgattttgactaccagcagccattaaccaagttacaaatatgaagcattaatttaacaccaaggtaaaaatggacattttacctgaatcataagtgacataagagcttgctctttcaaaacagactggtttctttctgaatgctcttgcccaatgcttcattccccacaccttcctccatggaaaataggagctggaacagataagcagtgttggctgactggaatcttttaaaaagccttctctgggttgggcagttaggcgtgtgcactccattggcacagtgagccagagattgtgcgcattctgtttttgtctttttccaaatccccagttgacagacattaagggatccattatcattccattattgcaaggcagatttggagaagaattttctactgagatggttgttttgtcacagtgaaacaaatgagtgacattctatgtttgggccacatagttcttctgaacccctgggcctcaatgccttttttgaagcgttctttttgacttcacagtaggacccaaatatgatgaaatgtcaatgtctttgcaacacttgctattttgtttccctggaaccacagtggcataaataaagctcacttcctgggttgtttttttcaaagataccatcccaaggccaaaagcatcctctttttaaatcactttgctagtaaaagaattaggtttctttataagagttctcttttgcatctgtttgctactgcaatgatttcagagtgcttccatgatatttattttaccactaatatcaattcttgagccagtgtgattatctgtattttaaagctgaggagatggaggcctgtatttagtgagtgatttaagcccatgcagatgatggtggaggcaggcctgggactcagtccagtgttcattttccacactgctgccatggaaaaccagcccctgcttctcactctcactagtgcgaggagcggagaaacaaaatgagactgtactcagtcagcagcagatacataaaagtttcctaatttttatttatatgtttttcctaatttttatttatgtgtttttatgttgtgtgttcccctgctacggcttggggaacattgaaattaggaaatttatacttacctaaaacagctctagaacatttacacagtaacagatcagcaagtagagcaattactctaacatgtgcagggttgactctcacagcagtgactgctgctgaccagtaagtcaagaaaacttctgtaaaaatgcctagtatctgtaagcatagacaccagtgaagtatagatagaaataaagccagagacttaaaaaaaaatcccttgccatcacagcagggttccaaactgattggaatccatgagacaggcagcatgataaagcaagaggtggccatagctaactgtgaggctgagtgagtgcccacagcgagtcacagggtgaagcatcctgttgtcatgtttgcactgttgtcaagtgatcagtgatcactgtgatcacagaattcataatccagtctgccctgcattttggggtcaaacttagcactcctgggaaggaaacagcaagagccaataaaacagaaagcaagagaagctggagatcaccactctttcccctcacttcccattggcaagcctccccaaccctccctgagacatcactttgtctttataataacaaagcaacaagtcaagaggtgacatgttttagaaagagctctctgactgcagtatggaaatgggactaaggagggcaagaaaggaggcaatttcagagtcgtccagcccaaagatgacatgggccccatccaagacagtggtagcaagattgtagaaggggctagtttaagagaccattggatttgagggaatagaggaagagaaagtttctgggttaggtgcctgccttagtctgtttgtgctgctgtaacaaaacacctaaaactgggtaatttataagtaacgtaaatgtattcctcacagctctggagactggaaggtccaagatcaagatactacagatttgatttctggacgttgaacatggtgtaggagtagaaaagcaacagggacggaaggagagaacttaccccttcaagcccttttataaggcactaaatcccatcattgagggcagagtcctcatagcctaatcacctcctaaatgctccatttcttaatattg

SEQ ID NO: 1938 - DNA, 2300 bp, Homo sapien
tccaattagaaggcagacacaagagtagccaaaagtattgcaataaagcaacttggggtggactcaacttgcaggggattcagatcccaggtttccaaacctttttgctattcctggttcttttgctttcagtgaagagtagttaagtacaatagtagctctcatttactgactacttacaaagtgattggcactgttcttggtgctttgagcatattagctaattctcacagcaccctgtagtactatacctatagggatgataaggggatgtgggtggtggggagggggcagataaaaagaacagtaaatttcctaagtttaaactggaagaatagggatttcatcctggttcacctgagtacaaagtctaaggttcaatgattccttgacactgggtagcaagggagcatttcagggatgcctaagcttgtggtcaggtgccaacggtacaaagatagaagtatatcagagagcccttgcagaataaggccctccacaggagggttgtgaccttggtacttgcctcactgtgtttaaattcaggtaaggtaagagaattgaagaggtaaagctaccttagagagtattgctgcatctaccctggtgacttacaaggtacttgaatttttttttttctagcaaactgctaaagttagcctttgcctttttcccagagactctctaggaatttttcccatctgctgactaggaggtaagcccggacctaaatttttgtcttgttgtaggttaattaagactggtgttagattcagctcctaaggcctaagagaatttaaggttgtcttctgggaaggacacccaacagcagcattggaattggaaaaaaagtgtaggattttgctgagtgagcagggggaaagcaatgtaaagcccaagagaatatcttttgaacaaacgtccttttcattttggtttagaaatagaaacgtggtaaaaggaggcgactgttttctgaaggcttgtagcacgaaaacaggccaactggccagcaactagttgtctatcagtttctctactcacatacatctgccttttccagactgccagcgcggagcactagtttgactttgggtgctcttcaaatagctggcattgataaggcattcccagaagactgtgttacttagtaatcttgtcggtacattttttcactgggcagagattttccaaacagagagctgccagctttcaagacgtcagagtgctttttcatcctgaaattgggtgggaaaatggggagaagaaaagcacggttcagatcaatcaatgagagagaacccctccctccatactcgttaaacaacaggtggttttgctgtgcaccgtcaactcctttatgcgggagctgtaggcggggcattccaactgagtctccctggaatctgccccttagcccgtattgcaggggcggtgcagttggggattccggcctgaaaggagacttggttgtcaaggggctcaagggcttcatgatccaaggatattgggttttgcttttctccttctccatcttcctcattctatcccaccgtcccctccccacccttctcttaggaggccttcgcttctcctgtggaggggttatcttcatcctgaccctggccttcggaggagttcccagaagggctatttttagtggtggctgctcccctctaacttacccaggggaggagctgcggtggctgagccgacgctgcgcgcacagccgcctgtggttttccgcgcattgtgagggatgaggggtggaggtggtattagacgcagccgaatcctccctcagagtccgccaggtgggcgtctcaggggtgggagtggccgcgtcgtgaagcggagagaggatttctctcctggtcctggagaaggcccccggcggccggcggcatccctcgctggcgagtcccgggagcgaggtggtctctgcaggggaggaagttcccgggcggcgcggcctgcgtcacagcggggctggcaccgcggagtcgactcggcgggcggtggcgaccccggggccgggcgctgggcggcgctggctgccgctagccgggctgcgtgcggggcggcgctggaggcggctccgtccgcggccggggaggcggaggggaggagggcttgcggggctggggcgttagctgcgtcccggctggaagcccgcgaagagaagtaggaggaaggcgccgccgtggccgcggccgcagtgctcgggcgcgacaagccatgagcagcgaccccgcgggcgacgccgccgtccctggcagccgctgagcccgacccccagg

SEQ ID NO: 1939 - DNA, 2300 bp, Homo sapien
taaatatacttggtatctctgatacaattgttgggttgatgggtcctgtctgtgcccaatctattatgtgaaccatggcaaatatccatctttgcaaaactgccctacatccccctcaaaggaaacaaactgaccccaagacagaacttaatcactccagagtaaagcaaaccaattatagccttggccttccctgttaaagcaagtcacaagaaatgcaaatatcctagactagagctgtatacatttaatgtttgtttacacactcaacacattgtttatgaattgagcgagttttatgcagctcagattacgttttgggttttcaacaaattatttaaaaataaacagaatttataaatgtataaaaattattggctctggcgattttgcagcattgtgctaaccaagaggactactccacttttactcctttttcgtctaaatggcatcttaatgacctgcccacgctgaagcctcatcgatgctttgggaaaccatcacatacctgtcgggaaatgtgactgttggttaaggctacgtttctcacactaccgcgaaagaagtatgtgacttacaaacggctgcgatttcctttacctattccttccttcaaaggctgctttaaatggaggtaattcaagcctccccgtgccaaacaccggcactccaacaaagatggattggttcttattttttactttgaggatgggaacctgaaaatgtttcctaacgtttgctgaggctttaacatgtttaaggaatttgaaaccaagggaagtttagccgtaatactctgaaatatccgcattaggatgcgggctaggtgtccggctgttgcaaaactacggaggatgcgaggtttggaagaaactgtttggactttgctgtataccgggcaggcgtgggggttggggagggaagaaccggctgagggagaaaagaaaggcattcgtgtccacagaacacatctaaggctcctgagttgctaactccatccctaatcatctcattggtgggaaccagctggaaagggaaagatcagcgagcctaggcgtgggatgaaggcagcggttttggcctcaaccgctggcctaaacacctggcttctggggcccgcccgatcaagctgaaccccttccctcctgtcctgcaggtgagcacacggtgctctcacgtttcttcgagaaaccttccaattcctttccctgcccaaaagtgctaacttcaagggttcggaggtggcaggggggtgatagaccggaaaggactggccccggggtctcagagattttcgaggtaggaaagaacaacgatcgccccggccacggacgcatttcccctcgcggaccgcccccccacccccgcgcccagtctgcaggacctgccgctgcggcgcggcgttgggcgccaggctgagatcctcgcgcggccgctcgggctagcgcggattgggtggggtaggggttggcgggctcctgagccgcagtagcggaaggttcccagcaccacacgccgggcgggcaaccacattctgcctgtctgagagccggggggaagcaaggacgcgagtgaggcggggcgagtcccggtccggcgcgcacagcggaccgagcgggtggccctctgcgggctgcccctctccatccctccgcggatcccccgcccttacctccgggcgcgagagtgtcgactggagaaggtgctagggagcggcgagctgcctgggggtcgggctcagcggctgccagggacggcggcgtcgcccgcggggtcgctgctcatggcttgtcgcgcccgagcactgcggccgcggccacggcggcgccttcctcctacttctcttcgcgggcttccagccgggacgcagctaacgccccagccccgcaagccctcctcccctccgcctccccggccgcggacggagccgcctccagcgccgccccgcacgcagcccggctagcggcagccagcgccgcccagcgcccggccccggggtcgccaccgcccgccgagtcgactccgcggtgccagccccgctgtgacgcaggccgcgccgcccgggaacttcctcccctgcagagaccacctcgctcccgggactcgccagcgagggatgccgccggccgccgggggccttctccaggaccaggagagaaatcctctctccgcttcacgacgcggccactcccacccctgagacgcccacctggcggactctgagggaggattcggctgcgtctaataccacctccacccctcatccctcacaatgcgcggaaaaccacaggcggctgtgc

SEQ ID NO: 1940 - DNA, 2300 bp, Homo sapien
agcaaaaagaaagggaataaagactagcaacaacccagaagtgctgtgaacaacagtttctaagaagtgaccattctctgtatttattaggatgtgaaagaaatgaagttccctctctcacacacacattcgagaatacaagtctgaggagaacctgctctgggtgaagaattttttttataattctcatattcatgctcaaggagcatgcactcctaggcatatattcacaaggggctatgagagccctggagagaccaggtactctgagggtaggacacatactttagcaacttgggggacacattctcaagctgaaatggtgtctctggagcccatacgagttgtgcctgtgggggccccacagacagggacccttggcattgctgataattgaagggtctgccacagaggtctctaacatgactttctaccaccatctttcctgctcacttgcacatcaatagacacacaggtatattgagcagcagctcttcctcaccttgtcatcaaacagtctgtttctgccttcaccattttgcatctgacctttcacaggtagcaagagaagagtctaaggagcagcaggcaacgtgctgaagtgcagagccaggtcaaggctgggtttgtctgagcagctggtgagtaagagagctgtgaccagggctctgagaaatatggacaggggccagcctgacaaagacaacaaagaactgcccaggggaaggtgaagaaggtaactgtcaacccttcaaaaagtgaaatggcgttagtaagatgaaggccagcccataagagatgccagccaagatggaataatgcgcagattttcatctaagggtgggaatgacctgtcggcctgatccaggcacactggcttctgagattcccttcctagccctgcccacacaccccccacccgacgccctttccccagcctaggtccctgagtttctcattcgttgctcacttgtgtctattgtatgtcttcttcgtcaaaatcgagcagggactaattagcggtgaaagcagagactccagctcatttccgttcacctcattatttgtttctcttttgggctgaagccaaacaacaatcaaacattaacattccccctgcagagcgggcacacggacacatgggagcatgttacacacaccacaccctcacagcgtgcacacatgcacatgcacacacacacacctgctccactgctattcggctgtgcgaggtctctgcggccccgctgtctccgggcatctagggtaacatctctttccatttcagacctgggactggtctgaaactgtataatggaatggccctgggcaagcagggaaaggacgttgggaatttccggaagcacaatccccctggccagcactggtgttaattaagggcgctgctggtgttttgcaggcagctgtttcctcctccggccctcctgttccccgggccgcctgggcaccggcgcctgcactctggcattcattgctctaccgtaagccttgtttctagccgttttcaatcaagtgggagactgtccaaatttccgtctcaatgaaaatcaactgttctaaatctaagctcccattaagcgttccaggggctggcctgacttggaatttaagcagcagcgcagccctccctggagtgagcggcggccggggctccagataaggcgggcctgcctcctagtggccaaggtgctgcagggcagctctgagggctggagggctgcgcagccgccacccgaggacacggggaggaggcacagtaagagaatccttagagcctaacgcccccttctccgtcgctctcgagccgctccagtccccaagtcccatcccctttccttccccgacatctctcctcgttgcctcactctggctccgtcgaactgcagtggtctgttagctggactctatctccagcttctgtatcgaatccatgcacctcgctgccaattcgtcttccggacgctcgttgtcagtcctctgtgatctctaattaaggctctgctgagtctcctctttatctatagggagaatcctcaagcggggagacacacccttcctgcagaggcgtatcgccagccacgacaaggcgagccgcgtttctccccacactccccaaaaaggcgatgaccctccccaggccgcgctcacgctgaacccctgttgctgagctgcagttcctggaggtgtcctgtcctcaaatgtggggatgcggggaaaagattaagaaggtaaaagttcaaaccaggcaaaagttcaaacctcttggcactccacaatgt

SEQ ID NO: 1941 - DNA, 2300 bp, Homo sapien
atatgcttaaagcacaaactcttagacatggacttacctattcaaagggaacacacctatttatcaaaaatttccaaattgtcctccaaaggggtttgtccaatttcctcttacttttacagtgtgtgagtgtctatttctccacatttgactgttttctgaatatcacttttttcttttctcgatttataccaatcttaaaatcatgtttttcaagtctagaatcacaatttaaaacccagggaagatcaaaagaacaaagtacagaagattggtttttttggttttttggttttgagatggagtctcactctgtcgcccaggctggagtgtggtggcaccatctcagctcactgcaacctccgcctcccaggttcaagcgattctcctgcctcaggctcctgagtagcttggattacaggtgcgtgccaacatgcccagataatttttgtgtctttagtagagacgggttttcaccatgttggtcaggctggtctctaactcctgacctcgtgatcctcttgcctcggcctcccaaggtaccgggactacaggcgtgagccactgcacccggcctataatttttttttttttttacaaacagcaaaacattccatattcattataatagtgggctgttttcaataaaaatatcacaccactagttgttaagttttaaaagacctctcatctcttagatcagcaaatctgacactgattagatcacttacacacactccctgcccatacacctccttcttggcagtgtgtggaacaggagtggctgctggcaaggagggtcggggaaggaaagtgagagcaaaagggccgagggctcagaatctggtggcatcttgtaacgggtctcgggcagtcccttgagtgtattctggacctctctgttcatgttcctgtttgggctgctcttcttcacgtccaatgcctgagggccaagtgctcaccatccaagggtcaattctatcagctcctctctgaatccttttctgaaaccctggacaatcattctctttaatgtctcactgtctctgaaccgacaccttcctgagtacctgtaacatttgtgcagcatgcttattaagaatatttagatgctgggtaaacgttgattgaacatttgctgacatggagagatattggtagaagacagattagacttccgatggtttacagaaacacatggattcagataaaagaagatatgaaagcactgggttgaaccacatattttattacaaccaaataactccaaatatcccgccttaatttatttattggcccctgcctctgctcacccacaaaaaagactgcaaatgaaccccgatcctacaacaacaacaacaaaaaacggtgacattatcgggctgcaaaaccctcttagcatagaataatcttttcatctgcctctttcagatgtaacatatttttgacgaaaagaatgggatgaaaacggcgggctcagataaaaacaagaaccgactttccaatacagcttcaataacagacggaacacatgaagctgagaaactctccatgccaagtagtagttgtgtgtgccccaaagctcagataagtacttctccttagagttggaaggcacttaagtgactttttaacgtaattcaactccccacccccagcgccaagtcttaatatcagagttttagtcgacgggacagcctccttcgcccaggacgggtgaaggctcctgaccatgcctcgcagctaactggcagctgcgcctgcccggcaccgagccctgcccaggtggacgcttgcgagagcattacggcgatggttatgtaggctgccgttcttcccctcccaagcacctgctccgcatctagcagtcgctcgccgccagtctccaaccccgggtcccctccctcgccacacagaccccgtccggtcaggcgctgcagggccaccggagaaagcgctcgcaatcacatggaggcccgggcccgccccattggctgcggccgggccagtcgcggcactcgccggctgcggttggtcccagagctgcagcgcctgcacgggcccggagtccatgttacgctttgtctaattcccctcgttacagagtcatgtgctgctgctcccgtcgccgctgctgccgctgccgctgccgccgcccgtggtgccccggctcctccgccgcgcttcgaggtggcagccgcgggcggggccgcgggagcagggtccagggtgcagcgcgccttcgccgccccggcgcgtcccggtgcagccgccgcccgccgcgggtgatgccgccacct

SEQ ID NO: 1942 - DNA, 2300 bp, Homo sapien
tcctgtttgggctgctcttcttcacgtccaatgcctgagggccaagtgctcaccatccaagggtcaattctatcagctcctctctgaatccttttctgaaaccctggacaatcattctctttaatgtctcactgtctctgaaccgacaccttcctgagtacctgtaacatttgtgcagcatgcttattaagaatatttagatgctgggtaaacgttgattgaacatttgctgacatggagagatattggtagaagacagattagacttccgatggtttacagaaacacatggattcagataaaagaagatatgaaagcactgggttgaaccacatattttattacaaccaaataactccaaatatcccgccttaatttatttattggcccctgcctctgctcacccacaaaaaagactgcaaatgaaccccgatcctacaacaacaacaacaaaaaacggtgacattatcgggctgcaaaaccctcttagcatagaataatcttttcatctgcctctttcagatgtaacatatttttgacgaaaagaatgggatgaaaacggcgggctcagataaaaacaagaaccgactttccaatacagcttcaataacagacggaacacatgaagctgagaaactctccatgccaagtagtagttgtgtgtgccccaaagctcagataagtacttctccttagagttggaaggcacttaagtgactttttaacgtaattcaactccccacccccagcgccaagtcttaatatcagagttttagtcgacgggacagcctccttcgcccaggacgggtgaaggctcctgaccatgcctcgcagctaactggcagctgcgcctgcccggcaccgagccctgcccaggtggacgcttgcgagagcattacggcgatggttatgtaggctgccgttcttcccctcccaagcacctgctccgcatctagcagtcgctcgccgccagtctccaaccccgggtcccctccctcgccacacagaccccgtccggtcaggcgctgcagggccaccggagaaagcgctcgcaatcacatggaggcccgggcccgccccattggctgcggccgggccagtcgcggcactcgccggctgcggttggtcccagagctgcagcgcctgcacgggcccggagtccatgttacgctttgtctaattcccctcgttacagagtcatgtgctgctgctcccgtcgccgctgctgccgctgccgctgccgccgcccgtggtgccccggctcctccgccgcgcttcgaggtggcagccgcgggcggggccgcgggagcagggtccagggtgcagcgcgccttcgccgccccggcgcgtcccggtgcagccgccgcccgccgcgggtgatgccgccacctccggcctcagcataagccgtggcttggcggccgagctgcaccccaaggttggtgcgcacctctcccggcaggggccgggggctgcgagggaaggcgacgcgcaggtggagccgcgccgagccggagcgcgcaaccctggcgcaggcgccgcggcccgagctgcggttgcggccgggaactcattcggggacgtccgggggtcgggaggaggtggcggcgagcggagtgggctcccgtttgctgccgccagggcctgggagattgttccgctttctgcagtctgagcgtcggccgcttcggccccgggcggccggccctgcgggaggggagtgcggcttcctggctcctgaacccctcgcgcgcgctcccttctctcacctccctccgccctatcggaaaggcggggagagccggtttcggctctgctggttcctcccggaggtgggtgtttggtgtctggccttgctggcccggcgtccaaaggtgagccctttaacttctccagaatcgcctcccctccgcttccttcctgtgcagggtgggctgcgctgggagcccggcgggcgggggcggggaggtgaaggcccgcgccccgccccccgcgcctgtgggagggagctgggggcccgcaggtgcacccagccgtccgcgggccgtctccgggttgggtaccggtataatccgcttctagcttgtttggaggcgtgggctcttgggagcgggacttctgctcaaatcctgtccaggggcttgaaaaggaggagaattgggggtggttgccgggaggaccagcacctccagttactggagggttgataggggccttctcctttccgtcaccctttactagggggtatcccttgcagataaatgagattttttgatttcttaaaaagccagctgcagtga

SEQ ID NO: 1943 - DNA, 2300 bp, Homo sapien
agaaccactgacttaaatggccaagagagccccccacctccgcatcactaagtatatcttcaaagaaaatgaaacataatatttggctaaagagaacttttaacaaacactaatcattaataaataataaatcttgttttaggccaaatatatattttacattatgaaagtgctcaagaatttggagatatagaagaacacataatcatgtgtatataaaaagtcatcacaaaaagaatcatcgttcatgttttagaattcttttttttttttctaggcaagaactttaatgaattgaactgttactgacaacataaaaaaccagtataatatatacaaaattatcattttatgtcaggataaaatttatcatgttggcaacagaatatgtcctgccgacctccaagtggctggcacagtacatccaccccgtgacaggcccactgggactgtggtgaacgtgcctgtacctcagtacaaagtcccctttccctgagaaatgtacagaaggagagatgaagagcgcgtatccaaaaggaagaggaagaggctgggtgccctgtgccccgagctcagaacttcggggggatgaccggccagtaattaggctgctttggatcacagtgcttgtcaaagctcagctgcacgttagcctccatggcctggatcttggcggcgctgtcccagtacaaacgcttcatttcggcctggcgccgctcaccaggcctctcagctggggcctctaccgaccggcgggtgttgcagtacaggtcgtgttcagcgttcacgtagctgttcaggcgctccgcatccagctgttgccgccgcagtagttcttctctgtgcctctctgtctctgcaaagtactggcggagctcttcggtgatttccatattgctcaggtcacatgctacctctgcatctgactcggtctccatctcttcctccttggataaggcttggtcttctcttgtggatgcctggatcctactgctgccatgtggatgttgcccagaccctctgaaatgtgaagaactgcagggggagtcctgctaggccacatgatggtcatagaaggactgaggatacgcagcctggttatcgtaagagctttggggaagaagcgcaggaaggaagaaccatggaagactgaaacaggattccaccgccttcctgtaggcattgtggtggctttgcatccaagccattgcttgatgataatgttgccagtatcttgcatatactggatgagaataccaaggcctggtagcttttgatgttgatgccttcaccactgccatctccgattgtgaaagtccaaatgggtgccgaaacttgtgggcgcgcagcttgcagatcctgggcggtggccaagcaggccatgttttagaattctttccaggcgggtcgcattggctcacgcctgtgatcctaacactttgggaggcggagacggggctgggggtggggggatcgcttgagtccaggagttggagacctgcttgggcaacatggcaaaacccccatctctataaaaataatttaaaaattttttaaaagaattattatttccattttatttcagtgctttgtcctttaagaaaatttattgacatagcgataatcagactccatacgctattttgtatcttgcttttcaaatttgccacaggcttctagaaacgtcccagacttctgtgtctccatggaggaaaccccgtaagtacttacaaatgttatgattagtcatccctagccaatactaagcaaaaggtaggcatgcggttttattagtttgggcaggaagaaggcattccaaccggcttctttcgctcttgccaggttcaaacatggcgggccgcagccggcccttcccgtacactcggcttgctttcccacaacccccgccaatctttagcgctccttttttaccttccttccccgtcagcggctccagagggtcagcacctccgagcgtgacagcggacctgcttcccgccccccacgcgagggcccgcccaccagcccgcgtcagccaatagcaggccgcgccgatggggctggtagcgccggtcggccccgcctccccagcctcgctgtggcctgcggctcccgggctggtagcgcgccgctctcggtcgcgcggagtgatcgtgtggaatcgcgggtcgcggacgctcgccgccggccatagctcagcctagcgccgccaaggccgacggccctcagcctctgccatggacttcgaggacggtaagcgctgcctctggctggtcggcgcagctggcaggaggcggggt

SEQ ID NO: 1944 - DNA, 2300 bp, Homo sapien
taatattgtttagaatttctatcactgacactgtttagaattctggcatatggcaataacagaaagcagacatactacattttattattgtttttcaattctccatagaaatggattcccttattgccttgggtggggagtggaaagaactgtttctactgccccacctccactttgttagcctctgctataccttgggtgttggcattatcatcaaactacagcatgaaaatacaataatatattttttattttcactcccaactctggccacttcaaatattcatagttttttgttttgttgttggttttttgttttttttttttcagacgaagtttggctcttgttgcccaggctagagtgcaatggcacgatctcggctcactgcaaccttcgcctcccgggttcaagggattcttctgcctccgcctcccaaagtgctgagattacaggtgtgagccatcgtgcccagcccaaatattcatagtttaaaggtatctacatcaaaatgagttaaagtccaaccaaaacaaacaaaaccacgagagtgtgctactcttaagagctgaacttactatttcaaagtaactgaaaagtatctacaagagggctattccagtcccctttcacaaatctgtacctagatatgaaagctttaattctttgttgcatgaaatgttatgaaaaatcaaaagctcatcgagtaagacatatgctgagatcacacctcatttaaagatcatttttttggtggggttaaaagtttacagcctacttagtgaactggttttacttaagcatgcctggttactcaggattaaatccagtttaatcacataagtcctttcccatgtctccctaatgttgtcactacataccactttatcttgacaccaattccaagcaaggtttgaaaacaaaagtgaagaccaaattaatattactttgtgaccctgtaaaagtggtttaaagaattagtatctgagacaactgaaaagtattgctaaaatacagtttatttaatccgtaagtcaaacacttacaaggctgtgtacaggtctaaatgtgaaggacatttgatgcttgctgtgccaaaattctgattaacttaaatcctacctacacacgatccaaagaaaagtgctttggttcacataaatatttcaagttagggattaataagcaggtaatttttggtgataaacaccccagtttactaaccaggaaacatcttgctttccattttgcatagatatttatctatacatatcacttacagacaccctttcaactcatcttaaaccgggacaaacagaaacatcactgtgaacaagcctctgaaaattctatctggcaagaagtaacccgaggctgaggattaactaaacggacggtctgggtcgctgccctgtggggcgaatgcgagactaggtgggtgaggccgcactcgcccgtttgcccgagaccgggaagttggagacgtcggggcaatttccactaccaggggccaaggcgagtctggggctccagcccggaggctctcgcgctctaggcgcgtcctaccggacaccgagttctcttgtctccgccggcagcgggcgccgagcgggccgaatcggggcgcgtgggtccccaaagaggccgactccgggcgctgggcccggggcgggcgggcggcctccgggcccgcagaacaaagcccacacggccatcttgagacggtaaacagaccccctgcgtaggccaccccgcctcctgccagctgcgccgaccagccagaggcagcgcttaccgtcctcgaagtccatggcagaggctgagggccgtcggccttggcggcgctaggctgagctatggccggcggcgagcgtccgcgacccgcgattccacacgatcactccgcgcgaccgagagcggcgcgctaccagcccgggagccgcaggccacagcgaggctggggaggcggggccgaccggcgctaccagccccatcggcgcggcctgctattggctgacgcgggctggtgggcgggccctcgcgtggggggcgggaagcaggtccgctgtcacgctcggaggtgctgaccctctggagccgctgacggggaaggaaggtaaaaaaggagcgctaaagattggcgggggttgtgggaaagcaagccgagtgtacgggaagggccggctgcggcccgccatgtttgaacctggcaagagcgaaagaagccggttggaatgccttcttcctgcccaaactaataaaaccgcatgcctaccttttgcttagtattggctagggatga

SEQ ID NO: 1945 - DNA, 2300 bp, Homo sapien
aacctgctgacttccctgttgagcaacctgaagaaaattaaatataaggtattagatttaaaaggagctttacatttcggttctaatgtaaaaaagggtaagaaatttaatagcttaaaatatgaattaacacccatgttgcatgcattccacatattaaaatttgttttatataatttctaaatgtttaacatttgtttaataaaatgaaggcaaaactattttagtttagtttttatagctaccagacttagatccgataaattgtttgtataatttttaagcttaatttttattactttattggtgttaaggataacaaatgtgtattgttagtatatctattctaatcattttatcttaaatgctgctcttgggagtgaatattcaagtgtgcatcaattttttgaatacttaccctggaagatataaactgggcaagtattttgtgctctgtgtatttttttactgcattagacattgaatagtaatttgcgttaagatacgcttaaaggctctttgtgaccatgtttccctttgtagcaataaaatgttttttacgaaaactttctccctggattagcagtttaaatgaaacagagttcatcaatgaaatgagtatttaaaataaaaatttgccttaatgtatcagttcagctcacaagtattttaagatgattgagaagacttgaattaaagaaaaaaaaattctcaatcatatttttaaaatataagactaaaattgtttttaaaacacatttcaaatagaagtgagtttgaactgaccttatttatactctttttaagtttgttccttttccctgtgcctgtgtcaaatcttcaagtcttgctgaaaatacatttgatacaaagttttctgtagttgtgttagttcttttgtcatgtctgtttttggctgaagaaccaagaagcagacttttcttttaaaagaattatttctctttcaaatatttctatcctttttaaaaaattcctttttatggcttatatacctacatatttaaaaagagaacatgagcttgatagaggatctattcttaaataatttattttcaaacaaccgtctatgtcactaaaaagtagtgctcttatttttttcaatctttactgtggcctcttttgagagtagggtccgtagttttttttttttttcttttttgggacagggtttcactctgtcacccaggctggagtgcagtgtagcctcaacctcctgggctcaagcgatcctccaacttagcctcccaagtagctgggactgttaagtgtgagccaccatgcccagctaatttttgtagtttttgtagagacagggttttaccatgttgtccaggctggttttgaactcctgggctcaagtgacctgtctgtcttggcctcccacagtgctgggattgcaggtgtgagccaccatgcctggcatagggggctgtatttcagtgaaattagaaaagttttgaggcatcgaatggataaatggatggatatatcaaattgtaaggtattaagtgggtgaatgtatggacatttgtagaatcccacagataatttatctttttgtgtaaaataaggcttttaaaactagactttctgaaccaatacagttttttttttttgaggtgaactaggtttgcctagctttaagctagcaatatctgatagatacttgcatctaattttagggatttggtgccaaataagagaagggtagttgaagactagataaatttggatactatctaggagtctgtatttacttagcaggcttttgaaagccgttttgcttaggagttcaaattttaaggataataggacttgttaccctcttatttctcctttatttttaaaaatatttgtggaagggctaaggtaaaagaataataaattcctctaggttattagtatttggttcttctgatactaagctgagtgattttttttaaaacaatgtctctggtagtctgattgagatatgaaacttttgggaagaaaaccattatgtaacaagaatcctatgtaacaactgggtaaatgttttagaatgagagataggaaagaacatctaaatagtacttttttgtgggacgcatgagcctttatacagcctagctaatttgcaaggtaatgataaataaaagtgtattttgttactgtgcttaattcagaaattcaaattcatgtatttcctattggataatttgtaggcgggcagtttactttatagtcaggttagtttttgtgatccttagtgtttatatttgcattgcttttgtaataag

SEQ ID NO: 1946 - DNA, 2300 bp, Homo sapien
ttaatccattcttaaacttctataaagaaatacccgagactgggcaatatatgaagaaaaaaaggcttaactggctcacaattccacaggctacacagtaagcatgatgctggcttctgaggaggcctcaggagacttttgctcatggaagaagcaaaagggaagccagcacttcacatggccatagcaggaggaagagagtgagtggggaggtgcttcacacttttaaacaaccagatgtcacgagaactcaccagcatgagaacagtagccagggaaacagtgttagacccttcatgagaaaccacccccatgagccaagcgcctcccaccaggccccacctccaacactggggattacacttcaacatgaggtgtgggcagggacacagatccaaaccatatcagtcatctccacacactccccgccccctacctacactactgtgaatgcagcagtcattattcgcaccgggagctagtgagtgtgcactgggagaaagcatttgttgtgctctcatgacggctccacccccactgaaagtgagaccaagccactcaggttttcacaaagggcaaggccaactccctctccctacacagagtggcaacagtgtctgagctacagaggacagactgtagagttgcctgcctcggactagggtgaagaagctctgccccgaggcccattttttttttaaatagtagtagccaccagagaggcatatccatggtctgcagctgggaaccaaaagtcaaatcctttataaactgaatgagccatgcaaaagggccgtgatagggaaaaagatcatatccccgccgacttagaaggaggagctgatgcacaccctttctcccaagatcacagcgcacccatcactctttcttaccaccacccaccccattcggggagagcttcccctgggcaccagcctacttggcggctcttactcttaagcgccatcgactggactgcatcctgaactgcatcatcaagtaaaaaacctgctatgagagcttgctgctagttcatgagataagctccctgagatctctgcaccctcagccccacaggagatagtatatcggctattaagtccaacacattactacaacaagcagcatctgagaaagctatcgtgcagaagctatctacaaccaaggaactcatacagacccttagctccctgaaagcactcagaaacaaagacaattatacaaaacttacactactttcaagcaatattttcaagggaaaaaataatttaaaaatgaaaaagcctcatcgaaacaatagcaaattttaaaataagcaatggctccctcagatgagaaggaatcagctcaggtccagtgcaaaaagccagtgttttcacaccttcaaaggataacactagctaggatctagcaattgatcctaatcggattgaaatgtctgaagtgacagataaaaaattcaaaatatgaattgcaaggaaactcaatgagatccaagaaaaaagttgaaatctaatgcaaagaaattagaaaaaaattatgcagcatctgaaagacgagatggctatatttttttaaaaacacaaatagaacttctggaattgaaaattttactaaaggaatttcaaaatacaattggaaactttaacaatagactagatgaagcagaagaaagaatttcagaggttgaagaccagtcttctgaataacctagtcagacaaaaataaagaaaaaagattttaaaataaattaacaaagactttgagaaatatgggattacgtaaagtgaccaaacctacgacttatgagtgttcctgagagagaagaaaaagttagcaacttagacaacatatttgagggaataattcaggaaaaaaatccttaatcttattagagaggatgacatccagatacaaaaaattcagaatacacctgccaaataatatatgaccatccccaaggcatacactcatcagattacataaggtcaatccaaaagaaaaaatcttaaaggcatctagagaaaaggaccatattgcctataaagaaaatgacatcagattaacagtagatttctcagcagaaaccttacaagccagaaaagtttaggggcctatttttagccttctaaaaaggaagccagtaattttatataccatgaaatgatgtttcataaacaaaggagaaataaaatctttcccagacaagcaagcactaagggaattaccagaccagacctacaagaaatgctcaaaggagttctaaacatagaaatgaaagaatgatacttgccaccagc

SEQ ID NO: 1947 - DNA, 2300 bp, Homo sapien
taaaagctgtggcccagaaagtgacctccagaactgcaactaaactccagatttcggcccagcctttggagacattaaaggccactcgaacatcattccagacctagccacggaagcgatgcccgcctcgcagattcatagggttcttaaaatggtaatttggagtaaaatgtaactcaaagaactttgaatcattcattagcaccttataattactctgctaattaggttgacacggcacttaatcaggagtaatacgccgtcttgtcactggcacttcccattactctgacattcaacatgagacaggttggagacgtcctagagaaaataatgcaagttgatacactccaacgaggcgttacagtcatgctccgggtcccaagtggatccgcagtgactgtttcctttccaaatgagcgctcgccgaaaggggccgggggacagaggtggacggactgccgcggggcgcggcaggggcgcgggctgcagaccagccgctatgggtcctgagccccgcgcccgcccgacaccgcagtgaaccgtggctgccctcgccaccagagaacgcctcgggcattagctcccccgttcgggagaaagcgtctggccaggcattttttccagctggagaccaggctggttccccagcttggagcctcaggcctcgtcctccccgagagcgcctggtggacgcggacccggctgtgtccctctcagggatccgcctcccgccgggctgagcccgagcgcctgggttcgtcgggcgagaaatcagagcccagagccgacccgcccgcttatgcaaggctccggcgcctgaagtgacacacttttctgtggattccttcagggatctccttcctccgctcttaatgtcttcggactattcccgcgcgcgtttggggaggctgcgagggccgccgcgctggagcctaaaggtaagtcccttcccgtcctcttctctctctcttctgacttaagaaaacgggcgaatccttgctacttttttttttctttctcccctttggttccctttctctggtctccctctgatctcttcctccctctccctttgcctcgcactcgtgattgtggacaccgggaccactggactcggagttcggctcagggctgcgggctcagggatgtgcgggttctcaaaagagcagcggagtccgagccgagtccgctgacgggctcacgagcgctgcgcctattggctccctggcacgtcggcgtccctcgctcgcgcgggcgcggccaataggggcgcggggccggacgcgcggcctcggtggcgggggcgcgggcccggcgcggcgcggcgcggggagcggcggtagtggccgtgacgtcacgggagggggtcggcgccgcccgccagcagccggattacaagcgaacgcgcccggcagcggccggagtcgcccggcatcgcgtctccgccgcttcctccttctgtgcctgctccttctcgtcgtcctcctcttcctcctcctcctcgggttgccgcaaccgctgcggccgtgtctgccccgcaactttccaagaaagttcagaaactcggctacggggctgccgagtggcgcgcggctgccacctcgggagccgcgggggagttccgagggcgcgcggccgcccgggcttcgcggtcgctgcacctgccgcgtccgccgccgccaccgctgccgcccggtgccaggctgtgggcagaccccggcagcggcggcggcggcggctttggcgtagcttcccgccgcctgcgccttcgccttcgcctgcgccttcgccttcgccttcgccttcgcctgggtcctccgcgccgccaccgccgcgccacgtgcgcagtcgttcctggagcgcaagttccgagttttctcagaaatttttttaactccccccgccccccgcatcttttttctttccacccctactttttgcataaaagaaaaaaagttgtgtcgaaagtatccacagattgccacttcccaattacccttccttctctccccgccccacttttttttttttaagcggcggcaacattgtttggtgtttattttgttttacgatcgatagctttcttcgctggttcggggcggctgctgaacggcggagtggcgtggacctcatgtagcaatgacaatggaaggggccagcgggtcgagttttggaatagacacgattttgtccagtgccagttcaggcagcccaggcatgatgaatggagatttccgcccgctcggtgaggccaggaccgcggattttaggagtcaggccaccccatctccctgttc

SEQ ID NO: 1948 - DNA, 2300 bp, Homo sapien
caggctggtctcgaactcctaacctcaggtgatccacctgcctcggcctcccaaagtgctgggattacaggcgtgagccaccacgcccagcctagaaacagaatcttataggctgggttgcacataggcaggtatggacatataagtctagatttacaagtaggtcacactgacctgaaaccacatttcctgtagtatgcaattagactgaaagaaagtcacatctgtgttttccacattgtgatgtgatgcactgcaggtcttcagtgaattcgcttgccacaaggaaattctggcatgtgttgtatgtgaaatgtgatatgtacttaatttaaaaaattgagtttcgtgatttctgtgtctttaaatttgatacacgttttgtattgaatttctatgttaattgttttcataaagtgaaaagaagtaaaaacctcaccaactggttttatgtagaagaggtaaatctgtgacgtttgctccttctcttgtccaggaggatgaggctgtcactactacagttgggactgtttcatactccgtgctcttgtgctatgccagggggtactgtctaacccacaagtctctgccaggaatgttgctgtccacactggagtgtaagacacctgcggagctcgtctatggggctcatgttggctgaggctctgaactacagaactgcaaacaaccaagggagcgccccaggccccaggtattcctaaaccttagatcagagccatttgcagcacagagttgtgtgctgtttcaaaaccacagaccctgtatatacgcccctccattgcagaggtggatgtcttggcaaatgtaggacgaggattgaaaattaaaaaacaaacacaccgtgttcagggtgaaaattacatacattgacaatactgtctcttttcctccacaatcttactgccaccaggcagcctcagtcagtccgtgcttatttcactgaaaatgtacttaatctcagaaaagctatctatatgtaagaacatattttgttaatcaattttatgaaaacaaaacccctctcaccttagttgaataaagtgctaatttgaaatactgcctcatgattgtaatatgcacacatatgtaatagtatttgttttttaggtgtcccttaacaagacagggatgagcaaactatatggtgcgtgctggaaagaaattcagttttaaatgaccttaaggaaatggcttgtttggttaaggaaaataaactcaattgacagttaaggtgaaatgaacttgtaaaatttcgtatcaattacaactcttatcgataaaatgccacctggatctttaaaatgccaaggtgttcaaagttatcagaaaatttaaaattggggggggggggttgaagtatttttgttgttgttgttattgttctccctcgcactaaacagcatagaagtaatagtttccgtcacttcaggcttctattgggggattttcatcttgttccagaaggaagtagcaggaaagcaacttgtataggtaacagcctcagtctaaagggcattatttccaggcagaatttctatagttacccttgtctgggaacactgttaagggatatgttttaattttaggtcagaacaactgggttaagcattatgtaagatctggagaaaacactgatgagggaaggtggaggagaaagcaagcaacattagtttactgcgcggccaaaggactactccaggcaccagtgaggaagggtaatttagatttctagtgggcaccctgccggcccatttcataacaatcagggggcctggagtgggggggcttgcgggtagttgatatcaaatcccggtctctctcacttccgctcaatcggcttttggccaaagacgagtatcttcttcctggactgccttctcccaccccaacccagacaccaaggggacgcgacagcggttttgggacgctggctgatcatctgagaggaggcgatcccggccccgctgggcgttcaggatcccgatctggatgccgtccaccccgccccgccgggggctggggcgaaagcggaacaagtcggcggggctggttgggccgcgacctccggggcacgtggccgcagacagtgcccgtgccggggcggggaggcgagttctccctgcggccgcggaccctggatggtggcgtcgcccgaagacgcgcctcaccggcctgggtggggttgccttttgccctcgaggctggcctaagcgctggggggccgctggctaaccctgaggtagatactcgggaaatgggtggaatagggaaagggactc

SEQ ID NO: 1949 - DNA, 2300 bp, Homo sapien
catcataaattgaaaatattgtaagtcaaaaatgtactttcaacttaacatatttttaaactacaataggtttatcaggacaatcccatcataaattgaggtgcatctgtagtttaaagctcagtgcctggcatggagtaaatgttcaataaatattagctgttaaatgcaaattaaatcaataatattggaaggcacaaggtgaaggtgctgggtctggctctttgctatgccagtcctcagatgaagcaaggttccctatccccattgctttctgacagaggaatgtggtacttcatttatgctgtgaggatgggggtgaaagcccaatggcaacagctgcctccacagctcaaatacccaacgagatttcctttctccccattcttcaagggttggcattgcagataagccctcccatgcaaaagtcatgggggcacttaacctaagaagaatgtggtataaattctgcatcttaccttcacaccttgtgattcactctgcatgaatgtcactttattactacaaaggcataattctagctgctaaatttttttcacaatcaataaccagtagtctaggctctaaagctatgtttttcaggcaaaaggaatatcacttggatgcaaactagaacccttctaaaaaatgattgataggtggttcatggatgactatctgatgaaagtttgtaaggggaaaaactcagaagttccagatgtatattcctgaccactgagaaggaaaataacaatgtctccatggcctggtccagtcaaaatagctaccaggctgaatcagtatttttttttttttttttttttttgagacagagtctcactctgtcacccaggctggagtgcagtgcagtggcatgatctcagctcactgcaacctccatctcccccgctcaagagattctcctgccccagcctcccgaatatctgggatcacaggcatgcaccaccatgcccggctactcttttatatttttagtagagacggggtttcaccatgttgaccaggctggtcttgaactcctgacctcaagtgatccgcccgccttggcctcccaaagtgctgggattacaggcgtgagccacggcgcctggcctaaatcgccctttcttattactttcttagaactttgggctatctcatttatgaatgatggaagagttctgctgaggatttcaattcagaaagcagggttctctctgtgggtaaacttcatatcacccagacataatttctaccgaacatcatcaattaaataacaagagaggaggtcaacaccttgagacctgaggaagaagaaaaaatacttatcattaagtgtaggatgcaaacattctattagaagcttagaagcaaagagtaagatattattttcgtggatacaagagaagacagagaaagacagagggagcggcccttacgactgatttgtgtttacacaataaggaaatctctcctctggggtctctccgtagttcacagggaccctgcttccaggggcacgcgtggcgaagagagtccgtccagagctccagccctcactgcacttcccaggtgccaagacaaaacatcactgggtggggagagaactgtcatgaggattattcccccgccacacaatgctgagcttctctccctctctttttgaagaagtgcgtttatgactgatcgctcaacaccttgttggttctgattgcagaaaacacaccttataaatatatgataaccatcctgtaatagagagtgtgacaatttacttcacagtgcgtttcgggctgctaattgatcgtttcagtccagggacgatttggaataaattatagccatcaaaaggatatcacagctcattttggtggaagggtttccacgtcgcttcgcgttcgtctcccggagagagcagattgcacccggcgggcgttgaggagcggagggagggggcaggggaaaaggaggccagcggggcggggatgggccgaagggcggggccggggggcggggcagcgtctcccgcggcggctgcaggtccgccgccggacggtagaggcctcccttccgaggaggcggtgctggggcgggcgcaggactgcaggctggggctccgctccccggcgggagcccgcgcgtggttcccagcgaagtccccgcgcggctgggcccagcgtgagtattctccgcccgctgtcctccccctggaggcggcagcgcccgtttatttgaggtgagagtctccctcgggcagagggccctgcttggggcgggggtgcttgcgtgcgcggggtctc

SEQ ID NO: 1950 - DNA, 2300 bp, Homo sapien
aggagagaagacagaagttgatggaggaaattcgtgaattgaaagaacttcaggatgaaggaagaagtgcacgattacagtgtcctcagtgtgtgtttggtaccaattgccctaaaacatttgtgcaacatgctaaaacccatgaaaaagataaaaggtactactgctgtgaagagtgtaacttcatggcagtgacagaaaatgaattggaatgccatcgaggcattgcacatggggcagtggtaaaatgccctatggtcacttctgatattgcccagagaaaaacacaaaaaaagactttcatgaaagactctgtagtaggatcatccaaaaaatcagctacctacatatgtaagatgtgtccttttactacttcagccaaaagtgttttaaaaaagcacacggagtacttgcattcatcatcatgtgttgattcatttggtagtcctcttggacttgataaaagaaaaaatgacatccttgaagaacctgtagatagtgatagcactaaaacattaactaaacaacagtcaaccacatttccaaagaactctgctttaaaacaagatgtgaagcgaacatttggatcaacctcacaatcaagtagtttttcaaaaattcataagcggccacacagaatacagaaagctcggaaaagcattgcccaatcaggtgtaaacatgtgcaatcaaaacagctctcctcataagaatgttacaattaaaagcagcgttgaccaaaaacctaagtatttccatcaagcagcaaaagaaaagtctaatgccaaggcaaatagccactatttgtatagacacaaatatgaaaactataggatgatcaaaaaatcaggtgaatcatatcctgtgcatttcaaaaaagaagaagctagttcattaaattctttacacctgttttcatcatcaagtaattctcacaacaattttatttcagaccctcataagcctgacgccaaaaggcctgaaagcttcaaagatcacagacgtgtagctgtaaagagagtaattaaggaatctaagaaggaaagttctgttggaggggaagacttggatagctatccagattttttgcataaaatgactgttgtcgttttgcaaaaacttaattctgctgaaaagaaagatagttatgaaacagaagatgaaagttcctgggataatgttgagttaggagactacactacacaggccatagaagatgaaacctatagtgatattaatcaagagcatgtaaatttattccctttatttaagagcaaagtggaaggtcaggagcctggagaaaatgctactcttagttatgaccaaaacgatggcttttattttgaatactatgaagatactggaagtaacaactttttgcatgagatacatgatcctcagcatttagaaactgcagatgcttcattgtcaaagcatagttctgtttttcattggactgatttgtctcttgagaagaaatcgtgtccttactgcccagcaacatttgaaacaggtgttgggttatcaaatcatgtcagggggcatcttcacagagcaggattaagctatgaagcccgtcatgttgtatcaccagaacaaatagccacaagtgacaaaatgcagcatttcaaaagaactggcacaggaacacctgttaaacgagttagaaaaggtaagttctccatggggatgatttgggctgataggtctgtgttctaattctgaagatttaaaagttttttttgaatttagtctttattagaatcataattttatgtttcagaattaactcattttagggtggtcagtttatataagaaagtctgatattactcttaaaaatttttttctagctatagagaagtctgaaaccacttctgaacacacttgtcagctctgtggtggttggtttgatactaaaattggattatcaaatcatgttagaggccacttgaaaagacttggaaagacgaaatgggatgctcacaaatctccaatctgtgttctgaatgagatgatgcaaaatgaagaaaaatatgaaaaaatcttaaaggcattgaacagtcgtcgtattattcccagaccatttgtagctcaaaaacttgcatcaagtgatgactttatatctcaaaatgttatacctcttgaagcataccgtaatggcctaaagactgaagctctgtcagtgtctgcatcagaagaagaagggctgaatttcttaaatgaatatgatgaaacaaaaccagaactgcccagtgggaaaaagaatcagtctcttacactcatagaacttcttaaaaa

SEQ ID NO: 1951 - DNA, 2300 bp, Homo sapien
gatggtgaagatttattggtgaaagatgattgtgtcaatacagtaacgggaatttcctcaggtacagatggatttaggtcagaaaatgatacaaactgggatccccaaaaagagttcattcaatttcttatgactaatgaggaaacagtagataaagctccacctcattctaaaataggtctagaaaaaaaaagaaagcgaaaaatggatgtaagcaagataactcgttataccgaggattgctttagtgattctaattgtgtacccaataaatcaaaaatgcaagaagtagactttctagaacaaaatgaagagctacaagcagtagactcacagaaatatgcattatcaaaagtgaagcctgaatcaactgatgaagacttagaatctgtggatgccttccaacatctaatttataacccagataagtgtggagaagagagttcacctgttcatactagcacttttctttcaaataccttaaaaaagaaatgtgaagagagtgattctgagtcacctgctactttcagtaccgaagagccatcattctacccctgtacaaagtgcaatgtgaattttagggagaagaagcacctccacaggcatatgatgtatcatttagatgggaatagtcactttcgccatcttaatgtcccaaggccatatgcttgtagagaatgtggacggacatttcgagatcgcaattcacttctaaaacatatgattattcaccaggagagaagacagaagttgatggaggaaattcgtgaattgaaagaacttcaggatgaaggaagaagtgcacgattacagtgtcctcagtgtgtgtttggtaccaattgccctaaaacatttgtgcaacatgctaaaacccatgaaaaagataaaaggtactactgctgtgaagagtgtaacttcatggcagtgacagaaaatgaattggaatgccatcgaggcattgcacatggggcagtggtaaaatgccctatggtcacttctgatattgcccagagaaaaacacaaaaaaagactttcatgaaagactctgtagtaggatcatccaaaaaatcagctacctacatatgtaagatgtgtccttttactacttcagccaaaagtgttttaaaaaagcacacggagtacttgcattcatcatcatgtgttgattcatttggtagtcctcttggacttgataaaagaaaaaatgacatccttgaagaacctgtagatagtgatagcactaaaacattaactaaacaacagtcaaccacatttccaaagaactctgctttaaaacaagatgtgaagcgaacatttggatcaacctcacaatcaagtagtttttcaaaaattcataagcggccacacagaatacagaaagctcggaaaagcattgcccaatcaggtgtaaacatgtgcaatcaaaacagctctcctcataagaatgttacaattaaaagcagcgttgaccaaaaacctaagtatttccatcaagcagcaaaagaaaagtctaatgccaaggcaaatagccactatttgtatagacacaaatatgaaaactataggatgatcaaaaaatcaggtgaatcatatcctgtgcatttcaaaaaagaagaagctagttcattaaattctttacacctgttttcatcatcaagtaattctcacaacaattttatttcagaccctcataagcctgacgccaaaaggcctgaaagcttcaaagatcacagacgtgtagctgtaaagagagtaattaaggaatctaagaaggaaagttctgttggaggggaagacttggatagctatccagattttttgcataaaatgactgttgtcgttttgcaaaaacttaattctgctgaaaagaaagatagttatgaaacagaagatgaaagttcctgggataatgttgagttaggagactacactacacaggccatagaagatgaaacctatagtgatattaatcaagagcatgtaaatttattccctttatttaagagcaaagtggaaggtcaggagcctggagaaaatgctactcttagttatgaccaaaacgatggcttttattttgaatactatgaagatactggaagtaacaactttttgcatgagatacatgatcctcagcatttagaaactgcagatgcttcattgtcaaagcatagttctgtttttcattggactgatttgtctcttgagaagaaatcgtgtccttactgcccagcaacatttgaaacaggtgttgggttatcaaatcatgtcagggggcatcttcacagagcaggattaagcta

SEQ ID NO: 1952 - DNA, 2300 bp, Homo sapien
caatattaacctttgaggtgctttttaaatatttcaatatgtttgtgttctttcattcttggaaaattattagaatctcaatataaagagtagaaaattaaactaataaaaatatgtactttcaactctccatacattctaatagtattttttctttcatgcaaatctaaattttttttttccattttctagactaaatgtgttaaatgggcttgccaacaatatggatgatttgaagataaacaccgatattactggtgctaaagaagaactcctagatgacaacaattttatctcagacaaagagagcggagttcataagccaaaagattgtcaaacatcatttcagaaaaataatacgttgactctgcctgaagaactgtcaaaggacaaatctgaaaacgccttaagtggaggccagtctagtctatttatacatgctggtgctcctactgtttctagtgaaaactttatcttgcctaaaggagctgctgttaatggaccagtttcacactcctccttaactaagacttccaatatgaataaaggcagtgtttcattaaccactggacagcctgtggatcagccaacaacagaatcttgttcaactttgaaggtagcagctgatcttcagctgtctacaccacagaaagcaagtcaacaccaagttttatttttgttatcagatgtagcacatgctaagaatcccacccattccaataaaaaactacctacctctgcttcagttggttgtgacattcagaattcagtagggagtaatataaagtcagatggcactttaataaatcaagtagaggtgggtgaggatggtgaagatttattggtgaaagatgattgtgtcaatacagtaacgggaatttcctcaggtacagatggatttaggtcagaaaatgatacaaactgggatccccaaaaagagttcattcaatttcttatgactaatgaggaaacagtagataaagctccacctcattctaaaataggtctagaaaaaaaaagaaagcgaaaaatggatgtaagcaagataactcgttataccgaggattgctttagtgattctaattgtgtacccaataaatcaaaaatgcaagaagtagactttctagaacaaaatgaagagctacaagcagtagactcacagaaatatgcattatcaaaagtgaagcctgaatcaactgatgaagacttagaatctgtggatgccttccaacatctaatttataacccagataagtgtggagaagagagttcacctgttcatactagcacttttctttcaaataccttaaaaaagaaatgtgaagagagtgattctgagtcacctgctactttcagtaccgaagagccatcattctacccctgtacaaagtgcaatgtgaattttagggagaagaagcacctccacaggcatatgatgtatcatttagatgggaatagtcactttcgccatcttaatgtcccaaggccatatgcttgtagagaatgtggacggacatttcgagatcgcaattcacttctaaaacatatgattattcaccaggagagaagacagaagttgatggaggaaattcgtgaattgaaagaacttcaggatgaaggaagaagtgcacgattacagtgtcctcagtgtgtgtttggtaccaattgccctaaaacatttgtgcaacatgctaaaacccatgaaaaagataaaaggtactactgctgtgaagagtgtaacttcatggcagtgacagaaaatgaattggaatgccatcgaggcattgcacatggggcagtggtaaaatgccctatggtcacttctgatattgcccagagaaaaacacaaaaaaagactttcatgaaagactctgtagtaggatcatccaaaaaatcagctacctacatatgtaagatgtgtccttttactacttcagccaaaagtgttttaaaaaagcacacggagtacttgcattcatcatcatgtgttgattcatttggtagtcctcttggacttgataaaagaaaaaatgacatccttgaagaacctgtagatagtgatagcactaaaacattaactaaacaacagtcaaccacatttccaaagaactctgctttaaaacaagatgtgaagcgaacatttggatcaacctcacaatcaagtagtttttcaaaaattcataagcggccacacagaatacagaaagctcggaaaagcattgcccaatcaggtgtaaacatgtgcaatcaaaacagctctcctcataagaatgttacaattaaaagcagcgttgaccaaa

SEQ ID NO: 1953 - DNA, 2300 bp, Homo sapien
cagtcatattgggtaaaggcctcataagttaccttatttaacttgattcctgaaaggctctcgctctaatataaatttctgttatgtaagccacccagtctgtagtattttatgacagtcctagcagaccaatgcagttcgtaacatcttttatataggggtgcttccagtttatctccttgagaacttgctgtcttcagtgtattaatttcctgtggttgctctaacaaattaccacaaactggttggtgtaaaacaatagaaattaattctctcacagttctggaggccagaagttcaaaatcagtattattgggccaaaatcaaggtgatggcagggctttgttccttctggagggaggctgtagaagagaatccattccttgcttctccctgatactggtgggtgctggcattcctggctatggcccatgtccttccagtctacgaaagcagcattttcagttctctctgccatgtcttcttcttcttcctcttttttggagacagagtcttgctctgttgcctaggctggatgcagcgacgtgatcttggctcattgcaacctccgcttcctgagttcaagcaagattatcctgcctcagcctcctgagtagttgggactacgggcgcgtgccaccacgcccagctaacttttgtatttttagtagagacggggtttcaccatgttggccaggctggtttcgaactcctgacctcaggtgatctgcccaccttggcctcccaaagtgctgggattacaggtgtgagccactgtgcccggcctctccgcttgtcttctcattgccttcagtgtgtgtctcgttcttataaggatacatgtgattgcactgtggtccacccagataattcggaataatcctccctctcaagatccttaatttaatcatatctacaaagacttcttcttttttttttttttttttttgccatatgaggtaacattgtcagatttcagggatcagggtgtggaagtcttttgtggggcaatagttcagcttatcccactcagtcgtttataatagacttttaatgttcttacttttattttatagtttagtttttaacaggcccccatgtccacttctgggttggtgggagatgatggcattgggtggcagagaaaatatctcatcttttctagatacgatgcagaaaattctaggtctgtggttctaggaaggacaaatcagagatgatagtttggaaataaaacagttaaagtaacctagcttgagaacagaggtaggtgtggtggtgctattttttaaagaatagagaatttagaagagtcacaagctagtttcaggtatggggaggaggagatatgtagagtgtgggacatactgagttttcagaagttctgaaatatggtaaaattagtaatggtggatatatttttggcaaatgcatgttcagtggattgttggtgtagaagtcactttatactagattaaagattaaattgaagatggggagtattgatacattctattctctagaataatgatgcttggcatttagtaagtaatcagtgttggctattatgataattactgtggttgctctaacaaattactttgttatatacttttatgtgtatatacttttatgtgttccaatactataacatttttgtcttcagctgtttggtgtgtgtcttgatatgtacataatattaaataaatactgatctagaaagatgtgtgttttagtaattattttaattattgccattgccatactattaaaattaatgaaaacaatttagaattttttttaaaaaaaagaattagtttcaatttctcatttgaatagattattatttctcaaaaaaagcagtgaggttggggggcacttagcaatagtttcctaaagattaaaatgatggtattctggttgaatggtttttttatgttatatcaagaaatataatttggtttgtgttttttcatttaaaataatagtgtattgtagctatggttattcatgcctgaaacaaaaaattaaaccttggtcattgtgtgtatttctttcaggtttgatttaattttggatgagatcgttcttgcagcaagatgttaataagacaaaatctaggtaagtagaagactgctttgttaaatgtacatatcaaggtaggaataatacaaaaaaattatgtcttaaaaatgtggtgttgagttcagaaccaaagagtttttaaataaaattttgaaatgcaaataattgactttttgacacacttggtccagttgatttgatgggagtaaaattat

SEQ ID NO: 1954 - DNA, 2300 bp, Homo sapien
acattaatgacagttattttcttagtaactgcttttacagtgatataatgtaagaatttccatagtacataatattttgtagtaagtccaatagtaaactgagaatgtccaattttaatggattctgcaaacgaaatgatccaaagagcacccctcccccattgactgcaaatatatacgtatttatattttattgtttacacatttgtgtaaatgaagacaggagatttgcattttaaagagcccaaagaactgtatgacttcgagaaaatcaccttactcctctttgtctcattgggttacaatgaaatcgagcaagttagaacaatgcctggtacacagtaagcactcaaaagtgttagctattaagtaatgaagcaattaatgtgtttagtcaaatatttgttgtttggaatctacgtttgctgttgctgaaggcatcattccataggaaagagaatgtttctcattcttgtcaaataaatgcagttatggtatattcttccgaatgtcaataacatcttgagggtttggagggccacagtaatgacagctgtacaactaaggaaaacttttttatttttaaatttttaaatgagtaaacagaggttcagagaagccaaataattaaggcgggaccagtagatttctcaagaactcttggttaatcttaaacatgttagcagtttctcgttggctcagtcgaaaaacaaaagaatagcccactcagtgtttctctgccccaggatcctgtggtgaagtcttgttaaaaatgaaaatttccagaaccctctagggactgattctctgaagggttaaccagcatctcacatgcttcttatataactttaattcgtagaaccacgacactttcagtaatgcagggagagagtatcctcagagagtcaaactggagcaaacctcggccacctttcagggcaggctgtccgggtaactgagatgtcacacttgatgctttgcctggccatcaagcaactcccaacaatctgcccccttaagatcctaaaaccttccctctgccattactccacagttgtgattggcaaatattgctgttttcctcaacaagaggaaaataacagagatttttgcacgctcgtgatcgtggaactcaaacctgggcctgttccaccttaaagggcctaggcatgcctagtgcttgggtcttgcagagtttgggcaccaccatatttggagcgtgcctactttggggcgggaacctccttgggagtgattaggtcagcgctgggggaggtgaccttgtttggtttctggcacccgagaacagtggtgcactgtttccgctgccctcgtttgtctaattggcccagacgctccaccagcgcgaagcttcccgggagctcctcgctggccacccccgcggcccgcagcccggcagaggcgggaaagcagcgcgcctgcgccgtgggaaccggggctggaggcgaaaagcggggagcggaggggggccgctggagccgagtagcgtacagagcggcgtgtgacgcggggacgccgcgtgctcccaacgtcgccccggtttgacgcacacggcaccaaactgtgagtttcaggggttatttggtcagattcgctgggacccgagtgggtttcgggcctctgggctgtggcagcggcgggactgagggtggcggaagaacttgggggacccggcctccggctctcgggcccggggagctacgccctaggctgggtcccagccatccaaaaggacgcattttgccgcacaggctaagatggcggcggcggccgaggaggcggagttggtgctacacaaggagcccgggccccgggttcggggaggcggcggccgcggcggtcgctgggggccacggagcctgaggtgagcggcggccgccgccgcggggcgggactcggcggggggatggggggggggctttccgctgcggcgtcggaggatccggtagcggacacaaaggggctgagctgggcactagacttgggggttttgtttagtcacatgaagccgagcagccagtgagcagtagggggaaggggccgagatcaggcggcttggggagcctggcggtcgccattgcaatgcactgagtaacggggcgggccgagagcagtcaccaacccctctcgttgaggctgctcggttgtggccagaaacgctggctctggcattaactgtctacacccctccccttacttgggacaggaccgcatagccctcccctccccccgtcctgcaagatcttatgcggctaggtgcctgggaagtaacagcaaga

SEQ ID NO: 1955 - DNA, 2300 bp, Homo sapien
caatacgctgcagcataatttgtcaggtcaaccttcacaccatattttggcagttcgtgtacatatgctgtgcagactatcatatccccctctgtacgggcataagcaatctgacaaatgatactctgtttgttccacgaactatcatcctgtatttgggtatgttgtattcatttttatcctgtatcaccaagtgtttctgagcatagtaatcagttttaccctctcgtcgtcttctaaatttcacttgatatctcttaaagtaggccttattcttaataacttttacaaaccccatcctgcagaacagagacccacgtctgcggctagacagagaactcacgtgtatttttttttcttttcgcattaccttattcaagctttctgtcattatattttctgccattcatagaagcttttgagatccattttgtacagcgtttcatcaactattactacttctactattataattactatgattacttttactgctattatgacttccacagtattacaattcagttgctgagttctagtgtaaaaaacagcttcattagtgagacaagttcctgatcatggctgagttctgaatgattctatttgcttgtgtgatttgtctgcacattagtcagtggtatacattaatgacagttattttcttagtaactgcttttacagtgatataatgtaagaatttccatagtacataatattttgtagtaagtccaatagtaaactgagaatgtccaattttaatggattctgcaaacgaaatgatccaaagagcacccctcccccattgactgcaaatatatacgtatttatattttattgtttacacatttgtgtaaatgaagacaggagatttgcattttaaagagcccaaagaactgtatgacttcgagaaaatcaccttactcctctttgtctcattgggttacaatgaaatcgagcaagttagaacaatgcctggtacacagtaagcactcaaaagtgttagctattaagtaatgaagcaattaatgtgtttagtcaaatatttgttgtttggaatctacgtttgctgttgctgaaggcatcattccataggaaagagaatgtttctcattcttgtcaaataaatgcagttatggtatattcttccgaatgtcaataacatcttgagggtttggagggccacagtaatgacagctgtacaactaaggaaaacttttttatttttaaatttttaaatgagtaaacagaggttcagagaagccaaataattaaggcgggaccagtagatttctcaagaactcttggttaatcttaaacatgttagcagtttctcgttggctcagtcgaaaaacaaaagaatagcccactcagtgtttctctgccccaggatcctgtggtgaagtcttgttaaaaatgaaaatttccagaaccctctagggactgattctctgaagggttaaccagcatctcacatgcttcttatataactttaattcgtagaaccacgacactttcagtaatgcagggagagagtatcctcagagagtcaaactggagcaaacctcggccacctttcagggcaggctgtccgggtaactgagatgtcacacttgatgctttgcctggccatcaagcaactcccaacaatctgcccccttaagatcctaaaaccttccctctgccattactccacagttgtgattggcaaatattgctgttttcctcaacaagaggaaaataacagagatttttgcacgctcgtgatcgtggaactcaaacctgggcctgttccaccttaaagggcctaggcatgcctagtgcttgggtcttgcagagtttgggcaccaccatatttggagcgtgcctactttggggcgggaacctccttgggagtgattaggtcagcgctgggggaggtgaccttgtttggtttctggcacccgagaacagtggtgcactgtttccgctgccctcgtttgtctaattggcccagacgctccaccagcgcgaagcttcccgggagctcctcgctggccacccccgcggcccgcagcccggcagaggcgggaaagcagcgcgcctgcgccgtgggaaccggggctggaggcgaaaagcggggagcggaggggggccgctggagccgagtagcgtacagagcggcgtgtgacgcggggacgccgcgtgctcccaacgtcgccccggtttgacgcacacggcaccaaactgtgagtttcaggggttatttggtcagattcgctgggacccgagtgggtttcgggcctctgggctgtggcagcggc

SEQ ID NO: 1956 - DNA, 2300 bp, Homo sapien
gtgccatgcagttggaaaacggacagtctttcaataaatgctgctagatcaactggatgtccatatggaaaaaattgtatgtcagtctgggcgcggtggctcacgcctgcaatcccagcattttgggaggccaaggtgggcggatcatgaggtcaggagattgagtccatcctggctaacatggtgaaaccccatctctactaaaaaatacaaaaaattagccgggcatggtagcaggtgcctgtagtcccagctactcgggaggtgaatggcatgaacctgggaggcagagcttgcagtgagccgagattgccactgcactccagcctgggtgacagagtgagactccgtctcaaaaaaaaagaaagaaaaaattgtatgtcaactctgacctcacactgtacacaaaacttatttgcaaatagatgactgatttaaatgtgaaagaaaaacaataaaacttttagaggagaaaaaataggtcttcgagaccttgggataggttgacttttttaaaaaaacagggcacaaaactttctaaccataaaaacataatgaatttgactatgttaaaattaagaactctgttcatcaaaaagataccattaagagtgaagggtgcaactcacagaatgtgaggaaaaaaatggaatacatatacctggctgttatgggctgaattgtgtttacccccaaataaatatgctgaattcctcagaatgcgactatatttggagatagggtctgtaaaagataattgaattaaaatagggttccttagtgtgaaccccaatccaatatgcctggtgttcttataagaagaggaaattaggatacaggcacacatggagggaagatcatgtgaagacacaatgagagagagccattcacaagccaaggagaggaacctcaggagataccaaccctaccaacaccttgatcttggacttgtagcctctagaattgtgaaacaataaatttcagttgtttaagccactcaatctgccactttgttatggcagccttaacaaattaatacactggaaagaacgattttacataatatataaagaactcctatatgtataagtaaacattttaaaaatgggtactcaattaaacagacacttcaaaatagaggatatccaaaaagtcaggaacctatgaaagagtatttaagttcattagacaaagtgagaatgaaaatctacaatgagatattgctgtatcattgtgcaaccatcaaaaggacttaagtgaaaaagaaaataccaagtattgataaggatatataacaactactactcttaatcactaatgtgattatagattgatacaactacttccgaaaactagcagtatttattaaagtttagcatatgcattctatgatagagtaattccccttgcatattatgtgatagagcaattctgcttctaggtatataccagataaaagtgtgcatatatgttcaccaaaagatgtattttggaatgttcatagcagtactatcatattagccctaaaatggaaaccagccaaaagctcatcagcagttagatggacaaataaattgtggtatattgacccaatacaattctacaggggtcagaaaactttcctaaaaggccagatagtaaatgtttttggtttgcagactatagatcttctttatatctatgcaactctgtctttgtaggtgtttgcaacccaaaagcagccatagacaatatgtaaatgaatagacatgggtgtattccaataaaactttatttacaaaaatagatggttggcccatgaactatagtttccaacccctgctatagagcaaggagattgaattacctatgactacacacaacaatatgaatgaatatcactaacataaagttaagcaaaagaagccagacacaaaaaggtaatactgtatgagtccatgtatataaattgcaaaaataagcactactaactctcatggtttgaattgtgtttcacaaaaacatacattgatggtctaatccctggtacctgtgaatgtgatcttttttttttccttctttggcattattttattttgattattttttattttatttattattattatactttaagttttagggtacatgtgcaaaatgtgcaggttagttacatatgtatacatgtgccatgctggtgcactgcacccactaactcgtcatctagcattaggtatatctcccaatgctatcccttccccctccccccaccccaccacagtccccagagtgtgatgttccccttcctgtgtccatgtgtt

SEQ ID NO: 1957 - DNA, 2300 bp, Homo sapien
tgtatagtattgtttactggcaatattgtcttctttcaggactttgaatgtatcatctcatgctctcctggcctgcaaggtttctgctgagaaacactgatagtctaatggagattcccctataaatcacttgacacttttctcttgctacttttaaaattctctctttgtctttgactttccacattttggttataatgtgcctcagtgaggacctttttgggtttgaacgtgtttggtgattttgagattcatggaactggatgtccatgtctctcccaagacttgggaagttttcagcaattattttattaaataaactttctatgccttttcctcattcttctccttctggaacctccataatatgaatacttgtttgcttaatggtgtcccataagtcctataggctttgttcactcttttttgttcttttctctttcttttttttccctctgactaggctatttcagaaacctaacttcatttcacagattctttcttctgcttgttttggtttgctgttgaagctctctatttttgatttcattcatttaattctttagctccaagatttctgtttggttctttttgaataactttcttgtgcagataatgaattgttttcctgatttcattgacctgtctatctgtattctcttgtatctcagtgagttttcttaggatcattactttgaactccttttcagacagtttacaaatttctgttttttggaatcagttactggagaattattgcgttcctttgttggtggtgtatttcctggttttttggttggttttttttttttttcatgtttcctgtgtccctctattgatgtctgcacaactagtggaataatcacctctttcaaatttatagagaggcactttcctttagtcattctgttcaaaatgtagttagttgtttattcattgttttgctcttttttgtggggaagatgagcattaggcatctctagttgaccatcttgcttcctcctaacctagtttttttaaatgccatgtctcagagcactggaaacactatggtttatttccatgttttttttttttttttttttgcttatttactagtaatatagtagttttagaaatggttacttcttataattttttttaggcaaattatgagagtagacttttatactgacttgttaatcaccaattatgttgttttcttggggaaagtgagttttccaaattcttggtttaaaagtgagctttaatattgtagctcataagtttagggacttttgaatatgaaagttggatattttctacttcttaaaatagttttcagataatgatattgtgaaaattttttgatatctctaagttttaaaataataaactgtttcagagttctctaatgttactgggagtaactcaataattttatggtatttttaaataggttacagaagtatgcatattccgtaagagattcaaaactgagaggtaggtttagagataatttttgaatagcattttcacatatagatgaaaggtgccaattattgatgaaatattaatagtaacagctgatatatttctattacagatatcttaaaagatggtgctgcttatcatcatgctggtatggagctgtcagatagaaaagtagttgagggagcttttactgttggagatttaccagttctttgtaagtaaaacatatttctcgtggatactataaaatattttggaaaattatttttaagaggaaaaaaggaaaaagcgcaagtgttctgcttgtttctgcttttcttctgagaatataaaattaagtggttacctatgcatgtagatgctacagtaaattctttggtagtgtttagttctttatcatattgttgaacatggtgtaatttgaaaaacaagaatttaataggtttttggatttaaggtgtgttactattttagattgtaatgctcttttttcttttctaaatttcttatgtatgagtttttattacatttataagaatgtcttttattaaaaaatgttcctgaagcaacaaagttaaatggctcaaaattactatgtcttaatctgatgcagttactaccagtactttagctatgggagtaaatttgcctgctcacctagtagttataaaatctacaatgcattatgctggaggactgtttgaagagtacagtgaaacagatattctacagatgattggtagagctggtcgacctcaagtaagtgacaataactttgctttttatacttaaaaacatgataaaaacaaaaaaattgtgtatttttt

SEQ ID NO: 1958 - DNA, 2300 bp, Homo sapien
atgttttaaaattatgatttaataaatacaaagcagctattgtaaataacttaaaggatacgaatttctgtgacagccttcaaggaacctaaaccattttctgttacctctgaaaaaaaaatgctacatatttatataaatatcaaaaaaaaattaatggtcagaagctaggacctgaaatgaatatttttaacctttccataaaaactgtttcaataaaactaacacaactttttattgagagcaaagttaaaaatatttttagcacacaggataaaatattttaacacacagcacagcttagaaaataatgcaatataataaaaaaatgcagaaattgcacagagagataatttactcaaatttactatatttttacattttcccccatgctaagaaatgtggtttagtctgtactcataaaatgaactgaaaaagcaagaaattaccttgaatatcatgaggttggaaagcaactgaaaaagatggtgctttgaacatgccttctccgatttcagaagcagaaaaagcattatttgctgtaaacacatttgcagaatactgaaatttttgcttactattgctatagttccttgatttccctttgttcatttctgtttgtacaattttcactgagccaatgtgagagtccaattcattgtcattagaataagcactcccatgtatattgtcagatattttaaataatctgcaaacaaaaaaaagacccacatattttctcacgtgtaacacttgcttggaatatgaaaaactagcataaaattggcccccttaaaaacactcatagattatggtttactcaaacaaaaaagctaaacattctcctaaaatataacttgctagtttaccactgaagtatgtctttctactttcctaaaactcagataaatccatttgtggcagtcatcctccaaaacagcccaatgatccttgcctgctcctcacccctttacagtctcctacaaattgaatcgctgaatcaggactggcctgtctaactagcagagtactgcagaagtgtaaatgtttgacttacaaggctaggtaataaaagacattgccccttccccatggtctcttagatctctcactctgtggagagctagtcacaatataaagaaagcactcaaacaaccctatgaagaggcccaggtggagaggtactgaggtctcctgccaacaaccagcactgacttttcagtcaaggacagcaagccaccttgaagagagacctgatagctcctgtcaagctttcagatgactgcagcatggctaacattttgattgtggccttcttgtgagaggcccccaatacctttacgcattctcacaagagagcctaagccagaactactagctaagttgttcctaaattcctagcctggagaaactgtgagagataataatgttcattgttgttttaaactactacattttgggataattttattatacaacaacagataactaatgttccatttaaagtcagtaaagtgcttaagagagagaaaaagccactaaatatagtcacagtaaatagtaaatttcataacacctaatagtatttaaatttaactgaagtgattcaagttactgaattatattaacatattcaatttataggaataagttaacagacttgttatgaattaaaagttgtcagcaactgcatttcacgccacagaagctaccagataagacagttttcctagccaatcaaatcagcattgtgtatccccccaaaaaggaaaagatataaactaagtatattagcagattaaatcatcccaaacactatatccaataaccatttcaatgtaagaactacttctctgcaaagttctaaaaacaaggaaacactttatgactgtactgtattatatttgatcaaaagacaatctatcgaagtaacttgttcacaatatccctaagggatgaagtaaccgttaaggttcctaataaaacattcacatcttatagaataagtaatggagatgacttatccattcaggggctgaagatcaagtttaattagcaatggccagtgatttcatcagtcttgtctatgaaatagaacctccagctcacgttccctattagtgggtgaacaatccaacgcttggtgaattctgcttcacaatgataggaagagccgacatcgaaggatcaaaaagcgacgtcgctatgaacgcttggccgccacaagccagttatccctgtggtaacttttctgacacctcctgcttaaaacccaaaaggtcagaaggatcgtgaggccc

SEQ ID NO: 1959 - DNA, 2300 bp, Homo sapien
gaacacattaatgagcaaaaagtccctgcttgctctaaagggagaaacataataaacaactaagcatatactataatgttagttatcagttcatgctatgaagaaaaataatgcggaatgagaggatgcagttttagataaggggtgttttttcacaggagtatataagaactaaaatatgtacatgatatttttattctgaacccaaacaagttatattcttgtatgctagaactagaaatcaaaaattcttttgaaaatatttgctgtttgtataggaggtttttgtcagtttatgcaacgcttttcttcccaaatgttttaaatttgtagttttgttgtctatttgtagttgctttaggaagaaagtattcaagtgtataaatgttagccttaagatttttgacttaaattctgaggtagcaaagccatatgaaactggtctggtgaggtttattttaggaaaagtttcttttgtttgaacatagttttcctaaaactagaaagggaacattttatttgttactttttgggcaatataaaaacatgattaacattttcatttatactttttcagataattgttttcaagttctgaaattgtttacttaaagctgttaaagacttcgcatatttctgaatgactccctctacctcctgccctattatcctaggcttctatttttcgtatagtcaaattgttttagacatttatagaaccacactagtttgtttcatttttactacttgtttttgttggtaactgattaatagatagagaaaaatgaagagggcaattatattaaacagatggaagggggaagaacccaataacgaaaacagtgaaaaaccccacaatattctatatcagtaagaacagccctgaagtatatatacaggtttagttctcatacagtagcatttgtcaagtgttgtatgtggaaacattctcccttccccatatcactcccacttgtatctcatccccacatcaaggaggattcaaaattggagagacataatctgacttggtaatgcgtatttctccactagatggcattaatagaatttctttgattgtagtttctatcttgaggacaaatttacaatgtattaactaaaacagaagaaacagaaatgtgatttatgttttacagtttgttcgtctgattttatggtttgtcatatagaatgttctatgatgtttaagaatttagaaaaaaataggatatgcagggaaaaataattctaatgggagcaatgtatgtatctagagactagtttttttttttaatcacatttgcatctttgttcagccccagatttttgttatgttcaaaggtggccaatgctgaatgtttttatcctttatgtttagataatatctctgagtgcaaaaattatcttttaaaaaagaatgtaaacgtgtgtagtatatgcattaactcatataaataaatatgcatatgtatgttaaacttgtaatttttttattttgaaaaagttcaaacctatgaaaaaatattataatgaaccccatgtacctattacatagctttagctttgatcaactcattgtcaatattatttcaatactccttcatctctcccctttattttgaagcaaatccctgcatatgtacatagtatattgttagaggtgcacacattcacaataaaatgtgctgtcctaacttgaaaataatggtgtgaacaaagtattaagagcccaagaagactgattaattctgccttgaggaagaagacaaattcagaaaagcctttgaagaagaaatgacatttgacctataacttgaaggatggttaggaatttgccagttggagaatggcagaaaacacattccaagcattggagcactatgaagagaagggagcaagtgtgaatccatgaatgaatggaaaacagagaataatgtatgtgaatattgaggtgctttgaaggaagttgcagacgatgaagctggaaggatagtctgtggttatattttacaggagactgtggaaaattagtgattatacagaaatatttttttacatctttataaataaaatataaactactttttccatattttgtagatttatgacaaagtccagttttcaacaatgctgaaatcaaatgattgcctgttttctttggaaaatttgttttttgaaaaaccagatgaagttgaaaagtaagtctcccttaaagattgatagcatagtatattactttagggttttttgaatttgggtgagttttagctttctctctggtaaatatacaaataaaaatg

SEQ ID NO: 1960 - DNA, 2300 bp, Homo sapien
ctctgctcaactatgaaatgttggaagttatcatagcccaactctccatctacaatctttgcttagataatatcgtatagtccaagactaggtttcatctataaattcataactgccaagtttatttcttcaccctgaactataccccagaccaatatattcatctgtttctttgacatcatcacttgcatatcttggacttgattattgttaacgacctcccgataatgaccaccaggaacacaactatagctgagcaacttggatgtattgcttgtttcagtacgtgagaatgcacaccatggggaaccatgggatgtcttaggaagagggtgttaaaaaggacttgttatagaatttgagtttgtgttaggagatttacggaagggtgcaagaaagagggactttggcctggattggaagctgtaaggaagcaaggataattctataattgggtattttaataagtattatgtagaaggaaggaagactagactgaggttaaaactataattggtaaagaagcagcaggcactcatattagctaggataaggagatatttgatcatttttatggcttgggcaatgttgatgttgtgtctgtgttcacatatgattatagagtgatcttacttttgtcttgatctatcacggtcacaactctgtcttgtctgatgttctgtgaaattgtttatgttcaacagaagaataccaatgcttggctgtgattgccaggccagctcaaagcaacagcaaaccaagctggtagtaccaggccatctcctggatgtcaaggtctgcttttctctttctcggtatccacactagaatccttgatttactctcttccacctcactcaatcaaaaaccattacctcacagacttcccttctatgtggcactaccacccacacatatgctagcccaaaacctaagattcactgttgatgatgcccttttcttcattttccatagccaatcaccaaatcccattgtcttctttcttttatttcttccgccattgttctggtccaaactaccattatgtttctcctaaacataaagtgcatcctatttcctctgcttccacacttgcccctctacaatccattctcttcataacagatagatcatattactcccttgctttaaaactttcaaatagcttccaattgtactcagaacaaacactaaacttcttaccctggctttcaaggaccctggtctggcttctgcctaactctccaccttcatctatctgggactatcttgcggctcactcactatgcttcccccacactggcctttcctgccctgcccctgcaacataccaagttcctctttctctctgcatttgccctatcctttctttgccaggacaacagtctccctaccagctctttctcatccaggtctctttgagagggcttccctgaccatctagatgccaccttcctggtcagtatttccctcaagtagtaatcaatgccggaaagaatactgttcatttattcatccgttattgtcatcgcttcattggaatttagcttcctacagggatggtgtttatcttgctcactatgattccagcccctagaaaaacccacctacctcatagccaagggctcagtaaatagtatacactgccttcctgccactgtgctaatttctactaacacagccacaaacaatcagcaattacattttctgcttgtttttaacggggaagtagggcactcaacgaaaaggaaataaaagcagagtcaagaaagtgccttttatccatggagtgcccaatgtgttgtgcggccggccacgtatatagggatgtgtcagcacctgagatttttccttctctgagctagcttctttcctggaaatcatgctgggcccttagccttatggttcaccctgttttttaagatcatccacgggcttcattcccgtaaccgctcttctagctggccaaggcggcgggaagaaaccccaccctcttgcgcaaacgcccagtagcggaatccgcggggtcgagggctttagtgtgcgcatgtgcaaccagagcggcggcgggaagtgttgcgcaggcgcatccgatcgactcggtaggtggggatctcttggagacggcgacccaggcatctggggagccacagaagtcgtactcccttaaaccgtgagtttccgacggtttgttccatggcgcgggattgtgagggattaggaacgaattctggatcgtgacttcggttttctcgccgtgcagttccttttcccgccccccttcggatccctccgacctg

SEQ ID NO: 1961 - DNA, 2300 bp, Homo sapien
cctgaggtccttgctaaggctgttgggtaagatcgctaagtgcccatactcccacctctctctccctgtactcagaaccttcattgccttcttttgagcattgtagagaatgttttctcttagttaccatcttcagtattgttttttcaacaatattagtgtgtttttactaaaaaggcatgcatattcaattcagagaatttataaaacattgagaaaaaagtaaaactattcagaaataatatcactctaatatttttctcagatggatactttttaaattaaaaatgggattatactacacatactgttttgaagccctctttattcatttaacaatacattgtttcttaacaataaatactgttctataacatcattttcaatggtacataatggagaaccgaattatgtattccctattgttcaatgcttaggctatttataactttttggcattagaagcagtcctatcaatgagtgtcattacctatatattgtcaaggaaaaaatttcaacaaactgagtttaaagatctaattggctttattagtgattcatgaatcaggcagcatctcatgtacagaatagaaaggtgttctcctgggcatggcagaacagttggtttttgtaaggtagcttgagcagcaacaagggaacagcagagtgcaaaaagtgaattggttaacagcaggttacttcaggttactttccttatatggctaaagtagagggagcttccttatgctgattcagtttgtcaaggcttttttgggtttttgttgttgttgttgtttgagacagagccttgctctgtggcccggtctggagtgcagtggcaggatcatggctcactgcaacttccacctcccggattcaaacgattctcatgcctcagcctcccaagtagctgggaccacaggcatgcaccaccacaccaggctaatttttttgtctttttagtggagacggggtttcgctatgttggctaggctggtctcaaactcctggcctcaagtgattcgcccacctcagcctcccaaagtgctgggattacaggcgtgagccactgtgcccagctgaccaggcctttttggataggttgctgtgatctcctgttttctggaaaactgatctaagtacagcttgattatgaagcacaagtgagtccattctggtttggtctggtctgttcagccaactgcaggaactgagtccaaaccaatggcctcccataaactttatttaacaatatctttgcagcattctgattgatttcccaggagagatctagaagtggagctgctgagtccaagagcattcataatgctttttttatttttaatttttttagagacagggtttcactctgtcactgaggctggagtgccgtggcacaatcatagctcactgcagcagacttgcactcctgggctcaagtgatccacctgcctcaacctcccaagtagctgggactacaggtttgccccaccacacctggctaatcacaatgcttttgatacatgttaccaccaacctgataatgatccatttaagccacccatttttatgactgaagactccttagattccctaggcttcctcccagaggaacgtggtaggacagaattttaaactacgaagaacttcaagttcagtccttacatcctatttgaatgtgaaataacttcacctctctgtttttcaatgccttcatttgtcaaatgaagctacagtactttcctcaatgcaatgaaaaagccccttgaaaagattatgaattcccaaagcacatattacttatatcaaagaatctttaaagaccaggccctgtccttaaaatcatcctttatcctagagaagagggaatggacctcctttgtcttccaagccatcttttcctgttatattgtaagtcacatctggaaacttactgaattgagatctgggaacaagaaaccaagaactcaataactgattgtcagaaacagcaacctgtacttgctgcctagagcaagtgggcattccagcaggaaggccataggatgcagcagaggtggcttccttctcagcaggaagaacttggcctagtattgaatgatggacgggttgaactttgagatggtggctgggttgagcctgcggacccagggaggatacgccctcctctcaccccaggtaggggaagttggtattggggctgcctcccaaaggggtactaggagagaggactggttgcaataaaggaggaaagcatgagttttggtggtgtcagtaactgtggaaaagccccttccaca

SEQ ID NO: 1962 - DNA, 2300 bp, Homo sapien
gagcaagtcacatatcacgtggatggcagcaggcagagagagctggtacacggagactcctgtttttaaagccatcagatctcgtgagacttattcactatcatgagaacagcacaggaaaaactcatccccaagattcaattacctcccattgggttcctcctaggacacatggggattgtgggacttacaattcgagatgagatttgggtggggacacagccaaaccatatcaaatactgtttaatttgagtctaggagaaatcttaaggccttaaacttagactttataaaagcagaggctagctccatctggactgtttattccttcagaatattatgcctacttgtattcccaatgcctgactcagggctctcccatagtcagtgctcaatgaatattggtaaggaaaaaaatggttcagtgaggagatttttgcagtaattcaggtgactgatgacatttgacctttgtgaatgaatctccaattctgcaattgggtggattctctgcctataggtacaagaggaagaggacgagaaatatttcctgttctctcaataactttccaaataacatgtcataagaagcctcctcattctactctccaacatattaaaagcctaggattgagccaggtgcagcggctaacgcctctaatcccagcactttgggaggccaaggcaggcgaatctcttgagctcaggagtttgagaccagcctgggcaactaagtgagacccccgccctgccaaccccctctacaaaaaatacaaaaagttagctgggcgtggtggcatttgtcagtaatcccagctactcaggaggctgaggtgggagaatcgcttgagcctgagaagcggaggttgtagcgagctgagattgagattgtgccactgcactccagcctgggcgacagggcgagactccatctcaaaaaaaaaaaaaaaaaaaaaaaaaaaggcataggtccatagccctttagaactggaagaagccttctaggccaagcccttcatttgaactgagccttgacgggtattagccgttagccatttgtggaaggtcgcacagtagtcaggactggaagtctggtctttgaaacctgtcagtccacggtcatttcacctgcctgtttgtaaaacaatgtcctgttacttaagtatactttttaataagaaaaactgggtgtaagcaagagtatcagagtggtgttctggtgccagcagttcaacttctgcagcgtgtacttcacaggcacaggtacttaggacgtcgcacaggcacaggtacttaggacgttgccccgccgagactgtcgttcatatcgcgcccacctccgggtaacgccggtaatgctgacctagctccattatttgtattaatttatttagctagcagggggaacggctgggtaatgcagtctcagctgctggaggggaagaggcaagactccgccggcgcccaccatcagagcgtgacaacaagcgggaccggaggttgggaaaaagcacagggacagaatgaatgtgtgcatgggggagctctgctggggagagggcaagaggctgtgatcagattatctgaggtttcagaacttttatataaagaccaaggaaccaaatgaaaatccaactcttccagggagccctggaaagttcaaaggacctcgtttgagggagcgagtccccgcagctcgtgcccacgtctccctcgcgcttcccccaggacaggggccgccccaacccgggcacgctgagcccggccgcgcccctagccccttctctctcggcctcctcgtcccgaagggaagcacaggctcgagcagcattcggggctcatccatcagccgcggaggcaaagggggaggagagaggaggcgggaggcgggaggcgggaggaggagtttctgggcggccgagagcccccggtggggccggcggaggagcgcccttccccccgcgcgctgattgctgtggcgtcctgcccgtccccgcccgcgtgtgtgcgagggagggcgagtgcgccgggtcggcctgatgggggtaatcgagggtttcggggacgccgagcggcactttcctcttcccagcgagtgaaggagggcagtcggcggctctcgcgccccggccactttccctgcgcgattcccggagctccctgcaggaggtgagagtccccagcgggtccggatggcgtagttttgccgcggcgcagcagctgccggagctcgccgccgccgagcgctgggcggggaaacttgccgccgctttcctccaacttgctgcgggtggatctcc

SEQ ID NO: 1963 - DNA, 2300 bp, Homo sapien
tgaaataaatacttttttttttggagaggtagtttcactcttattgcccaggctggagtgcaattgtgcgatcttggctcactgcaacctccacctcccaggttcaagcgattctcctgcctcagactcctgagtagctgggattacaggcaggtgccgccacacccaactaattttgtatttttagtagagatgggggtttctccatgttggttaggctggtctcaaactcctgacctcaggtgatccacccgtctcggcctcccaaagtgctgggattacaggtgagccaccgcacctggcacaaatgtatattttaatagagtcaagatggccatgctgaagtctttgtttttgggtaatccaacccaaactatctgctgtgggcatctatttttttttttttttttgagacggagtctcactctgtcacccaggctggagtgcaatggcgtgatctaggctcactgcaacctccacctcctgggttcaagcgattctccagcctcagcctcctgagtagctgggactacaggcatgtgccatcatacccggctaattttgtatttttagtagagacggggtttcaccatgttggtcagactggtctcaaactcccgtcctcaggtgatctgcccacctcagcttcctaaagtgctgggattacaggtgtgaaccactgtgcccagccgggcatctattgttttttctgcacactctaccatacctcttaaaaaattttttaaaaatttttattgtttgtgggtacatagtaggtatatatatttatggcatacatgagatattttgatacaggcatgtagtgtgtaattatcacatcatggtaaatgtggtatccatcgcctcaagcatttatcctttgtgttacaaacaatccaattatactctgttttttaaaaaaatgtacaatgaaattattattgactttagtcatactgttgtgctattagatactagatattattcgttctaactggaataatatattttttaaacagtaaagaatgagataaaaaagtgaaagagaaagagaaaggtactgtattcctgggtaaatatacatgctccctttgctttccctgtttcattgacagccatgcacacttacgtttatattcctcattatttgataatcttccccattagagaaataggaaaggctctagaacacatgaacacacttatacagcctttatgatatccaaatttatccattttacgccaaaaaaaaaaagtactttcagtagtgcctcccatgtatctttcaaaaggtacatagctctgggtgcacaaaaaaattaacacaattccctatacaaaagggactgctcagagctaataacagctaaagaagagaggacgccaattgcaggtacaggcacatctcttcgaaccctcccctaaaacaaatgaaggacagaagaaaacagaaaactggttaattcaattattactctgcggaaacttagggatagtgcaaataaagctctgaaattagactttactgagccctgcctcttgggcatcccccaagaagtgtccgcgaccccccagaaacctcagggacaccctcctagacaccccgccccaccagcctcacagggatgaacctccctaccattctttgaacccccctaccattcctttttgtctggaatcagatcttgatttccttttggggaatcgcccctcccctggccatgtggttctcgcgagatgagcacagtgccccacctactctgaactaagaatcttgtttttttgagacggagtctcaccctgtcgcccgggctggagtgcagtggcgcgatcgcaacctccgcttcccgggttcaagggattctcctgcctcagcctcctgagtagctgggactacaggcgcacgccactacacccggccaatttttgtatttatttattttattttattttattttttagtagagacggggtttcaccatgttggccagaacagtctcgatctcctaacctcgtgatccacccgcctcgggctcccaaagtgttgagattacaggcgtgagccaccgcgcccgtccagaattatctttaaaatttatttctttaagatttgtagctactaagaaagaaaggagctttttttccttgggccttcaaactgaaagaaccgcatgagcctgaagctgcgcatggtcttaacatcaggctgtgcaggaagaagctatctgcagatggatgccagcacacacaaggaagcagagctctggcaacattgaggtcagtaccttcttttttgctta

SEQ ID NO: 1964 - DNA, 2300 bp, Homo sapien
cttatggtacatactgtctagtgcaggaaatagacattaaatataccactggctatacagttgtaattagtgctatttaattaggttgtaataagagtgtttaacaggaagacctaatccagtggaggcccccttgaggaaatgacttcagcctgagagttgaggaatcagtgtgggatcggaggaaggatgaaagagccaattgtagaagcccagagacaaaggatagggtcctggaaagagctgaaaggtcactggctgaagatgggggcactactgaaggtgtagttggagctgaaggcatgtaggactttttagctcatcttaaggggtttgctttttatcctaaaaataatggaaagtaattgaaaggttttaagggtggtaacatgatgagatttagctttttgtttgtttgtttgagatgcagtctcgccctgttgcccaggctggagtgcagtggcacgatctcggctcactgcaacctccacctcccaggttcaagcgatgctcctgcctcagactcctgagtagctgggattacagacccgtgccaccacgcccagctaatttttgtatttttagtagagacagggtttcaccatgttggtcaggctggtctcgaactcctgacctagtgatccaccccttcccacccccacccccagcctcccaaagtgctgggattacaggcatgaaccaccgagcccagcctgagattaagctttttaaaagatggttcagaaggcaatgtggtggtctgcacctacagtacctggagaggctgaggtaggaggatgcttgagctcaggagttcgagactaccttgagttatgattgcattgcttcattccagcctgggccacagagcaagactcaatctcaaaaaaatcactcaatcttctttacctagagtgtacatgtctccctgccactaattctcaagaggaaggtcaaaaagttgatagttggggcaaaatttgtactgagtcattcctctctttcatttcccttgacttctttcagatttttcatgatgtgagagtcacaccctaagtctgtacccatctactcttttcctgaacaataagataatctctatatctaatctctaatctattagagtttcacgttgttgctctggctggccttgaaaccttgggattaagtgagccttccgctttaacctccccagtaacgggcattgcaggcgcctgcagccacaccattaatactactttaaacagcaaaaacaagaacacgaaaattaaatctaaacaaaaagtgcttgccaatccaggtatttatgtgacgtctagtaagtagatcaagtgcgttgctttcttgtgaacacttggttctttcctgccacatcaaagtgattgaattaagacgtgtcaagctgttaatggcccccagacttccgcttcaggaaactggagatcgatggttttttggccggatttgcgagcagcttgtcagctgtttttgccctccccttcccatccatccactgcgaatgagtattaggaattcagaagcgttgtttgctatttgatcctaagggaaactactgtactaaatatattcttctgatacatgttagcacctctaaagtatctgcaaaccatcaagaggtagttgcgaagactcaaaatcctaaatcacgcactcatcagtacgcagctgttgcgaaacagctcttaaattgccactttaaacccaaagagagtatgtctctagcctcagctgctacctaatattgatcaagcactcactacgtgcaagagacaggaactgtggagaaggctggggaaaaaagcgtgaaaaccacgaaaacatcagaagccaaaactcaagaacctctactaggctaactgattagtgaaaacgtcgtgttaacagcaaacgccttgagtgtagcgctcctactcctaacccccggctctctacacggcaatcacccgaacccactctgcctgccctaacaggcctgagctgcccggctcagactcctacaccttttttgcaccgcccggggctgggtgtggtcacgtgacaggttcagaccaatgggcaggccgcccgcggggggtcttctataaaagcgcctgtcgcgcgaccgccattacaacaaaaactggcggcgaggaactgcggagaactgttgccctgcaccgcttcattttgtgcagcctgaaaggggcaatcacataaggtcggttttgtaatatacaggtaacatacaggtaatgtaccctccacagggggtgctgccttaggccggccccgaggtgcgg

SEQ ID NO: 1965 - DNA, 2300 bp, Homo sapien
cctcttttgggtactgcaggattgtggtgggctttacttcaaggcgcgctggcctgtattaagaattaagatagaggaggccgggtgcagtggctcgcccctgtaatctcagcactttcggaggccgaggcaagtggatcacctgaggtcaggagttcaagaccagcctggccaacataatgaaatgcccatctctaccaaaaatacaaaaattagctgggtgtgatggcaggcgcctgtagtcccagctactcgggaggctgaggcaggagaatcgcttgaacccaggaggcggaagttgcagtgcgccgagatcacgccagtgcactccagcctgggcgacagagtgagactccgtctccccgctccccccaaaaaagaaagaggtatgtacagggactttgggactcaagggaaaggcctgggtggatgggagggaatgagagaggctcttgggcagaagtgataactcgtcttgatcttgagggacaaatagaagttagactaaaaagtgaggagggaagttcaggtaaagagaagtttctcaaaggcatggatgtatgtacaccgagtaggatgtgacagtggataattgcttttttttttttttttttttttttaatacagatagctgctatggctgggcgatctcagaggatcgcctgagtcgctcacgcctgtaatcccagcacttaggaggccgaggcgggtggatcacctgaggtcaggagtttgagaccagcctggccgacatggcgaaaccccatctctactaaaaatagaaaaattagccgggcatggtggtgggtgcctgtagtcctagctagttgggaggctgaggcaggagaatggcttgaacccaggaggaagtggatgtggcagtgagctgagatcgggccactgcactctagcctggatgacagtgagactccgtctcaaaaaaaaaaaaagagatggtcctgctgtgttgcccaggttggagtattgacaggcactgtcatggccaactacagcctgaactgacctcaagcgattcttctgcctaagcctactggctagctagtactacagataccctgcctcactgtcgctgaccgtgttgggaattggtgaagtagcaagagatgagtctagtaagggggcagattataaaggggtttgtatagcatgaaggacagtgagttgaactgtatgatcttaagcaacaccattgcataatttatgtggtgactagtgattgaataaaagcagtggtttattggatggagaataggaaaacagtaagtatctcgaatatttaaattatattcagcagtcatttgtgcccatgtatttgatactttgaagtggctgagattggcataaggcggggcggcagggtggcgggggggcgtgtatagatggaattaaaaaaaaagaaaaaaaaggctgggcgcggtggctcacgcctgtaatcccagcactttgggagtcaggagttgaagaccagcctggccaacatggtgaaaccccgtctctactaaaaatacaaaaaaattagccgggcgtggtggcacgcgcctgtaatcccagctactccagagggtgaagcagagaattgcttaaacctggaggggcggaggttgcagtgagctgagatcacaccactgcactccagcctgggcgacagagtgagactccaaagtggggaaggtgaggtggctcaggcctgtaatcccagcactttggcaagttgagttgggcagccaggagttcaagacaagcctggccaacatggcgaaaccccatctctactaaaaatacaaaaaaaattagccaggcgcagtggctcatgcctgtaatctcagcactttgggaggccaaggtcagaggatcgcctgagttcaggagtttgagaccagcctgggcaatatagtgagaccctatctctataaaaaatacaaaaaactctgcaaagagactgtatccccaaattctaactcaatgctttggcaccatttgtaggtgctttatgttagtacatattcaataaatgaacaaatagaatttggaaaatggtatcctggaaaccagaagagcattttaagaatcataatagttcagtgcagatgttcctgggaggtcaagttaagagtcaaaaataattcattagatttaacaatttagcatggtaagtgttaatcttagtgtaaggggagttttagaggaatgttgggggaaaagccaagtgtgatgtaggctgtaaagacagtgggtggagagagaggccacaggatcatgctgaagggcttaattgaagc

SEQ ID NO: 1966 - DNA, 2300 bp, Homo sapien
ttcacaaaaaacatgaatatacttaacactgctgaactgtacacttaaaaagagtatggtaaattttggtatgttttacgccacagttcaaaaatataagtgattaatatgcaacaggaggtgagaactaatactactttaatgcagacaaagataatattggctaagtgttaacactggtctctaaaaatgggcaacttatttcattttcattttgcttatgtacttgaggtattatgtgcacgttggtagtacctttattatccttaaagtaatgatgctgtctaggaatattaaataccgtctttctgaaacacctatgaaatttaaaatattttattctagatgtagcaatatgtgccacagagtaacattttaatctaataaattcggttttaaaataaatcactttgggtcgggtgcagtggctcacgcctgtaatcccagcactttgggaggtcgaggagggtggatcacctgaggtcaggagttccagaccagcttggccaatgtagtgaaaccctgcctgtactaaaaatacaaaaattagctgggcgtggtggcaggtgcctgtaatcccagctactcaggaagctgaggcaggagaatcacttgaagccagcaggcggaagttgcagtgagtggaaattgtgccactgcactccagtctgggcggtagagtgagactccatctcaaaaaataaaaacagaaaaataaaataaaatcactttggctgggcatagtggctcaaggctgtaatctcagcaccttgggaggctgaggtgtgtggatcacctgaggtcaggtttttgagaccagccgggccaacatgttgaaaccctgtctctacaaaaaaatacaaaaattagctgcatggtgtcatgcatctgtagtcgcagctacttgggaggctgaggctagagaatcgcttgaacctgggaggcaaacattacagtgggccgagatcgcgccattgcactccagcctgggcaacagaatgagactccatctcagagagagagagagacaccataaattaatcacttttttcaaattagccagaacatttttttactttgcttttctctcttcattgaattaacaattgtagaatacttacacactgatcatatctttaacattctctgttatttcttccgactaggaatttatagacttttcctgctaagacctcaatttgtgtttttgtgaaagacaggaagactgagatgttgaaataatttaaaacagccaaggttggccgggcgcggtggctcacgcttgtaatcccagcactttgggaggccgaggcgggcggatcacgaggtcaggagatctagaccacggtgaaaccccatctctactaaaaatacaaaaagttagccgggcgtagtggagggcgcctgtagtcccagctactcgggaggcggaggcaggagaatggcgtgaacccgggaggcggagcttgcagtgagccgagatggagccactgcactccagcctgggtgacagagcaagactccgtctcaaaaaaaaaaaaaaaaaaaaaaaaaaaaaaaaaaaaaaaaaaaaaaaatccaaggctaaggcatatatagtgaaacttttactatttgtatataaaaaatttgtatttgtttaaaaattgattcctttgccatttggctttttttttttttcatcctgtcttaatcatgatgtgctttaaaacacagtatgtgttaactcttttttgagatggagtttcattcttgttgcccaggctgtagtgcaatggcacgatcttggctcactgtaacctctgcctcccggatttaagggattctccctcctcaccctcctaagtagcttagattacaggcatgcactaccacctctggctaatttttgtatttttagtagagacagggtttcactacattggtcaggctggtctcgaactcctgacctcaagtgatccacccgccttggcctcccaaagtgttgagattacaggcctgagccactgtgcccggcttctgttactcttgaataacacttttcagctcctgtggaaaccattcctaaagtgcttctgaagtactcagtttttgtttttcaggacatgtacttgtagacaggattcaaagcagttaagaatgtctctgccaagtcgacaaacagctattattgttaaccctcctccaccagaatatataaatactaagaaaaatgggcgattgacaaatcaacttcagtatctacaaaaagttgtcctaaaggatttatggaagcatagtttttcatggccctttcaacg

SEQ ID NO: 1967 - DNA, 2300 bp, Homo sapien
gtgatctgaccagctcagcctcccaaagtgctgggattacagatgtgagccaccacccccggccctgttttttgttttgttttgttttgtttttcattttttgaaacataatctcactctttaacccaggctagagtgcagtggcatgattttggctcactgcagcctcaaccttccagggctaaggcgatcctgccacttcagcctcccaagtagctgggactacaggcgtgcaccaccacacctggctaatttctctattttttgtagagacagggttttgccatgttgcccacgctggtcttgaattgctgagctcaagcgatcctcctgcctcagcctcccaaagtgctgggattataggcgtaagccacagcacccaacctaaaacaggacattttaaaaaatacataacaaatggcaaaatacaacatatcaacacatatgtaatacgattaaagagtactgagagatgccaggcgcggtggctcacacttgtaatcccagcacttagggaggctgaggcgggcggttcacgagctaacctggctaacacggtgaaaccccgtctctaccaaaaatacaaaaaacttagccgggcatggtggcgggcgcctgtagtcccagctactcaggaggctgaggcaggaaaatggcgtgaacccgggaggcggagcttgcagtgagctgagatggagatcgcgccattgcactccagtctaggcgacagagtgagactccgtctcaaaaaataaaataaaaagagtactgagagaaatgtataggtgctaaatgattgcattagaaattgcaaaggtctcaataagttcctaactcaagaccctagaaaaaaagagcaaaatacagttaaccctcaaacaacatgtgtttgaactgtgtaggtccacttacacatggattttcttccacctcttccctccccctcaccccaagacaggaagatcaacctcccttcttctttctcctcctcagcttacctaacctgatgatgacaaggatgaacactcttaagataatccacttccacttaatgaatagtaaatgtattttctcttccttatgattttaacatttttcttaattataaagatacagtatgtaatacataaacatatgttaattgttttggtcagtagtaggctattagtacttaagtttgggggaactcaaaagttatacatggattttcagatgtgaaagggttcagcaaccctaaccccccgcattgttcaaaggtcaattgtataactcacacatgctgaagtaaattcaaaattgtacagccactttggaaaccagtttgacagtttctcataaaaaatgaacacttaatacctgacccggtgattgggaaaaggcttaatgaaattctaacagtgaactggacgatagaagaggtcaggacaagagtggccatgtcggtgctgaggctgagatacctaccgaggactgtcactctcacggcttccagcccttcgacgaactctcaggtgtgtggccttctggccaggcttctgccgcgtcacgttgttgaagcattcgttgtatccctggggttgcagctctctgtaagtttgctgtggctgaaccaggcaaggcataggcggatttctacagaaattatgattccacgaaagattttgagaagaggaaggctggtatctttcagagtgcagagtgattttgcactctaaagaatctctttgggtgtaatagcatggaagtttgtcgctgacctgtgtccctgaactatgacacacgaatatgtgggcttagaaatagttttgcttgatacattgagaacaacaaagaagactgagtggcgctaccttctttggtgcccaggatggtttgggaaagtctcgccttcatcctcccccacagttttgcgattttgaaacgggatctcgctctccgcggaagacagccaagctctgcaccccggcctggcccgccgcaccccgcaggcccggctctcccctgcgcgctccgggctgggcgcggcgcgtgtgcggagccgccgcggtgacacggaacgccggccgccccgggccgggggaggcgcgcgtcgagaggcgacggcgggctggcctggcgcgctgcggcgctcgctcacccgctcccgaggaagggcagtgggccccgccgccgcctcccaatggcgaggctgcgggattgcctgccccgcctgatgctcacgctccggtccctgctcttctggtccctggtctactgctactgcgggctctgcgcctccatccacctgctcaaacttttgt

SEQ ID NO: 1968 - DNA, 2300 bp, Homo sapien
ctggagtgcagtggcaatctccgctcactgcaagctccgcctcccaggttcacaccattctcctgcctcagcttcctgagtagctgggactacaggtgcccaccaccatgcctggctaattttttttgtatttttaggagagacagggtttcaccgtgttagtcaggatggtctcgatctcctgacctcatgatccgcccacctcggcctcctaaagtgctgcaattacaggcgtcaggcagtatttgtctttctgtgcctggctaattttacttaacgtcctccagcttcatccatgttgtcacaaatggcaggatcttctcttttaagaatgaataatattccattgtatatatacaacattatccgttaatctatcctagggacagttaggttgtttccatatcttagctattgtgaataatggggcaacaaacatgaaagtgcagatatctctatgaggtgctaatttcatttcctttgggtatatacctgaagagggtttgctgggtcatgtcatagtcctatttttaattttttgaggaacctccatactgttttccataatggctgcaccaatttacattcctacgaaaagtatatgtaaattgactaaatttgccagtcaaaatataaatactgcctgggttataatacaccattattatggtgtaacacaccatatattatagtgtgatatatgacattgtgtgaccttggccaagtttacctatcctttgtatgcctcagcttcctcatctgtaaataggtctgaagacagtacctagctaaatggttgttgtaaggattaactgagttaaaacacacagagcaaatagagtagcgtttatcacataataaggattcaaatataagctactattatgttatctttgacacccctcgtttctacaggaataattaagaatcaattatccatccaagcatttgggaattaattttaaaaaatcaattatccagttatatttttcagaattaagatgtctgaatatttgagagggggcattatctgaagaaatggttacctcttggccaatcttatggtacaaatacaaagtccatatattcccctccccgcctcctttttttttttttttgtttggtagagacagggtctccttatgttgcccaggctggtctctaattcctgggctcaagtgatcctcccgccttggcttcccaaagtgctgggattacaggtgtgagccaccgcaacctggccaatgtattttccaagcaattactattcttcaccttgtgtgtagagtttgtgaatgaaacagatttttttttttttttttttttttgagacagggtcttgctgtgctgttcaggctggagtgcagtggtgcaatcatggctcactgcagcctcgacctcccgggctcaagccatcattccgcctcgcttcccaagtagatgggacttgcccggcccgaagcggaactactgagtttccttattttggaggcagtaatcaaataaaaaataccaaaaccttaaatgataatcagtttgctactttatttgggacaaaagagaattctatatttcatccatccatcacttcactgctcaaagactttgccccttacctatttctcccttcttggtcataaatgttagggctttatatgcaaagccctgtgctttctccgatcaagtccaaaagcttgtatgagccactccttggataagaaggggatggggccttctagatgctgtaagtatctcttatattgaactcagaattgttctgactggcagtttatgaagttcttcccctactcctcccatcgccaatttttcttgccccaaacatttatacctcagggttaagaagccaggtaagtgagggggtgtgactcgcccagtctttcgttggaaaaaagtgtagacctgtcaggaagacacagcatagaaaggctgcatgtgctgatttgaactcgagcctcagtaaaacattgaaatgaatgaacaccaaccggaagggaaagaagaggggaggggataaggagcctgaggattggtttgccccgcgggatggtccgcgcctgagccatgggaggcggggtgcccgccggcagaagtaaacagagcgagtacgcctgcgcacgctcttcctgggtcaagagccggctcggttctgggattctgaggctccccaccgcggtccggcttctctgggagactgtctacaaaccgacgagaggcgtcaaccttttaccctagggggcggatttgggtaggagccgagcgttcggtcggaaacgccccct

SEQ ID NO: 1969 - DNA, 2300 bp, Homo sapien
acaaagacattagctacctggaattttgtttttgcaggaaacatcccataacaacaaaagtatttgatttgcttagagagttattttattagcagtaatagcatctaactttccaatttttttttaaatctaagaatgataagaatgctgcttttcttctgatggaaagtgacaggctaatcatcagtttacccagagtgaagtggacggaagcagcactgaccatggcgtctcagcttcaagaaaaatgtattgcatttattgtagacaacttctccaagattattcagagtgaaaattttgctcttcttttacaggtactatgcctaaattatatcctatatttagttccatctttgtgttctgatttcaattatgtaagagcttttaaatgcaggttgcttttgattaaattaatgtgatttaaataaactccatagcagatggcatgtttacataggatttaaggcagtgatggacaggatatttggctcacaagatgagaaaggcgagagggacaggtttgagtgccctggcaaggcacagtgtaattctggccaactctagccctccctcagcaagccacattttagaaaccaaagtcataaaggtactgttttggccagtaatacaattatgatccatgcagaattctctgtcttattgggaagctactttctctaaaattattcacagaataactcctattgtttatttctaggttctgtatttagggctatgttggcttttaaaaactgtgtgtccaacatggcacatgtatacatatgtaacaaacctgcacgttgtgcatatgcaccctagaacttaaagtataataaaaataaataaataaaaataaaagctgcgtgcatatgcatatatgcgaattttttaacaaagggaaaaaatacgatttctggttgacttcatacagctagttataatgatctgttacgccagactttcacatttcttgtgcattttatatgtattcctcttaaatattaatttctgtgttttatagtcacaagcaatgagcagcacagccgatctgttggacacaattttaaaagcaattgaagaaaatatcaccactgaaaatagctgctctcttcttatggctctggacacactgctgaactctgacagtacaaaggaaatggtactgaatgtaatgaaatttattaaaataatgcaatatttgaactaagatttttagatgtatgtgcattttaaatgttgcagggtcattgaagctaggcagtggatacctaggggtggattaaggtctctacttttgtatatgtttggaattttttataatactaaattttaaaaattccgtttgtctccaaatggacttcttataaaagtttagaaattggcagtttggctgggtaattttaaatttagtgtgatatttagcaacattatttggcacagcataactctcgtatttctccctggtcctacagtaaattttctagatataaaatgtatattttagatataaatgtatattttagagtttttaatcatcagtgtcttttatttttataatcttaatttttctcttcaaaaaatcatattttaaaattaggctgggaagcaaaattaaaatatttatttttaaatacaattaatcagtggccattaattaggtaattacaaattattggcattctgtatttgttcgacaagaatggtttttaaaatgtatcatatttattactattccatagagcatttgaccttgtaatgtcatagttgatatgaaaaggctgtggaaggtgttcatatcaagggcattggtgttttaaaataacatttggttgaaaagatgagattttttagctttgtgttcatttataaaattttgttattaataagtcttcataaataacatgtacccaacgatcttaaaaatctaaatgatgacatcattgatctagcttaggagtaagtagattctgaaaggaataatgactggttgctatgacaatgtggctctcaccagctgctgatttgttgcttgaacacagggttttacgtgcaagatccaggctctgcgtgataagctgtggatcttcctggttcagtctttctatgctgttcgtcacacagaaagctggaagctgatgagcacagatgatcaacagaaaatccaagcaggtacgttagccttgagatatttcaattcttatgtaatgatcattgtgacagcagatattttgagggcattctgataagtgaaaaggttaacatttgtgtgcttctgttggataataggataactgaaa

SEQ ID NO: 1970 - DNA, 2300 bp, Homo sapien
ctttgggaggctgaggctggtggatcacaaggtcaggtgattgagaccaccctggctaacacagtgaaacccagtctctactaaaaatataaaaaattagctggatgtggtggcacgcacctgtagtcccagctatttgggaggctgaggcaggagaatcgcttgaacccgggaggcagaggttgctgtgagccgagattgcgccactgcactccagcctggcgacagtgagactccttctcaaaaacaaacaaaaaaaaaaacagttgagctggtgctgggttcccaaagttgttactataaatgcaatcttcaaagtgtttaagccttggatttggtgggtattatgtcttctttattatgcattcatttatttagtttaacacaatgtatttccatgttcttgggaaataaccacctacaactcacaatgagtaatgatcaaagttgttttttaagtagttaggtaacataaccagatgtgttttagaaagataaccggcagtaatgaagatggccaagtatggagaagtgccctaaacctgtcaggatgcaattatgatagttttgttgaccttagaaatagggaattgagaaggatttggtaatagagacgttaggtgggttgagactagaacttggtgaatgattacatggtgtcagaagatggaaaggaatttttaaattgttgtcagaggctggacacggtcactcacacctgtaatcccagcactttgggaggctgaggcagacagattgctttgagcccacgagttcaagaccaacctgggcaacatgacgaaactgcatctttaaaaaaaaattttttttttaactagctgggcatggtgacacgcgcctatagtcctagctactcaggaggctgaggcaggaggatcacttgagcccaggagttagagactgcagtgagctgtgattgtaccactgtactccaacctgggcaatagagcgagaccctgtctcaaataaataaattgctatcagaaataacattcgttccacacattgagggcctactatgttcccaaaactttgctagtgctgggaagaaaaagatagatgacatagtatccatccttgagcatctcaatctaataagggagaattgttaaataaaaattgcaaaattgcaatgttaagtgttataataaagctgagtataaagtgtaatttggagtgcttggatgggctcctttgctctctaaggattagtaggaattcataaaaaggcacactcttggcagaaaaagttcaaaggcagtggggaattctgttctgtatggctagagagagaaggaaatggattggaagggcaggggatgaagttggacaggaaagtagaatccagagattaacaggatcaggtttgcattttagatgactggtagcaggatgtaggatggaatggagcattgtgacaaggcaaggggactaatgagtcgattgcaataataaaagcttgaatagggcagtggcagtggagacagaggagtggacgtgtttgagggatttaagaggtggaattgaaacccttggtgagtctttggatgtgggaaatgagagatgggaatcatcttaaaagacagttttctcactagggtgcctgggtggttgatgatgtcattaaccaaaaacaggagcaagtgtaggagtgaagatcagtttaatttgggacacactgagtttgagatgcctggggggacattcaggaggctgaggacaaaatgctgtggaatagtcagaaaaagaaaagcctgagacagagactgaaccggcacattcagaagtagaagtaggaggccaaggtgaggagagattaatgttttgtttgttttgttttgttgaagcagggtctcagtcacccaggctggagtgcagtggcgcaatcatcactgcagcctcaacctctcgggctcaggtgatcctcccacctcagcctcctgagtaactgggactacaggcatgccaggctaatttttgtattttttgtagagacagggttccgccatattgcccaggctggtctcaaattcgtgggctcaagtgatcctcctgcctcagcctctcaaagtggtgggataacaaaagttttttttttgctttttaaaaaattcaatgttagcaagagaatgataagtttgggagcttcatatgatgctttagaagtgtaaatttcctttctgataagcagctaagcaagctatatcaggaatgtagctttttggttgttttttgagatggtcttgcgttgttgcccaggctttgagtgcagtggcatg

SEQ ID NO: 1971 - DNA, 2300 bp, Homo sapien
ttttccaggaggagggaatgatcaactgtaacaagtactgctgattgaccaagtaaaattagtattgacagctgtttgctggatttaccaatgactttgacatgagcaatttctgtggtatggtggaaatgaaaaagtctgattggaataaatttgataaagaatgggaaaaaagggcattagcaacagaaattatagacaatccttttgagtttttctgtaaagagagcagagaaatggattgttagctggtgtgggagaggagattaagagattttaagatgagagaaataatggcatatttatttgctattgagactattcagtggagaggagaaaattgaagattgtaagagtcaggaaataattggtggatatatatatatatatatatatatatatatttttttttttttgagacagttttgctctgttgttcaggctggagtgcagtggcatgatcttggctcactacaacctctgcctcccaggttcaagcaattctcctgcctcagcctcccaagtagctgggactacaggtgtgcaccaccacacctggctaattttttgtatttttagtagagatgaggttttgccatattggccaggctgatcttgatctcctgaccttgtgattcacctgcctcagcctcccaaagggctgggattacaggcgtgagccaccgcgactggccggtggagctatattcttgggtaagcaagaagagatgggctctgttgtccatttgagggctggccttacataggattatacagttcacctactatagttggaaagaaagcagaatctggcatatagatgttggtagattggtaggtggacatctgtggaacttcgtttctggatgcttttatttatctcatttgaatagtatttaatattaaatactaaatactattaaaatcataaatctttatgaaatattagcagtaactatttcacttcagccgaaaatgaagatgaggaataagttctggagatttgaagagaggaggaattgtcttagtccattatggccacgataacaaaataccttagaccaggtaatttataaacaagaggccaggtgtggtggcttaacaaactgcccaaatgaggcagcaagagtgcacctaattttaatatcagttatacaaaatgccaaacatacaaaatggttatcacagggaaaaattaacagcacatcacaagtgtgctccaaaggatttttcctggagcacctttctttctacaggaatacctgttttacaaagtaaggcacatagttttgtatcctaaccattaggctcaaggcaagtagtggtctttgtctttttacatttttatgattgtgacacttaataaattgctgagcttcaattaggtctgaacataatggggtcctaaaaagcaaacacacaggcccctgtatgtccttttgacagctgctcatgaaaatctacctttttcataatttggataaactgaaggccactttgattttatgttgcaaatgacagaaatctaagaattgagcctgaattttagaaaactgtgaaaatcaattccggacaactgagtctaacacgcaaaaatcttgttttttttttttttttttttttgagacggagtcttgccctgtcacccaggctggagtgcagtggtgcgatctcgctcactgcaacctccgcctcctgggttcaagcgattctcctgccccagcctctcgagtagctgggattacaggtgcgcgcctccatgcccagctaatttttgcatttttagtagagacggggtttcaccatgttggtacgctggtctcaaacttctgacctcgtgatccgcccacctcggcctcccaaagtgctgggattagtggcatgagccaccgcgccaggcctacaaatcttgtatcttcttaaccacttccggcttcctgcaaacctcgctctagggagccagaagcgcggaaaaggtttgcggggtctgcggttgcgcagaagcccagcgactgcagaaccctgccccaggcaccctgggcgctctgccctaccggcggcgcctctcactgctcacggaacgttctggaagtttgggaaaccctgagcggtctctgaggacctggtgagcaggtgggtttgcagcgctggggatgaggcctcggcagacctgtctcttcgcgtttttctttcttcgttcttcgccggcgtagtgctctctgacttgccgagctcagagctttacctcagggctttggcgggtgaggggaggagatcctgcccaccctattttccccttg

SEQ ID NO: 1972 - DNA, 2300 bp, Homo sapien
tttggctggaggagaatgggctgatcacccaaaatgaatatttagcctgcttgatatgtatatttctcattgtaaattaatgactcaaacaccatttttggactccctaaaccagaagtaattctgtttcttctaaaaactctttacttcaactatagcaattatttattttgcctcattattgttagttgtttacatgtttatgtttgaccagatggtaaaaaccttcaagtatatgactgtttcttttcttttttttttttttttttctgagacagggtcttactctgttgcccaggctggtctcaaactcctgggctcaagtgatctgcctgccttggcctcccataacgctgtgattacgaacgtgagccactgcgcctggcctaaatatttctaattctttttttgttttcagttccctactgtgaaaatttaagtagattcttaaatgtttgatggataaatgactggatgaatagcatcatgtgattattctcttcccaagactgaaaagtaaacaccaagattgtacgcaccttattcttttcattttgaataatttctaatagctggtctgtgtgcccttcttctatgcatctttgcccagctaactgaaataggccaaaatcctcttctttaaagtcttgctcttctaggatttgctggcaaaaaaaaaaaaaacccaaaaaacaaacaaaaaaaagtatatgcaaataaaaattaaatacaataacttcttgatttatctatgaaaaaaggaaatctgtttaaattctagataaatgtaacgtaaataacacacgtatcaaaattaggattaccctaataaatactttaataagtgaccttgaaatctactgtaccagtgaaatctatgaaaaggatcaggattaaaatgtaaaaggttatttagataagtatgtcacctggagaaataatccaatctgcctcccccactcatgctctttacaggtcaaaaaaagcaaggattaaagaagataaacaatttgagtgaccacaaatataattaaaaacaatctgtgcccttcccatattttgaaaggtatttaattttacaaaaattaatacttacacatctctttattatagactgaagttcctctacagccattcttatttctcctagtttcgatgctaaaatctacaaatacaaaacacactgttaactatccgtgatattacacttaagtattcaaaagttatgtttcagtgtgataaattattagtaaatacaataaagaaaatggaaagtttttgttgttgtgttttttggtccaatagcatgctaggagaaaatgtaaagttttaaagttgaaatgttattactgaatcttagtatgtttgcctaagaaaataaagtgtttttttagaagcccttattgcatgttttaagttttctaggagcatagttttgaaagctactttgaaggaaaaaaaaacaaaaaaaacctctcgagcactcccaagaggcgaggcatatacgaactaaagggcttttaaaaagcaaagcacttcttttctgaaaaaaaatttccaaaaggtggacctgaaatcaaaattctaatcatcaggggatttttcatttttaatgtctcacctcacaaaaattggggtgcaacacaagcttatctatagggggtgaagattcagatgccctccattccatttctctctaggagttgcagtccccaaagtgatcaatccagctagtgaaatcactgtatcacacggagacaagacaacggcggccttcaggaggagaccatcgcttctcctggcggcaaggctcggccccaagccctcagtaggggcgcgagtcagcccggtcctcagggcagcgcgctggaaggcgagtgaacaccccagcgcgcgtgcgggctgcatcagaggaagccatgtcttccgattcctgctcgcctaggtgggcaggctccaccacctcgcgtggcctagtcggcccgcagcaccaagtccgccgcggctcacggccaaccgcgagccctggccaccctgaacctctccacaactccacttaccggccagaaccctcgcctctcccagccgccgccacctcctccggcgtcttagcccgctcttctggccccgccccgcgctacgcgtagggaggcggggcctcggggcgagacgccggagcgtgtccccgtccggcagactactctcccccatggcggacttcgctgggccgtcttctgccggccgcaaggccggggctccccgctgctctcgaaaagccgcaggtaggagcaaggatctct

SEQ ID NO: 1973 - DNA, 2300 bp, Homo sapien
tctacttagcacgcaggtctcagcataaggctttcgctgaaaactcacagccaacctccctgccacccacctccaactaaattagacttcgttattccttctcgtaacatcacagtcttttccttcatagtgcttatcacaatttgtaattatgtatttgtttatgttaattaactaattaatttattattatttattcctctgttccactaggcaagaactgtgtctattctgttcaccatatcttcagagcctaacacaggtccgacatatcttatactcaataaataatttttgaaagaatgagtaaattaagaccaaagccaatataagattagtgagtcttcacaaaataaaaatcatagctacatatgcttttaatccccttcacattctactcctcttctagaaactctgtgtgatatgtggtaatatcttgcctttttagaaccagaactagtacaagacagctttttaatgaaaatctggacttgatgtaacaaagaacagaaaaggtttcttggagtgacagcgaaacttggagagtgagtctctggcatataaagcaataaaaggagagtgtacctgaagcggtgaaaaacaaacaccttctacagacactcattccttcactagcagtctgagtgcttagtttggttttcttaaagcctggagtagaggaatgtaacagtctatgtgagaatttataggccttcccagatctttcccttccctctcatgataattttctctaaaaaaaaaaaggtaaccattattgttttaaaattggtacaagtaatacaagataagtagatatgccaatgtagttgtccatgtagctgtcataccttttagaagcatcttcttgtttcaaagtacttgtctgtttagtacctacaataaaaatacagtcatgtgctacataatgacatttccgtaaacgacggacagcatacagacagcggtctcataagattaaaatactgtatttttactgtaccttttctatgtttagatatacagttgcctacagtacttagtacagtaacatgctgtgcaggtttgtagcctgggagcaataggctgtaccatatagcctagtgtgtaagtaggctgtaccatctaggtttgtgtaagtgcactcgatgatggtcacacaaggatgaaatcgactaacaacttatttctcaaaatgcatccccgcagttaagctacacatggtggcagtaggtcaggtctacacaaacacattaggtacaagatagattcctacacaaataacaaactgtagaccaccttttcttcttttccacatattttatgtccaatcgtgtgtaaatcaaaatgaaataggaagggagagcaatttgtttttgcaaattgattactgtctaatttttcttggttaaaatgtatctctttggggattgaattttcttctgtatcatagttgcttaattaaccactcctgaaaatctgagatctgggtacttttaggggaaacctctctccgtctgccaaacgtcctctctgggggaagaggggagtccggcaccttaaagaactgggcacccaagcaatctggaaaggaggaccggtcctaggttcaaggccagctgccaacgctgccctagtcacttgccccgaaacccggggaccccaggcctgggttcccggggcctccactgtcctttgtctcagaggctggggccacagtccgcgtgagggaaatcttggaacactggcgtaaaggggtgaggggcggccaggaaatctttcccaggaggtgcggacggcggtgggaagctttcggcctactctacctgggagaacccctcccctgaagcagcctttcaggagcgcccgcgcgctgcggtctataactcgagatcggggcccagctttcagggtccaaaagtgggaagagatccttgctcctacctgcggcttttcgagagcagcggggagccccggccttgcggccggcagaagacggcccagcgaagtccgccatgggggagagtagtctgccggacggggacacgctccggcgtctcgccccgaggccccgcctccctacgcgtagcgcggggcggggccagaagagcgggctaagacgccggaggaggtggcggcggctgggagaggcgagggttctggccggtaagtggagttgtggagaggttcagggtggccagggctcgcggttggccgtgagccgcggcggacttggtgctgcgggccgactaggccacgcgaggtggtggagcctgcccacctaggcgagcaggaatcggaag

SEQ ID NO: 1974 - DNA, 2300 bp, Homo sapien
gaaaactctcctagcgcggtgcccgcgccgtgactccgcaggtaggtccgccgagcctgttctgcgcctcctgccctggtgggggcggccgcggggactcgcagagcactggcactgcgggggcgatcagagggcgcgggcggtttcccacctgctgcggaccgccgtgcgggagcccagagagctccggcagctgggttagggcgcgacccgcgcagtgtgactggaaatctggagctgggggcgcgcagcaggcggtctggtggttcggcaggggagccaaatccaccagggaaggaaacatctggtggggaggcggcggcagctgcgctcgggaggacgcccccttagcgccctcggctccctccttcctgggcccggacggtgaggagaggcctgagcgcgcggaggggccgccccacctcccgcgccagctgcagcgcggggttgccttcccacgcgctcggcccaggccccggggcccctatctcctccaaactctgtcgctccccacaggaaccagcaaagcgggccggggtgcgagagaggcgtgggcttacagcccgggtggggaggcggcctccgcgtccgcctggtctctggtggcgccagcccagacccagctccggcgctgacagttaccccgcccccatctgtcccgctcccagccaacgtgggtccaagctgcagcgggaccctcgggacaacgccactccgtttttcttttcttccgagtttcgtggctgtttaaagaattgggtttggggtttgtggcgtctaattgtacggacgagaagtgcaggaagcgacaaagctctagccctaggagccaccccggagggaggcggatggcactctcacccctaggggcattctggcgcttgggtagcgggaaacttcgcgggagccccgcgacacgtcccaggcgtcttttctcccaggtctattcccattcctccggagaaggggacacaatggggctggggatctggagcagggggcctgcaccctacagggaccaaggcctgtaggactcgtttgagctgagagcgccaacggacagacgtagactgtgtggcctgcatcttgcctaggaagccgaggggctcctagtccggcagtggaaacagcgcgaagccggaggactgcaggtcctgccccggcccagagttcccagcaccctcgtttctgaaccagccgaggccacggagaactgctgtactgcagctcacgtgtgaacccggtcaccatcgccttcaccccgggaggaaggcagattcgtttactccagaccacctcgactgtggggtaccgcccccggagccggctggagcctagcggcaggcgcagccacgccctcccgctgcgctcagatttcgacctggtattaggtgaactgattgggggttaatgagagcgacgccccgggcagctagttccctcccgggcccgggcccgacccccgctctctgctaatgcagcctgcgcgctctggcgtcctgtcttttttgtctgctaaattgtcggtgcactaccgactcgggacacctagcatttcccagtcaacgttcgtggatcgggctccacctccctaggacaagattttttggtgagcagaacggaaagtgcttttttcccgggacctgattcccgaggttaggtctccatggtctgggatggctcgccgcagcctcgaccggtgcccgccgcagccgggagtccaagggcaaagtttctcctacgtggggcactagtgaggggcgagtgggatcacccagatgcgagtttctcctggggcgggggttggtcgtctgttgttcccctcactttcctgtccctttgctctcccacctcctttctctggcctctgctgtccccaatccctctgctgctgtcctcccgccgccccacagttttatcttgtgttctgttcccccctccccccggtcctttcactccagttggtagctggctcttggaggtcttggctccttgccccttccgggtcctcgaccactgggcatccccggcccctaaaccgatccgcgtgtccccgccctccctcgccagccgtaaagcacagccaggcaggcgatgagtagctgagttggggtaacccacccgatgggaactacagctctccagggagtttgattgccggagcgagcttcgctaggaaaggggaggagctggggggcgtgggcagggaggaggaaaggggcctgagacagggccccgggacaggttttaccgctgagctgtgtcagtggcggcggcggcaacgacggcgggttcgcgcc

SEQ ID NO: 1975 - DNA, 2300 bp, Homo sapien
taaaatagtcacagcaccttttcgagaaattttgactttgaacttgctaatatgcaaaggaaatagtccaaccatttctctagaacttggttgataagaaattttattttgtcccatttataattttattctaaaaatttgtttttttctgctatcgagtaggagagaagggaataagggaaagatttgtttttgcactactgtgagatttttataccttaggccaggacaaagcacacaagaaataaaatattaacaaaatgtccttaattttcctttctgaccaaaattgcttgcctctgcatttatatataaagaagggatgtgttgagcaaatgaaggaggacagctaggcagacaagatttgcccagcgcctggcatacaataggggcacaggtcattgcttaacaaaacgtataatttattaatacatgctcgaagcactgctatactaaccaaatattccctgcaaaattttaaatttacagtgcaaaataagaataatttaaaaactgtttctagaaaaagagctttaagggcttccccccccataacaatttaagattaacctagaacatggtagttattttgcaagaactggggagcaccactctcttctccttgtgcatgtctgacattggaggcctattgtgcacgaagttgtgatcaaaatccaagtcaattcattttgaaaagtaacatgactacaacatccatccactccaatgagcaaagggtgtaggctttgagtatacacagcaggccacacactatgggtcatggcatacagtctagcgttggaggttgctgcatttgttcatgtatctatgagttaggttttaagttttttccccctgttctattaatataattaattagttaattaaccccactcattcatttactcagtccacagccttttgttaagagcccgcctaggacataaagatgaagatccagtgcctaccctcatgaaacatagaatccgagcgaagaaggcttactttgcaatagtcatccaagtggtgcttttatggcgctttactgctcccgccaacacccagtgcctgggtatgacctcaggcggtggcagagcccgcgtgcgaggtcccgctctccctggcttgccccggcagggcggagtcagcctagcagccgccggcgctgcccccgcgcggcctttaattttgcagctccgaccaccggaaattagtcgaaggctgagcggacccggtcgagagccggcgagctccgcgcagggagggtgcgcccaccggtcccgccgggcgcccgcgggacgcgccgccagggccctctccgccgggggctcggcgctcgcccacctcttccaaatttaaccattacctaaatccgaagggaaatgagcaaacctctcggattgggtgtcaaggtattttcagcctcgttgggcgtatttatccccaagtgtttccacaacaagctatttcggggcctgcggggcaggtttcgctctgcggacgccgtggccactcgccgggctccaggccggcggcaccgcgggccggtgattcacggtcccgacccgggggtggtgcagccctaggaggcggcggggtcgggggtggggggggcgggtgaccgaggcctgaggggcggggagggtcctcggagcggggcgccccccacccctctctcgccagtcaatctgtgtcctcaatctgtggcttctctcgctgcggaagtctccctggagccaagaatagttcattttctttcaagtcatttctagtgcctaagtgtccggacctccaatttcccccatcccctgccgacccacagggagagaactgggaggactactaaggggcgcgcgggacgggctggaaaggccaggccccccaccgcctggccacttgcgcaaaggagcgcgcccggccgcccgacgggggttgggagcaggtctgggagggctatgcgagcgactcagtaacgctcaggaagtgaagcttgtggttttgggggctgagctcggaaggagaattttttttttttttaagtcagagagatagagcggtctctcccgaaagcaagattccgtttgaaaactctcctagcgcggtgcccgcgccgtgactccgcaggtaggtccgccgagcctgttctgcgcctcctgccctggtgggggcggccgcggggactcgcagagcactggcactgcgggggcgatcagagggcgcgggcggtttcccacctgctgcggaccgccgtgcgggagcccagagagctccggcagctgggttagggcgcgacccgcgca

SEQ ID NO: 1976 - DNA, 2300 bp, Homo sapien
tcgacagatacattattattgctatttagaaacaattagtttctaaatatttgaaacaattagtttcaaattattgaaaaggcagtaaatgtaaaattattcctttggaaagaccctatttatagaaaattgtgcctcaggtatacattttgcttaccattagatctatttcaattccaaaggaatatatggagggagagggagtatttgtagcttctaaaaatgttcatggaggggtggcttattctctttgcccttagtttaatagaagcaagaggtagtttggagtagcaggaagtcagagatgggttcattgtatcgttatttctagtcctagctcttcactgtccttggcaaggttcttaacctctctgggttcccctcttcttacctttctcctattcttccccaagtgtgggagtcacacttcaacactatacacccgggagtgttgtgttgttaaaaagtattgttaaatactttttaaacgtgttgaatacttgttaaatactttttaaatgtgtatttatttatttgagttagtactacatacacatggttcaacatgtaaaagacataaagggaaattcagtgccatctccctcccacctgctcctttctgcgtgtccctgttccagttctcagttttctttttcaaactcagaaatcccaagagtctgtgaagggcaaatgaaaagcaaaatgactagactaaatctgaatgaaagggatttattctaaggtgatactgctcactgctcaaggtgcttatctgcccccttcatgggctccctcaagttttctgagacttcaaacagcaacactcaactaaactataaaatagtcacagcaccttttcgagaaattttgactttgaacttgctaatatgcaaaggaaatagtccaaccatttctctagaacttggttgataagaaattttattttgtcccatttataattttattctaaaaatttgtttttttctgctatcgagtaggagagaagggaataagggaaagatttgtttttgcactactgtgagatttttataccttaggccaggacaaagcacacaagaaataaaatattaacaaaatgtccttaattttcctttctgaccaaaattgcttgcctctgcatttatatataaagaagggatgtgttgagcaaatgaaggaggacagctaggcagacaagatttgcccagcgcctggcatacaataggggcacaggtcattgcttaacaaaacgtataatttattaatacatgctcgaagcactgctatactaaccaaatattccctgcaaaattttaaatttacagtgcaaaataagaataatttaaaaactgtttctagaaaaagagctttaagggcttccccccccataacaatttaagattaacctagaacatggtagttattttgcaagaactggggagcaccactctcttctccttgtgcatgtctgacattggaggcctattgtgcacgaagttgtgatcaaaatccaagtcaattcattttgaaaagtaacatgactacaacatccatccactccaatgagcaaagggtgtaggctttgagtatacacagcaggccacacactatgggtcatggcatacagtctagcgttggaggttgctgcatttgttcatgtatctatgagttaggttttaagttttttccccctgttctattaatataattaattagttaattaaccccactcattcatttactcagtccacagccttttgttaagagcccgcctaggacataaagatgaagatccagtgcctaccctcatgaaacatagaatccgagcgaagaaggcttactttgcaatagtcatccaagtggtgcttttatggcgctttactgctcccgccaacacccagtgcctgggtatgacctcaggcggtggcagagcccgcgtgcgaggtcccgctctccctggcttgccccggcagggcggagtcagcctagcagccgccggcgctgcccccgcgcggcctttaattttgcagctccgaccaccggaaattagtcgaaggctgagcggacccggtcgagagccggcgagctccgcgcagggagggtgcgcccaccggtcccgccgggcgcccgcgggacgcgccgccagggccctctccgccgggggctcggcgctcgcccacctcttccaaatttaaccattacctaaatccgaagggaaatgagcaaacctctcggattgggtgtcaaggtattttcagcctcgttgggcgtatttatccccaagtgtttccacaacaagc

SEQ ID NO: 1977 - DNA, 2300 bp, Homo sapien
tccacctgccttggcctcccaaagtcctgggattacaggcatgagccactacacccagccataattggtcacttttgccatattttattggtcacacagacaagccttattcgatgtaggagggattacacatggatacataaatgaataccaggcaaagaggatcactgggggtcaaaagcaaggatcactcagggtcaaatcagaatggctaccacctgtacatatttccagtgcctagaacaatgcctggtacaatatgttaaaaaaaagtttgataagtacatgagtccttccttctttcctttttcccttcctccttctctccttcctttgaaggttatgggggtggtcacagcattaaagaaagattagaacagcaaaggcttaggaaaggcaggattactggaaccggggattttaatatcctcaggatattctccatctcatttagcttctctgagtatagccaggatctccttagagtttcatccttagagctttataatgagagggcacagggcttttacttttccagctctggtttgaaaaaccccagggcaggattctcccaggcataaccccttgaatcaatcagtatgatcagggagttaaggtaatgtgactggctttgtttgagtcaggcatctatacctgttaatggaaaaagatggaagggggtattgacaataaaaatagtacaactcagccatgctaggtactcccctttctctatgttcccaccattatatcttggtacaacagaacatataatgttattgttcatttacttgttcatatgtttgtcttctatactagactacacattcttacactagaatgtgaacacaggtaccacatttttgtagctccaaatgatataggttttgtagtcaagagagactcatggttgcatttttgctttttccttctactaacaatgtgactttggaccaggcatagcttccctgtcttttaaatgggccaaataatagttgtgtcatgtggaagcacataacattatttctgacatgctgtaggagctgaaaatgttagttactgtccttcctcttaggaaagtagctgacatagttgaataattttaatatatttgtgaataaatgaaggagtaaataaattcagcattcttggcgactggcttggggattcacttgtaaatggggataacaataggattatgataaagattaagtgagatgatagatgaaaagcgcttccacagtgcccagctatggtaagtgctttaaaagcataagccatcagcaacttgggggtgttcacctacagtcccagccattcaggaggctgaggcaggagggtcactggagcctaggagttcaaggccagcctgagaaacatagcgagaccctgtctttaaaaaatgaaacaaaatgggagccatcatgagagaggtaatcctttaaaaccaatatatcagatctcctagaaaagaattggagaagtggctttctctctatttaggtacctctcacaagctatatcacttgcttctgtactgcatagtaaactctcaatagcctctgagtaacaaactgcaatatccattaatagaacacaacatagcctgcagaattccaaaacctcaggtaaagaatgagaaaaaaaaaaaaaaagacaaagaggaaagttctaccaaattaataattttgtctagtgtcagaaaacacctaattatagaagtttctagccaatgcctcagcgtcggcactcaaacacaataacaattgtaacgtcattctgagataagtcatagaaggaaggaaggagggacagaagaaggaagatggaagagggaaggaaggaaggaagggagggaggaaggggagaaaagaaggaaagaaggaatgaaaaaccaaaatcaattagcatacctaagacaaaaaggctttggtttcagcattcctaatcctccacattcccagctccctactacctaacaagtgtataaggtggaactgaaagggtgttaaatgggtggatcccagtggcaatgtctttgttaacactgcctatgagtcagctataaattcaattcaaatccccagtctctctgtcttctctgcttatcatggttaccaacaaaatgactgctgcctttagaaaccctagtgggaaacaggtaaatgtgtaaaacgatgtttgattttatattaaaacttataaaaatgtaattgctgtaacagaaagtaatttgttattgagttaggatttgtatatttcgcttaatcttcaaaacacaggaacagcttgttaacatt

SEQ ID NO: 1978 - DNA, 2300 bp, Homo sapien
gtagaattatctaaatctggatttacgtgtagtttcatcatgattagatttggttggtacatattagataactattttagattagattatgtaaatttggtaggaagtgttttgtgttcttctcagtgcatcaggaggcatataatgttaatttattttttctttgctttcctttttctttttccctagagatagaggtcttcttatgtgcccaggctggtctcgaactcctgggctgaagtgatcctcctggctcagcctcccaaaatgttgggattacaggtgtgaacctataatgttaattcatcccactattggtggttttttaacttttaccacttgaataagatgctgttggctgaggatgctggacaattaccccctagctcctggtgtcaccaactgcactggctgaaccagccatgctagccacagacccctgactgtgaccaaggggaataggtatacatatttttaattttcttgttatggatttataaggtaagaaggagagggataaggatgataaagtatatttaatttaacatgttgtttgtttcataacttctttttttggattttattttttatagagacaggggctcaccaagtctcccaggctggtcccgaactcctgggtttaagtgatcctcctgccttggcctcccaaaatgctgggattacaggcctgagccagcacatccagcctgcttcatgacttctttctttttttttttttttgagacggagtctcactgtcgccaggctggagtgcagtggtgtgatctcggctcactgcaacctctgcctcctgggttcaagcgattctcctgtctcagtctcccgagtagctgggactacaggtgcgtgccaccatgcccggctggtttttgtatttttagcagagatggggtttcaccatgttgtccaggatggtctcgatctcttgacctcgcgatccgcctgcctcggcctcccaaagcgctgggattacaggcgtgacccaccgcacctggcctgagctaccgtgcccggcccacaacttctaaatattcagatgaatagtatgtgggtcttcctatgaacccttgccctaaaacatgcagaagttaggagtcggcctgtttccaggcagactttccttcctgatgcttttgcctccagtgtaagcagggcctgaccaagacatggagcacctttggtaggctaataacttgataatccaccaaaatgaaggtttttaaatattttctataaatacgaattgaatacctctttctttaccctttcaaaggtggctccacaaaagtagaatcacacttcctgtgaaaagtgttttaagttttctcctctagagctctgttgacatcggccatagcgaactctgtttatttttcctattatataaggaattacaagttggaatcagaagtaattggcatcctaatcctgatttattctagtggcagtgttttggagtcacttaaccctgtcatcctggttggccgtcccttctcccagctctaacggtgagcagctgataccctgctaggtgctggagagtcagaggtggacatcagggcccacctcgaaaagttgacagtctgtggtgggctgaagccagtagaaagctgctgtaggaaggcagaggagtggcccctatcccaggcttggggctctcagggaaggcttcctgggggtgagatgggagggtgggtccatatgctcttggaccagaatgagtagcccagagaaggcaagagggctcccaagcaaacttgtcctatttaattttttttttttttcctgcttagaaaagcaaaatgcgttatgaacaaaacaaaacaaaacaaaacaaaacaaaacaaaacaaaacaaaacaaaacgctgtagcaaagaaagcgaaaggctccagtaatcctccctgctcctcctcaccgcacggatcctgtgagataccccgagcattggaacctggagagcttgggcaggcattcaccctccttccagcagggggcggaacgtaaaacgccttgtggccgacgccctctctctttcacacgtcactggcgtgaccgtccgcgctacatactgcgcctgcgcaagggctgtggcccttttcccaccccctagcgccgctgggcctgcaggtctctgtcgagcagcggacgccggtctctgttccgcaggatggtgagtggatgcctcggtctcggggctttagatgcatggaggttcccttttcttgcccgtatgccagcctagggcccgtctcgcgcgtcgcaggggccggatggcgt

SEQ ID NO: 1979 - DNA, 2300 bp, Homo sapien
gatggggaacagtgctgttttagtgggggaattactgctgaatgtgctcttgcccagttaagctttgtggcaggtaatttaggcttttgaaaaacataacatgggaagcgagagaggtacgtagttgttatttgaggctaggttttcgaagtgggacatagcgtgttccgaacaaaccgacgtttggcatcactgattgctgtctggagcagtgcttcgcaaaagtttggcacaattaccggtgctggtccttgaagaaacaaatatggaaattgaaagcgtttaaaaccttttgaaagcaatataacaataattttatacctgttaaatgtaataaattggggcctgcattttgtatgtttcttttattccatatttctctaaggattcatttttattgttttatgaaactactagtctgtgacatggaaggtagaggaaaaagattcttgaccctagttgcttgtgaaacctgggattctacaagtgacagttgtctgtttactcttgaagttcaagtgttactttgttacatggttaatttatgtcaaaagtatcataggctaagacatcaaagttttaataacattcttttttctttaaggggtttgttaaagttgttaagaataaggcctactttaagagataccaagtgaaatttagaagacgacgaggtactgtcacctttttgtgtttacaatattaatctgctttgcagatgcagtggagtatcctttctacaattatttttttctttcagagggtaaaactgattattatgctcggaaacgcttggtgatacaagataaaaataaatacaacacacccaaatacaggatgatagttcgtgtgacaaacagagatatcatttgtcaggtaagttgtattctagacagtcccctttttttattgctagagaaattgtgcttgggaagcaaagcacatggtgtgtgtgttagaagggctgtctagcacctccaaaagcatccagtgaataatttttccttttagtaggtctagaattggaacctgggaacttggtactttaaaaaatgctcttggttgcgctcatgcctgtaatcccagcacttcgggaagattgcttgagcccaggagtttgagaccagcctgggcaatatagtgagagtttgtcttcacaaaaaatgtaagaaaattagctgggcatggcggggcgcacctgtagtcccagctactcagtgggaggattgtttgagccccgaggttgaggctgcagtgaagtgagatcacacccagccctccaacctaggtgacagagcaagacactgaaacctagtttatgtgtgtggggtggggagattagaagtaagtaagaagttcttgcccatcccaattccagtagaagaatagggtttgtcctgatttttcctatatggccttatatgccacttaaccactgaaaaggtagttgtgaattaaacagggctttaagattgttctgcttattctttgaaataggttttaataaaatgtacaaaggtggctcccgcatgaaagacctttaggaagtgtcagttttgctcttgtactaagagcattctcactggactctgaaagctagaatcctgggcttttacaactaggagaaattctgagagttaagatttattgatattttgcagcaggtaggcacacctgtttcctgggcaaatagtttgttgattgtgaaggcattgtcttcctccgtacccaagttcagataactaaacgttaggttcctgagactttgctgactttagttatgtttagttcaaaagatgattgaaatatttgggtattcctctttgactttttaagcacctctaatttactggtaacccagctaagagtcttaagcattttaagtgatgttcatctgtgtccatcaatgtttttttattcccttgaaaaataattaagatgtagtaagacagtgaaagcaacagattactaacctagtttctctcttactatagattgcttatgcccgtatagagggggatatgatagtctgcgcagcgtatgcacacgaactgccaaaatatggtgtgaaggttggcctgacaaattatgctgcagcatattgtactggcctgctgctggcccgcagggtatgtacaagatgattttaattgatgtagtttgtggctgattgcttggagagttttctgcaagatgtttgtacatggataagatagcttaagttgtgcttcaggagagtgcttgcttccagttttctgctttgttaatggatctatctaggtcagctctttccaataaaa

SEQ ID NO: 1980 - DNA, 2300 bp, Homo sapien
atgtcactgcactccagcctgggtgacagagtgacaccctgtctcaaaaaaaaaaaaaaaaacaaaaaaaaaccagacaagattgcttcccttacagaccttacatgattccagagggacaggaggtacaaacagttgataaataaataaataaacaaacaaaataattgtagaatatggtgtgttctgtaggagacacagagggcaaattgatagagaatgcagtgtaagggatggtgagaagtgctttagaggatgtgatcagagaagacctttctgaaataatatttgaacttataccttaataaaaaattcataggcatgggaaaaggacaggatgaactaaatcacaaaagaactgcaaacagctgatgaacataatgaaaaaaaattctaccttacttttcatcagagaaataagaataaaacagtagaatatctaattggggtagaagaaaatacaacgaaacatctggagcagtggaaaattgcattttaatgttcatcttatggttcctaaattttcctatataaatatgcattattattatagaaatttaaactaatttttcagttgacagtattaatcatgttaaagacaatttctaaaacaaagtccaacatttgagtgtctcctgcatgccaggcactgtttgaggcactgagggagacagataaagcctctggcctcatgttctaatgtgagatgagacagatagtaatgaactgataaataaataaatatgataattttagacagtgcaaaaggctatgaggataatgaaacagggttagaggtgacctgggggtggaagaggatctcttctagacagggggtcagggaaggctttctaaatgcaatgtctaatctgagacttgaatgatgtaaaggagccagccatgtgaagatctgggagagtacattccaggcagagccagcagcaagtgaagcaggtcaggaagcagaaacaagcttcaacctgtcacagaaagaccagtgtagctgggactttgagaaacggagtacgtggtacaagatcaggttggagacataggcgaggctagctcaaatggagcccaaccggtcatggaaaggactttggactttaattgaaaggggaatttattagagggtttggagcaaggcagtgaaataatgttttctttggattaatattaagaatgaatatgatcttatttatttttttatgtagaagaggggcaacctatcctagtggtaaagacctcagctcttttcagcatgttacttcacctgtatctgcttcagtttccccatcagtgaaataagtataatgatagtacctaccacctaagattggtacaaggattaaaataataacataaatcagtaaaagccaggtgtggtgcctcatacctacaatcccagcaacttgagaggctgaggcaggtgggtcacttaaggctagcagttcaggaccagcctgagcaatacagcaagaccccatctctacaaaaaatgtttttaattagccaggtttagtggtacatgcctatagtcctggctacttgggagactgaggcaggaagattccttgagctcaggactttgaggctgcaatgagctatgattatgccactgaaccccagcctgggtgacaaagcaagaccctgtctctaaaataaattagtagaccataggacatagttaacactatataatattagtttgataaataactagatacttaaatagtagttaattctggggaagtgggattatggaagtagaatgtctgggaactttgcttttgccttacatccttctcattggactttttgaaaaatatatttaggcatgcattactcttataatttaaaaaattagtttaaggaaaaaatcttgagtgtgatttcaagtttgcagttcagaaataaagtcacaccttaacctcaatgtttgatgcttgttttgttttgttcagaggaggaggaccctaaaaatatagtagtatattttttagagttttctactcagtataatacataacttgccactcttttttacatagatgtatttagggatttgggataatctaccaggtgttgtgaaatgtcaaatggaacaagcgcttcatcttgattttggaactgaattggaaccaagaaaagaaatagtgctatttgataagccaactagaggaactactgtacaaaaatttaaagaaatggtctatagtctctttaaggtaagcatacccattcatatgttgctagtgtgaagtgggactctttagaggaattggcaggacctcatccta

SEQ ID NO: 1981 - DNA, 2300 bp, Homo sapien
cacaagcttcactcggcttcagggcacctcactcgggtctcccacttcactggctgctccctttcagtctccttggctggctcacccactaccctgtcttaaagctgcattggtccccagagctccatcctcagtcgtcttttatttacactcacttccttggtgatcttaggcagtctcatggctttaaacgccatctaaatgctgatatctctcatatacctctagcttggaccacgctccttaatcctagactcattcatacatacaactgcctaatcaagatctccacttcaatttctaatagataccttaaaatggaacttctccaaaactgaactcctcttttgcctcaaacttcctctatttgtagtcttccccatctcccttggtgttttccccataacctttattagcattcttatccaatttgattttattgattacatttattatttattgcccctctctctcacatccacaagcgcaaggatttttgtctgttttgtttatgtaaccgaaacaacttgaatggtgcctgggtactcataaatctttattaaatgaatgaatgaaaccactaggattcatccttatcttactcagaaattactgtctcttgacccaaacaaaatcaatgaaaaattggtttatctgcaagcaataaaataagaccaagtagctgtagttccagctacatgggaggatggcttcagcccaggagtttgagtccagcctaggcaacatggtaagacccctctcaaaaacagaaagaacaaccaccacaacaaaaatcacctaggtttaaaacctgtgtctgtgtgtgggttgagggaaggggcagacatgaaggtatctcttcagaacaaggcacctgaacaaggcttatgcaaaaaccaagtgagaatgagtaatggtttgcttctggggaaaccccttctcagagcaacaggccggaatgagctctaacgggccacctaaactttgttagcatcacgcttaaacgtggtaggtggggtaaaaagcagccaaaaaaaaaaaaaaaaaaaaaaaagctgcttcttccattacaagtcacttggatcaacagctgttctcccactagggtggctcttttttcccttatttggaactcattgtcaaaagaaagacaccacaccctgtgttatgtagccttaaccaagcagcaggccacgtcccaggctccctgccttcaggactgtatttaattcggtgtttttgtttttgttttcttttgaaatcagtgttcctggacggggccaggaaaactctgaagctgtcttaaaaacaatataaaccaaaaaagtcggaattttttaaaagtacatttttaaaaaaagttgtaggccgttagaggcgaactggagcgtggtaaggggggcaccgagttcagcagtggggcgccctgtccgcgttcgaagctgagcccagtcctggggggatgccccggtctgcgtctccagctgcggcagacacccccttcccccgaccgccaccaagggcgagggaggacgagccagtccccagggaaggagccccaagcttcccttgaatttccaaacaacccgtccagacacgtcctgactccaggagaagagtccatggggagcgtcggtgctgccggggcgggtggcgggacgcgcagctgggcgcagcgcggggagccggaagccggagcagactgcgaggccagcgcggtccgggggtcgccgcatcagccagcgagaagcacgccccaatccgcgccgagcgtgcgacacccccgctgccgcggcgccccctcccgcctccgcgcgcctcccctttaagctccaggcgcagtcgatttgtgtcggcggaggcgaggtgcgactcccctttatggcggagtcggcagcagcctctctgacagccgcggcggccggcgggcgaacagggcaggaggctgggcctctggcctctcgccgccttcactgcagccgggccgaggggagcgcggcgcgcgccgcggcgggggcgggggagtgggcgggcccggccgggcagggggcggggaggcggggggaggcggggagcccggccgccagcgctcgggtccgcctctgactgcagcgcggcggggcgatgtgtgattaccatggcgaggagtctctgtccgggggcctggctaaggaaaccctattacctccaggtaggccggcggccgcccagccaccagctgcgggagcacccggccgtgtgccctgccgcgccgcgcaggactcgcccgctcccctcctccctccctgggtctgtgcccg

SEQ ID NO: 1982 - DNA, 2300 bp, Homo sapien
acaggcaggggcccagctaatttttaaattttttgtagagacagggtctcactatgtggctcagactgcatactggtctggaactccccagctcaagtgatccttctaccttggcctttcaaagtactgggattacaggagtgagttgctggtggctggctgacaggtattctttatacttgactgtgactccctgagtgtccttaaatctctgaacacttggtttgcttacacctttgtactcacacgtttgcacagaaaaataacacttttttttgatagaggcataatttacttctctaatgtataagggattagaatacttttgtgtagccaaagagcctaaattattagagtttctgaggtggaaatgaatgcgtctgaagtattgaatcactgaagattttgaagttgaggcttggtgaccactttacagaaatgttgaggaaaacttagaccaaacgttctccaaaacagatgttctctgattaggcttagctgcacagcaaatatatctgtttgtgcaatatctttattaatttttgtactgcatctactttttaatattttatttatttatttaccttaatgccacgttcctgaatgggaatgcatctacttttttttttttttttttgagatggagtttttgctcttgttgcctaggctggagtgcaatggcacgatcttggctcaccacaacctctgcctcctgggttcaagcgattctcctgtctcagcctcccgagtagctgggattacaggcatgtgccaccacacctggctaatttttgtatttttagtagagacggggtttctccaagttgatcaggttggtctcgaattcccgacctcaggtgatctgcctgtctcggcctcccaaagtgctggaattacaggtgtgagccaccgcgcccggctgcatctgctttttttaagtcaaaattttcctcagccaacgtatgaaggtcacttaagacgaatttatgagagacgatgatgagaattgaaataaagtgaaacctgaaaggtagtaggtaagtagatacagtgagggtacagtaagaagacagacttaaaagattaggactattattcaggagaagcagaggagtggaagggtatgaccacaatatttaaagtattgaatggtattggataaaacgaatatgcttatttgccaaattctgagatcacaggctgagggaaccccttttgaagtatgagccaaatgagcttagaccacaaaaggtactttttcagagacagaaaaaatatggtgttcactatccctgtggcataatatgggacaaaaatataaaatggctttaaaaatattttgacgaaattataaataaagattccacacgtggctactaagaggagctgggttgtatctaggtgtaagttaaagagacaagcatacaatctcacagcttgtcagttgggacccctgtaggcagcagaatctgggcaggctaagggtctgcactaataaacaattctgttttcttaaaccattttgcaggggactattctcagatttcattacaactaggaaggactgcaaagcgggtaaacagaaaacaacctttcatcgttaggaaaaaaatcgtctgaaagtctttcataaaagcagctcctgataaggagtttgggactggacagtgaatcgctgaataaaatttaatctcgacatcctgggtcttctcccctctgaaggaaattctaacagcaggccttaggatgaaagtagaggaaacgtgcttcagttaaggttttctccagggaaaagaaatcggcccagcaagatgcacagagcaccgttacgaccacgcacaccgaaggtcgcacacgacccttttcctgtataacagtgccagcctgccgacgatcaggagcgcagctttcactattgtgttagccccggcggcggaaggactgagcctcactgcaacgttaaagagtccttctttgttcagccccagtcggggacgcagggcgcggtgttcctccgcgctcgccgcgcagtccctgcccccccgcggctttggagagctgccattcggcaccggagtcgctccgcgctcccagaatgcaccggcagtccgcgggaaaccaaaatggcgaggggctgtattgaagtgggctgtgtttgaggccggtgtaagaacgctcattctacccccaacccttgtctccaaggacctcggtttgtgcgtgcatatgtgccgggtacccggtggggcgggtgcccagtaagtgctcggactcgcaggggaagcgcccacggggacgga

SEQ ID NO: 1983 - DNA, 2300 bp, Homo sapien
tgatgctctcctttcttatgtagatccattagttatctattgataaaaaactaatcaaccacaaaatttactggcttaaaatatttactagctttagtttctgccagtcaggaaaatctggtcactgcttaactgggtcttctactctggatctctcacagggctgcagtcatcttaggctcaattgggaaggatccaaactcactcatggttgttgacaggattcaattccttactagttgttggacttaggcttctgttccctacaagctgttggccagaggccttccttgtttcttgccatgtgagcctctctgtaacgcattttacaacatggaagctttgcttcatcagagcaagtaagagggcaagagaaagtgccagcaagagaggacaagctagcaagacggaagttacaatctttagtaacctgattatgaaagcaacatcccatcacatttgccatgttgtatttattacacaagtgtatgaatatcagaaaggcagggatcattgagagccatgtcagaagctacccatcaaacccatacccaatggggctatatcctatgtgaatcgtgtgtgccctaggttgaggatatgaccctccagaaaggtttttgcatttcctcctcccaggcattccacgatggaggactacattttatattgttctctgcttgagtctctgaacacgtgggtagtgaaactgtgaactacaaatttgcttgatgtgtaagcttatagatgaattacctggtgaacttatattgtttttttcacatatgacttgaggccaagacggacaagctttcttgtgatctctatgtactggtggactttttaaaaaaattaacccttttactgatggtatgacccttcaaagatcctagctttatgcatagttcttagttcctgccccttacataattcagccccaaagcttcatgacctgtcctcatggggatattaaatctcaagctcccaggtaactgtgacaagttaacccccttcacaaacttccatttaccactctagttttcatgtcttttttttctttgcccttgctatgtagttggaaagattgttttcaaaatataatccagcatttccagggagttttatactgggagggcttttcggttatctgtatattgccaaattagatgtccctctatttaatgtttaagtacccatttgtcagcatcaaaattaatgtctatgtttccttttaacctaacttttaacagttttactattatccccatcatgttccattgaaatcaactggaatttttgttccagattatggcttttttttttttttttgagatggagtctcactctgtggcacagactggagtgcagtggcatgatcccagctcactgcaactctgcctcccgggctcaagcaattctcctgcctcaacctcccaggtacctgagattacaggcgtgcatcaccatgtccagctaatttttgtattttttttttttattagagacagggtttcaccatcttgcccaggctggtcttgaacccctcacctcaagtgatccacccacctcagcctcccaaagtgctgggactacgggagtaagccaccatgcctggcccagattgtggcatttttagtatttattttgtatttttaaagtgtattttatggccaggcacagtggctcacacctgtaatcccagcactttggaaggctgagatgggcggatcacttgaggtcaggagttccgagaccagcttggccaacatggtgaaaccccatctctacaaaatacaaaaatagccgggcatggtggcgcatgcctataatctcagctactcaggacactgaggcgggagaatcatttgaacctgagagccagaggttacagtgagctgagatcgcgccactacactccagcctgggcaacaaagcgagactgtgtctcaaaaaaaaaaaaaaaagtatattttatgattttttaattaaccttccatagtcttaaaaatcatttttcacaatttcattaagcctgacagccactaccaataactgctttttaactttgttttactgaaatcttttcttagctttgttacattgcttgttttctgatttaatatatatattttttgtttttggagggtatccttgagtaattctttgagaatgttttgagtccttggatatctgaaaataactttatttatttattttaaaattttattttagagatgggttttcactgtattgcccaggctggagtgcagtgactactcacaggcactttcatagaacac

SEQ ID NO: 1984 - DNA, 2300 bp, Homo sapien
caaactcagtacttgtagtgtccactacacactaaccatccccacttacactatgtattttaagaactatggatctttttgttcgcttttctgaaatgccccttgttcctggcattttcgtctcaattaagcatctttctggattaaattttattttctccaggaatcctcttctgaaacccttagaagtgaccctcctctactggtacttagccatcctttattgaaattacctgtttatgagccagtaacctttattaagctctttgagaagagggattctttctttctcttttacctacatcccgcacaacccagctccccctccgtctcccccacctccatgcacaattcctggcacgtgttaactgttcagtaaatgttgaacttttgaactttactggaaatcaagaaacactgagttttagcctcagttttgctcactatgtgattttagatattttattctctgtgcttatcgtgtgtatctatatacaacttaatcctaaagttccatcgtataaaaaattctacaactttttattttgctctgtatgtgacagtacctggtatttaaaaacaattctctacatcaacttaaaaaattaacatttgatgattataattaacttctaaaaaactgaaagatgaaacacatcaatgccttttctttcccccctgtactgctacctgaaaacatcggaatttgctgtggaacgaacaagatttcttctaagaaattaccccctaccaccatgactacataaaataaggtaattcccagcaagaatattatgcagatactaaaaagaaaacatgctaggcatggtggctcacgcctgtaatcccagcactttgggaggccgaggcgggtggatcgcctgaggtcgggagttcgagaccagcctggccaacatggtgaaaccccgtctctactaaaaatacaaaaattagctgggcatggtggcgcacgtctgtaatctcagctactcggaaggctgaggcaggagaatcgcttgaacccgggaggcggaggttgcaatgagccgagatagcgccactgcactccaactctagcttgagcaacaaagcgagactccgtctcaaaaaaaaaaaaaaaaaacaatgacacgagggaaatgcttacaatgctcaatgaaaaaatgaaaagaaaggttataaagttttaatatacgatttgatcttttgaaaataatggatatataacttaaacggaaatgtatcattaaatatagcaacagcgtcttccaaaaaatttcaaaatcgggcttaatgccaattacacgatcataatccaaaaacccttaactgaagcaaagacagtgatttgtaacatctgaactgtgtgaaaggggtgggggtgattcaaacaagtgtcatcaccttgtccaatgatgaaggagaacgtgtatcagttctgcattgtgaaattctcagtatgagagcgtgtagtggctaagaaaagcagtgggcgaattaggaaacaaagagaaaagccagcgacatcaccagttctggcctccttcccaccggaggaaaggggagaaggcgggtagtcatcaattccaggtccagcctaagttctgggtccccggccccagcgagagcctcgcctcgcctcgcgcgcctgcgcggagcgggctggcttcctgaacggccctcgcctcttcaccaccagggccgtccaccagaagtttctaaacgggtgagaggcgacaacgcagtgcagctgggttaaaggaaggaggctggtttatcctccgcacttacttggtactcgatctccagcgaggccttcaggggcatgggctggtagaagcactccttctggccggcgggaagggtaaaggtgaagtcgctatcgagggaaggtgtgaagccggccgccccaggcagcagcaccggaggcagagcggccagaaggagcacggggaagggcagccagatcttgtcgcccatccctgctggggcgatcccgggctgaaagaggcgtcaggtactgttgtctccgctccgcgtttcctctctggactcctcgtggttgacagggaaatctggagtctgaagaaactccaggtggcggccgcggcggcggcgaacactccctccgaaagagaagcgcagttctccaaagggtagggactctgggcggggctagcagtcctattccgcaaccgcctcagtctcggccccctcaggccaggcgtgagcgccgcccgcctctccccctgacggcctccggttcccatggcttcccccaccaatgggcatcatggcgg

SEQ ID NO: 1985 - DNA, 2300 bp, Homo sapien
ctcctcctcctacgcccaatagttataaaattttaaaaagacacatttacaagtcacaaccacagggatcaaaataacatttggcaggtcaactcatagaaatgaagaaaagcttttgtttcttcagtggatgagtatctctagggttgtgaaactactaaatttctttgcatataaaaatcacaataaagcatcacattttattattgtaattaatacaataaaaaactaaagctttataatctccactactacagagctttctgcgcaatcttaaaattacattcctctttcagatcccatttacctttttcactgtagcatctccttcaacgcccttcttagcattctgatcccatcccaagttccaaaaggttaaaagtcctgtgcattacgttcaggaccgcaatgtacttagagaagctcaatattttgaatgaattaacgaatactaaactgtccttccttccctcatccagttagaatggtatgttacatttattccccactcaaaaattctcagatgtagggaggaagattaaaaagaaaactcccaccttatggaaagaaagtggcaggaaattaaatgagatactatgtaatcttaatagacaaactggttctatcctctttcccttttttgtttccacaaatttgcttctgcttaagtgacaagactctcgcagacaagtcaataaatcaggtccccatcctgctttacctattcaacatctctagctctctgtaggatggtgaaggagaaaagggtagagaaaattgggcaaattctataataccatttggtactatatatttcatcttaaatcaggttttagttcaacatctgtgtattgccatgcaagaaataactcccagtccgggcgcggtggctcacgccggtaatcccagcactttgggaggtcaaggcgggtggatcacgaggtcaaaagttaaagaccaacctggccaagatggtgaaaccccgtatctactaaaaatacaaaaaaattagccgggggtggtggcgagcgcctgtaatctcagctactcgggaggctgaggcagagaattgcttgaacctgggaggcggaggttgcagtgagccgagatcgcgccactgcactccagcctgggcgacagagtgagactcggtctcaaaaaaaaaagaaagaactccctaactcttctgcagtagcaatgaatatatttgatactaaaatgttttcattttcctagtgggacatttactgtcaaatgaatgtccttaacttcaatttacagtagttacccaaaaaaggctatcttcactgactatgcatacctagaaaagcacatcatcctactcaccgaccttaacaacatcatctttcggccctaattaacaatgtgtttgtaggtttgcacacgcacacccatcaaacgaaggacaagtgttcttttataccctatgtatgtgatacaatgggctgtagtcgaaaaagattcctcattttggaaagaagtcataactttatgtagtagtctcctgtctcaagatcgcttgacacagctaatcttacatccgtctgaaagaagcgggggcgggggtgggggacggaagtgacagtttcctctttttttttttttttttaattttatagagacagtggctcgccatattgccaaggctggcctcgaactcctgggctcaagcaatccttccgcctcgacatcccaaagtgctgaggtaacaggcgtaagccactgcgcccggcctcctatttttcatcaaataaaatacaaccgttcagagcagcatgctcagcaaccacgaggaccagtcccagcgcatccaaggtgccgggagggaaaggaacagaactcccccaggtaagccggtttccccacgccaaggcgcagtcgctcaccacccaaatcgtcgctggggagagacccacccggcgactgcgcgcttcgcactcgagtctgcgttaggaagcctctgaccctttcccgggcccctgcgcgtggaagcctcggacacaactcggagaaccagcgaaccccggcagcacagaattcgaaccgccgcgggagccgttgggacgcgcctacccggtcactgccccgccccggcgcagactgcgtgaggcgccgccgaaggcgcggggcttgccggggatcgtggtcggcgagcgcgcccgagcccactagcggagcccgcccgggactacatttcccacaattaccgccatgatgcccattggtgggggaagccatgggaaccggaggccgtcagggggagaggcgggcggcgctca

SEQ ID NO: 1986 - DNA, 2300 bp, Homo sapien
gttacctggcccaagggggacttgcaggtgcccagccccagtatgagcatctaggtgctgttgttgagcatgaggtagctggccgtggctgctgcactttacagacccccacctggaactgtcttattttattttatttttttttagagatagggtcttgctctgtcacccaggctagaatgcagtgttgcgatcatggctcactgcagcctcaaacccctgcgttcaagggatcctcctgcctcagcctctagagtagctgggactacaggtgtgcaccaccatgcccagttaactttttgtagagacgatctcactacgtttcccaggctggtctctaacatctggcttcaagcaatcctcctggctcagccttctaaactgtttggaatacaggcgtgaaccaccacacccagcacataacaattttagagatgttaaaaatgtgaaaacatggtaagactataggagattatttaaaaaaaaaaaaaaagcgagaacaggctggacacagtgactcactccagtaatccaagcacttggggaggccaaagtgcgagtattacttgaggccaggaattcaagaccagcccgggcaaaatagcaagaccccacacacacaacaaaaagtgaaaacaatgtgtctcttagaatagatgaactgtgatatatactatttgtgggtgtaggttaacatgaatgtacaaaataaaaaacaccaaaatcaggatagggttacctctgttggaagaagtcaggggaatgggatttggaagggacacataaggacctcaactttatttgtaatattttgtttgtcttctgtagccttttcagacaaagagtgaagattcattaaaacgtgattgggagtacatggtaatatttatccagactttttgatgtggctgaaatatgtcattactttttacaaattggaagtgaggaagagtagataagtgtaaagcggataagtctggcttgaaaagaaggataatagaggaaagcacaatacgtgggaaggtttttgtttgtttaagtgagaaatacaggtatcctttgatctgaacagtacctgtgcacactcaggaattgattatattcctacagattttcagagaagtcctttgttgtccttactttcctttatctgaaactttggagtcaaatagacgtacttaaccacatagactcagaaagttaggagtacttttacttgaacttgtttatacttgtggcaaaataaccaacagagagaatgaaaatacagaagctagagtgtatttctgaagggttaagagttaagatctagactataaatagagtaattcaccctggataagaggagggtcactaacctcacttacattagaaagaatatgatgggaataggtttaaatattaaaatatttttaggtgtgagagtgatattgaccaaatattctcaatgtattgtgccccaaattttcatttcattgcaagaagcataaggaactaagagatgaggcaacaaggttcggcttaaagagtggttggtggtggttgtgttttttgttgtctagatttttatatctggtatcaatagaagttaccattttttgaaataactatttgaaatttatttgacctttgcaaaggtcacagaatttactgagtatatttaatattctagacaatagactgattctgtaatacctaacctttgaaaatgtatcatccagcctcaggctatttccctaatctgtcttttccagatagggaaaaaaaaaattgccaacacataagaatttatatatatttcgacatttatgtttattattgttttgtgttttatttttcatattgatagagtgagaaaatttttgtagtatgatctacattcttcattttatactttaagcctaatactcctttttagtgcagagaaatttgtttctctccaattattccttataattaaagattactttggaacttaactcttcaaatgcagagcattcttcacttttattcattatctctttttaaattttagagctgaacgacaaaggaatgaagcactatataatgccgaagagctgagtaaagctttccaacaatataaaaaaaaagtggctgaaaaactggaaaaggtaaaaggcagttgtgcaaattcagtgttttgtattactgtctatattccaacagtaaaggtaggaataattaaaatatgtttatggttgagacagagagtaatttttatgatcttacaaaatcatttaaataaacaatttgtaaatgttagttaaggatgatgttca

SEQ ID NO: 1987 - DNA, 2300 bp, Homo sapien
tatactttacacttaccaagttttcttctaccatggaaccttggccatagctgtttctttttactggaataacagttacatggtcagcttcttcttgtccttcacattacttcagagagaagccttctctgactacccactctaaagtagccacccagtcactacctcatcatgcagttaatgctctaacatagcatttaatattatatttttcttacttaggtgtctgtcttttcttctggacctattacaatgtaaactcagatcagagacatttatcttttttactattaaatccacagcacttagaaccctggcatataggaaacatccagtaaatatttgcaaaataaataagtgaatgaaaacatgaaagatgtaaacagtgaaatcttaagttctagctaacagatgaattgtggaagctccgctatttgcatagatagaagttagagttttctttaatttcatactatttttagaatattagttttagccttgtgttatatacctcttgagacttttagaagaatattaaaaacaactcattaaagaagttcaaaatcttcttttaaaaattagtacccttatcagtactatttcatatttcagactggaaaatcatatgaagattttcaagatcaacattttcaacctttgtcttatcagaacttagagtttcaaattattctctgatcacaggcttcactttggtaaaagccttaaaattgtgtcagtattaagcattttataatataaggttatacataaattagggtttaagagggcttagaatttgtaatatttttatattagatttaagtgcttttttatatgtaaggcatcgttttgagtaacatcctcatgagaaatactatggttaaatgcctcattcaattgtaatgaagtcacaattgttacatgtaaaagactttgaaacactcctttgatctgtgtatgaaaaaatgtggatatgtatttttaaaaattcttataatcattcaatcttggagtcctgggagtgttttagcaattagcttaaattatctgtaataccacagtgtgagttaacttttacccttttagaataccctttattaaattaattgtattgatgtcaatctttttctttatctattattccttaaatttgaccctttcaatctgacttgattgcatatattattttgcttttaatttatagaagaggtaacctggttgacctaactttttaaaattatactcttctactatctgctttgatctttttcctttgataaattgtagagaatgcaagatggagattgaagacaaaaagcaggagctccttgaaatggatcaggcacttaaagagagaaattgggaactaaagcaaagagcagctcaggttgatttttcttgattatattttaatggagttttctgttatgacacagtcacacaggatttgagaggtcaccaattttttgtaaaatgggcatttttatagcatatcttttctctgcacatagggtttactaaattagagatatgtcatctctctttatcttgatatttttctagcaagtagattttgaaaatgaggattagcttagtatctgagccttttgatctcttatattaccccgtatcagaagaagctaagtgttggaggaacaaaaatatttggaaggcgttatttagcactttttgtccagcataaaatgaagtctgaattatttgtcatttatgaacacaactatattttattgtttctataatgtatatgggattgaatgtcactatgtattgttaaaaaaaatgcatatggggctcatgagccagtattagtaaacaatgattatttttcccatttaaaaaataatttgagtttatactaaagcaaagagcattagtatattagctatactaatgagtttatacttgttatacttgctataaacaattacaaagcctattctaagcatacaagtttttatatcagaataaaattgaacaacagtttaaggttattttttaggttacacatttggatatgactattcgtgagcacagaggagaaatggaacaaaaaataattaaattagaaggtactctggagaaatcagaattggaacttaaagaatgtaacaaacaggtaaattattttaaaattacgtattttaaattattttttaaaaaattcaaactgtaactaaaaacaccccttcaaatagtgggtgttttttgttattgttgttttgttttttgttttttttggagacagagtcgttctctgtcacccaggctggagagcagtg

SEQ ID NO: 1988 - DNA, 2300 bp, Homo sapien
catgttagccaggatggtctcgatctcctaacctcatgatccgcctgcctcggcctcccaaagtgcaaggattacaggcgtaagccaccgcgcccagccagtctggggtatgtctttattggcagcatgagaacagactaatacaactgcctagaatagtcactgataaacagtaaactgactcaatgaaagtcagccattattagtacaattataaacctgtggcagaatgacttataaatttatactaattttaaaaattaagtaatactagaaaaattagcaaataatagtctgattaagaactgacattcctcgcctcttttcctttctctgccatcatggtgtgtgcttgactttgcttcttgccatgtcttctcacaagactttcaggattaagtgattgctggccaagaaacaaaagcaaaattgtcccattccccagtggattcagatgaaaactggtaataaaatcaggattttattaataaaataaaaccaaaaggagacaatggagaagaaccaagctgggtctataaggaattgcacatgagatggcacacatatttatgctgtctgaaggtcacaatcatgttaccatatcaggctgaaaatgtcaccactatccggagagtttgacatgttttgttgggaatatattttgtctctctgcatctgttatgaacgcattggttggctgggttcagtaataaatatgtgaggcctttcattaaaaaaaaaaaaaaatttgcattcctcaatgtacttatgcattttaacaatgatttttatataaaaagcaaaagaaagcagcaagtttaagccaaaaaacaataaataaaataataaattttctttaaaaatataattaagttttagaagggctttcttttaaaatattgaaatataaaatttattcaaaagcaaaataacagcttctatgaagtatgagctacatataataagtaaacagcacagtaccaaaaattccattttttcaacacatcagtatcttctttgaattacacattttctccctagaataatgcaaaataatagattaatatttgaaatattcctaaactgatttagcattaaaagtctaccataataacaggagtataatttaaagcgagagtgagaaatatttagtctactgaaaaatatgaatcataaaaagtcaataatgaaccacatgaatataaaatgcaggccgggtgcagtggctcactgcctgtaatcccagcattttgggaggccgaggtgcatggatcacctgaggtcaggagtttgagaccagcctggccaacatggtgaaaccctgtctctactaaaacatacaaaaattagctgggtgtggtggcgagcgtctgtaatcccagctagtcaggaggctaaggcaggagaatcacttgaaccttggagggggaggttgcagggagccgagatcgcaccactgcactccagcctgggagacaagagggtaactccatctcaaaaaaataaaataaaataaataaaataaaaaataaaagcaaataattctggcttgatgaggtgggtgtgaatatggggttaaactaattttaaaactcgaaaaaaggaacataaatataacattttggcatcagtgtcatgttatagtttgagagcacaataaacaaggatgatgaatagctacatgaaaaaatcaatgaaaaaggaagattaaaagaagaaaaaaagagcagacagagacaaaagacaattatgtggggaaaagcaagagagatcagattgttactgtgtctgtgtagaaagaagtagacataggagactccattttgttatgtactaagaaaaattcttctgccttgagattctgttaatctataaccttacccccaaccccgtgctctctgaaacgtgtgctgtgtcaactcagagttaaatggattgagggaggtgcaagatgtgctttgttaaacagatgcttgagggcagcatgctccttaagagtcatcaccactccctaatctcaagtacccagggacacaaaaactgcggaaggccgcagggacctctgcctaggaaagccaggtattgtccaaggtttctccccatgtgatagtctgaaatatggcctcgtgggaagggaaagacctgaccgtcccccagcccgacacccgtaaagggtctgtgctgaggaggattagtaaaagaggaaggaatgcctcttgcagttgagacaagaggaaggcatctgtctcctgcctgtccctgggcaatggaatgtctcggtataaaacccgattgtatgc

SEQ ID NO: 1989 - DNA, 2300 bp, Homo sapien
ctcaggagactgaggtgggaggattgattgagctcaggagtttgaggctgcagtgagcaatcatcatgccattgcactccagcctgggcatcagagcaagaccttgtcttttaggaaaaaaaggcagggaagaggaataggtaatttttcagtgttcagacattccagcaatatgtgtggagtactcattctcactacagtttatgaggccatagctagtatgtatgactacccatccaagtttccctgcttacagttactattccaactgattggggggcttttcctaatagagtgatttaagccttcatttttagacatctaagcccttggtgatcatcagcataaaatgtgacaaattaaacaaaagcaagacagcacatcagagaacaactctgaggtggaatgattgggaaccaatgaatagttgttcagtaaatggtttatattttacagatgatgaaactgaaacacaaaaaatttagattaactcttaggtgacaaagccaggattgaagctcatgcggtctggctccagaacaactcttcttcatagttacgttatactgcccctgcattgttggtattgaaagtaagtgtaggccctgggccttctatacctgggattaagtcacatattcctcttcctcttcaaattttactagtcttgtgagcgagaaaaagctactgaatttttctaagctcagtctttttcatttatgaaatagagatatcctttgtgggccggttgccgtggctcacgcctgtaatcccagcactttgggaggccgaggtgggtggatcacgaggtcaggagatcaagatcagttgaaaccccctctctactaaaaatacaaaaaattagccagatgtggtggcggacgcctgtagtcccagctactcgggaggctgaggcaggagaatggcgtgaacccgggaggcggagcttgtagtgagccgagatcacgccactgcactccagcctgggcgacagagcgagactccgtctccaaaaaaaaaagaaaagaaaaatagagataccctttgtggaggcatgatgcttatcatgtgataagcggatttctaaaaatggtggtggctttaagcctagcacataaagttgggattttacaagaaaagtagagagaattgatcaagagattttgtgacagaacaggaagttagaaggcggcgaaatgagaaatgatctgtgagagacttgaggagatgaagaggtagatattctcaatacactgtagaaagcatgattaaggggaaggaagtgagaaacattttttaaaaatcatcctccagctaatttggagaacagccacactttgtaatatgagccaagagataaaatcaaatttgtgtctcgggaggggaaaataagcctcttttcaagttaaattcccctgccacctggtttgttttcttcactgtaaatgagcactgggaaaagaacaggctttagagattctgcccaagcaattcgcagaccattttcttggtaatcacattgtagctcttttttcagtcaggctcacacaggatttaatgctgttttttgacagcaagtattatttttgacgtctatcaaatgcaccaaaacatgcctgaaatgtcttattggaatgtatatatgggaagaaaagtgagttacatgtatctttgaaatgacctaatataaaattctgcaaattcacctttataagcttggttatgtaacttgacctaagtcattgttttggttaaaacctatttattcctaatgttccattattggaatgctaagcttgtgggagttatttatatcctatgctcaaggtcatcgtctgatttttcacacaaaaaaatttgcaacctctggcataaatgggttaaggccaacatttactacaatgagctagtacattgattaagtgaccaattatagtattttcaggagcatatgatggcaagtggcatgtggttaaattacaggcaaagtgattgagaaagtcactgtctaaataccagttcaccatgatggcattcaccatcaaacctatcgtctttattaaaactaaaattagggttactgtttatatttagaacagaaatatgtatctttgtgattttcttgtatttgggagaaaggaacaacttaagcacaacttaaacctacgcagatgcttttctagtattgggagctttaaaggataacaaaatcgatttctatttctttggtataattatattgattatattggaaaaacatgaaccaatacatttggctttaagatctaccagctggtcac

SEQ ID NO: 1990 - DNA, 2300 bp, Homo sapien
acggataaacttgttaaggtcaagataaatttaggcaccataataaatctttaaatcaacagtaaactgacaaaaaaaaacaaacccaccacttcataaagtatttttttttttttgagatagagtcgtgctctgtctcccaggctggagtgtagtggtacgatcttggctcactacaagttttgcctccagagttcaagcgattctcctgtctcagcctcccaagtaactgggattacaggtgcccaccaccacacccagctaatttttgtatttttagaagaggtgaggtttcaccatgttggccaggctggtctcgaactcctgagcttaagtgatccgccccccttggcctctcaaaagtgctggtattacaagcatgagccaccatgcccagcctgaagaaaatttaattaaaatactgtttttaatcaaagaaattttgttttgactaaatttagtagcactgaaaaacaagtgtctacacttcagaaattaaagaaccagtaagttgtcctgcagaaaatgctaaatgaaaaaatagcataataaactgtaatgtcttcttgagagcagcatatagggctcagacagaacgttttaagaaaacactgtcaacaagccagttgccatcatatgtatcaagagtaatgaatctgatgaaccaaagtgacaaaatggatttcaacagtgtcttgtttagtttttagaaattccaacatcccactatttatagtatagcctcttcttccacatgacagtatgacagactcagtttttttactttttttttttttttatcttttttgagacaaagaatcttgttctgtcacccaggctggaagtgcagtggcacaaccgcaactcactgcagccttgaccccctggctcaatcgatcctcccacctcgccctccagagtagccgggactacgggtgcctgccaccaagcctggtgaaaaaaaaacccgtgtttcatattgtcatatagaagaggctatactataaacagtgggatgttggaatatatatttatatatataaatatatattatatatatatatatatatattttttttttttgtagggacgggtctcactatgttgcccaggcgggtcttgaactcctgggctcatgtgatccccctgcctcagcctcccaaagtgttgggtttacaggtatgatgagccacaacgcctggctgacacactttttttttttttaaatgcaatttctgtttagaccttgacacctgttgatattactagtcactatggaaagaagtaaaaacagttgcttaagatgctctaacacttttttcccctgtagaagccaacatggaatacaacatgaaaactgtctaaatgggaaccttctaatatagctcattgtatgccatgcatttccactccatttccactatgttggaactgacttctgctttcctacttagccattaggcgacttagttgcctctaggcaagtaacttctctgaaatgtttcatttttcatgaagtttaaaaaaaaaaaggtgaaggactttagagagctttgaaccgaataaggtctatcagacatcttgaaaagctttttctccagacgacgcagaaacaggcacacggggttctgctttccccacctcccacccccaagcccaggtcccattcttctcactttcaatcctcatttgggctcctaaaggaatagcaaagagagttattttatcaataccagcgctcctctgtccccaaatccagctagggaaggtttcggaggcctcagctacttgagagagggtagagacgatccttcctcgcctatctacccagccacccaccccttcccagatgtagcgtccgggccccagaccaagcgcgtgcttggagctctccggtacagtgaggcgcgcgcttgcctggctagggtccctgtgaaggaatgggatcccgaggtgcttgccaggaccgtagcaggcggaagctgctggcagcgcgaacgggcggctcccgccggcgtgggtgggggaagggcggcagccacacccggaagtcggtccgggagggagggggaaatctgagggaacgaggcttccggtggcgcaaagggtgtcgggagcggcttcctgcaaaccttccctggcatctggagggaccaccgttgccgcgtcttcggcttccacgatctgcgttcgggctacgcggccacggcggcagccactgcgactcccactgtgcctggctctgtccatattagttcccaggcggccgtcgccgttccagcagcggcagcggcagcggc

SEQ ID NO: 1991 - DNA, 2300 bp, Homo sapien
tccctgatttcacaagcaatcaataactttaattagattattacaaaaggcaagttctcacctcaaattgagtacaactctttcacaagagtacatgtaaaaatatcgcaaaaggtacgttcccgaaacattatgaatagtaaatatgtttctcctctctgaaaccaccagaatacagtcccccaaatccctattacgggaccaaatcctttccaggataaaagaaactgttgaagttttcagaagtgctgttccataaaagcctaagtgtatacattcaaataggaatgacagcaggaaaggacggggaaattttccgttaaaaaaaaaacttgcataaactttcaatcaaagatttcaaaacttatctccacagaatagaacaaagcaaacgacataaaagcaaacgaaaagaaaaaaacgaaaatttaaagttcaccctattcttacagaatggaacaggagttatttggtaactcattcatgaacgtaccatcaaaccatttttagagcagaaaacatacaccttttatttaacaacgataaacttgacaacgttgaacacattgtatgttaagaattttttaactcatgtgttcagaaaataaatcttttcctctacattggtgaaaggtcaggtggggaagggggtgctctgtctccacccacgttgaagttcctccgtctgaattttaactttccaaaggagaatttctgcgttccttaattattatctaagttcaacttcaggcaagtaattcttgttgcttcggcttacctggctgtaaagtgagatcactcttattctttacgttttggggacgctgacctaaatgtttgcactccttacatgtattcgctggatgaaaagtactgcaaaaatgctacaaagggattgtttttaaagcaccggctgcctacatgccagtctggctttttcattaagttacttaccagggaagaggaatggaggctttgacacgaaagggtcacgcgattagcagactgctaccctagaacctcattcaaaccagctctcacacacgacttaccttgtatgacatgctctggtgagatggtcttcttttccgatttgttacaaatctcattggcttcagaagatataaggtgaatgaattcagtgcagcagttcaccaccagctctcgagcatcgttggccacccggacattaggaagagtctctttgatcattttattgatagcagctctggggatagtgagatcatcatcgttgccagacgaggaagccatagtaccttcctgtttctcgcgccccggcttttaaaaactccccagctctggtccactactccaccgagatttctcaaaaagtcgccctcggagagtgatcccggggggtgctttgcgaagagggtgcagaaaatgaacggaggagcagctggcttgagggctgggaacactcgcgtgtgtgagagatttaggatgagtttgggaagaaagtgggggcccgaggattctagagagagcacagcccaggctgaggaggggaaagcgcggtggtccggaaatttgagcggctggggaaccaccttcgtgtctcctcagaggggcgggcgctgtcgcctaactggtccccaacggcgtcggagcagaggcaagatccaggggcactggcctcgccgcggtaccgggcgggtacccagcgggctcggctctatagagcccgaggccccgctgccgctgccgccgccgccagcagccgttgccgccgcctcggccaaaccatccttcagacacccgcgccgccgcctcacaacatgtccgccgctgccgctgccgctgccgctgctggaacggcgacggccgcctgggaactaatatggacagagccaggcacagtgggagtcgcagtggctgccgccgtggccgcgtagcccgaacgcagatcgtggaagccgaagacgcggcaacggtggtccctccagatgccagggaaggtttgcaggaagccgctcccgacaccctttgcgccaccggaagcctcgttccctcagatttccccctccctcccggaccgacttccgggtgtggctgccgcccttcccccacccacgccggcgggagccgcccgttcgcgctgccagcagcttccgcctgctacggtcctggcaagcacctcgggatcccattccttcacagggaccctagccaggcaagcgcgcgcctcactgtaccggagagctccaagcacgcgcttggtctggggcccggacgctacatctgggaaggggtgggtggctgggtagataggcgaggaa

SEQ ID NO: 1992 - DNA, 2300 bp, Homo sapien
tatttagggtgtgtgaatttttttttttttttttttttgaaacagggtcttgctctgtcatccaggctggagtacagtaacgcagtcatggctcgtgacatcctcaatctcctggacttaagcaatcctctcacctcagcctcctgagtagctagaaccataggcacgacccatcacactcgactaatttttttactttttgtagagacgaggtcttgccatgttgcccgcggtggtcttgaactcctggactaaagggatcctcccaccttggcctcccaaagtactggaattacaggcatgaactaccatgcctagcccatttttttttccttataaaatttcctttctaaatacgaaaaggggagaaacatttttattagtgcttcttgtatctttatagtctttcagctacgttttttttgccacatcatttaaatatgtttttatttttcctgttaagttttattttcaagagaaacctgttggctgactataagtgctgaatttcatgacttttatttccaccagtattttttaaacttggcagtttgagtatctgctaaaaatagcttcctgttggtatattggacaaaagaaaaacttctgttcttttattctgtcctaccagaacttagtagagaatgtgttaccagcctactttttctaagtcaaatgacacaaaatgttttttcttactaaaaccatatgttcttataatgggcttttttttcttccctgcttacaggaaatgctttggtcttttaaaaattagtcagaatgaaaagtgaaggcatgtgccttggttcttcaagttttaactgatttgccacctaatatttagcagattgataaaatatttgtcttggctgcccagacagttgttgtacaactataaaataggtaaaattattagaaaacagcaaaacattcccctcccccaaagaaaagcccacaaaaactttaggtctacgggttgggggaaagctgtgttttatcaccctttcatattttaatattttcatttctctagcactagaaagtttgggatttggctcttacatcagtgaagtaaaagaagtcttgcaagagtgtaaaacagtagcattaaaaagaagaaaggccagttctcgtttggaaaaccttggcattcctgaagaagagttattgagacagcaacaagaattatttgcaaaagtaagtaatttatttaaattattttcctctgaatcctaccctgtttgctaactgaaattgcttcctaaattaacagacatacccagaggattccctttttctaggtagttgattatagattctggtgttcagagctgaccaatttgactctggtttatgtgaaagtaaatatttgcagcaatctgttctaaagagaacaactccaaatacctattgaaatttcacttgatattttttcagacagaatgaccattttaaggcatgaaaagtatacctaaatattcttaagatttaaaatgatgagctgatgagaaaatactatatcaaattttatgatgcatgacataccagcaaaatctgattaatatcaactgtgtagttaaattaggtctttaatatacacctttgaagcattttaatcttaaaaaatattttaaagctagtagagcaaagggagaaaatgtcttcttccttgcttgtaataattctaatatctagactctgaaggattagaaccaaatactaatgttctctgtttcaaaaagagaagggaggggaattggtggcaatgctgtgttttcccttctaagttctggcctctcatttgaaattataaggcagctttggattgaatagaagagaagccgtagtaaccattagaactgggaagtatcattttaggtaaactcttccaggttagtcctgtagctgatctctctgcagccataacaatcagtttggtttacatcaaactgcattttagtcttaagtattgttggtcactagacaccaagtaccatttaaacaagataaaaagaaaaacttacatttattgagttctaaccacgtgttaatcacattgccaagtaattttcctgcattatctcatttaatcctcccaacaacctatcataggcactaaagaggaaaagcctttgaagcaggcgttagtacatgcaatgttataattcatatgaatatgaggtacaaaagaagaggtgttgatgttttaaaaacattaatggctatttattgatattgcagaccacctagagaatgctaaattgaacatttagtgacagaagattttctcctggatactt

SEQ ID NO: 1993 - DNA, 2300 bp, Homo sapien
atcttggtattgctgtggtgctaaataatgacacccatttaataaatccatttcccagctgggcgcagtggctcacgcctataatcccagcactttgagaggctgaggggggcagatcacttgagatcaggagttcgagaccagaccggccaacatggtgaaaacctatctccactaaaaacacaaaatttagctgggcgtggtggcaggcgcctgtaatcctagctactcgggaggttgaggcaggagaattgcttgaacctggggggtggaggttgcagtgagccgagatcgcgccactgcactccaggctgggtgacaagagtgaaacgccgtctcaaaaaaaaaaaaatccatttccccttactaattaatgttacttgcaattgcaaaatacattcatgattctagggagtgataggaagtgatgggagaggcggttaacagtgttaggtgacataaataaacgaagaaattattttggaatagaggcaatgtagaaaaatgttagaaagtgttgttcaatccttcacaggcttttcactgcatggtacaaagttaagcatttaaaaattggctataacccacttggaagagggcatttgtatgcttaaagtggcctcagaaaaggacagcagagaatttaggaagattagcaactggactgtcaggcgaactcaggctgttggcctcaactccaagagggagcgcagctaggcaaaagaatacggattaagcggaagaggttggaacacctgtccaggccaggtaggggaggagtttcaatgctgacaaagaacccgttgggagagcttcctaaaacacccagctgtcatgacgcactgaggagtactctactagttgactgttttgaagtgtgtgtgtgtgcgcttgcttgctttaggagacaagctattaatactaaagcatatgttagggagttgctcagcgtacttgatatctagtagcaccagccaaactagctaacagcctttccatggagataggccaggaagtagctccatagagaaaaaaggaagtagtggacctgcctccaaggttccgatactgggaggtgaaagagatctgaagttccgaataagctgtttacactaccagagaaaaatctggctcccatccaaccctcacccacgaggtgcccattccagacatggggcaagctgccttctcatcttccgcaggtgacagctcggctcacatttgtccacgtcttccatctcgtgcgctggcaacatacctaaatgattactggaagagctgcctctttttataatttcctgacagaatttataaaattaaaatatttaattaaagacagaatcggggacatgttgccttcacatttgctgttcaacctgtgcacattttggtggttcccaagaatcgtcatgccaaagcatcaggcttgaaaggagagatcaccttaagcatcaagatttaaaaaaataaaacacaactctcctcagtctaaactctaggatttggatgacgcttccctgtcaaggtttctcccgagtggaggagacaagaggcaggaaaggcaggtaactaaaattgcctcatgtaaaggggctcagcgcagaggaggaatgagataatagcggcggtgggggtcttttcccttctctccctttctatcttggaaacaggggtccgactggcagcggagtgggggcagtccaagctccggggtacctgcaggaggagactcgaccagcgagaggggccagcgagggtgaccaggtgcccgcttggggaccccgccggcggtggccaggctagcccaggtcctccccgatcccaggatgcactgcgccccgccccctccccgcgccgcgttccgcctcccctcggccccggccccctcccgcccagcgcggggaggcggggacgcgtcggcggcggaggcttctccagtcgcgtctttctcactcactggggagcccggcggtggcggcacctttcgaggtagacccgctgagctgctagcccgccggccagcgagtgagaggtcggacagactgtggagccgacagactgaaggacagcggcaccgccagacggccagaaagttccgccatgagctggggcacggagctgtgggtgagtcggggagaggggcgccccgcacggaccccggcccctgagaagcgcgggttgggcgggcgccgcggaccctcggcggtgaaagcgcgctccgccgtcctcggtccggcgctggcggagggtgagggtcccgctcgtctttgtgtgcagactcctcttcccttctcggccgg

SEQ ID NO: 1994 - DNA, 2300 bp, Homo sapien
ggcaagaaattggaagtctttcggggtaatctaatcatttagggagaaaaagcttataaaaactgctgccaggtttttccaaggaaacgaactccctggccatgtcaccctagaggaaaatatcataatccgtaaagcccgatcggtggagctttcaatggctttttaaataagagcagatatccaaggatcccaggatatttaaagaagacatctaatgtgcacatgagggaccagaactaatatgcaggaaagaaggcaatgtgactatgaaaggaaatgaaaattaaaatgcaaaaacaaacaaggaaaatacttacagctgttagctaatattctcaaagggaatagagaaaattttacatccatgaaataaggtattattttaaaagaaacatataaagaacaaaaaataactctatgatagtagaaaaaaaagcccactagaaaaaaaatgaaagataaagttcaataaataccccagtagagcaaaatgacagacattgaaaatatggaaaattaggagactcatccagtaggttcatttccaaaatagtaaacatactagaaaagagaaaacatagaaaaggaacaaaacatagaaaaggacaaaaataactcaagaaagttttcccagaactgaaagacatgaatttccagatggaaaggatatcccatgtgctcagcacagtgggtccacatctcttgaaatttcgaacactttggagagagagaagattctaccaccctccagggagaaaaaaccccaaacaaacaaacatggtttatacaatgggtcaggaatcagaatggaatagacaggatagttacacaggaagccagaagaatagtggagcaatacttttaagtttttgaaggaaaatgatttccaacttagagttctatatccagccaaattttgtcaattaaaaatgatggtaaatgcatttttagccatggagattcagttatctcctgcagaccttttaggaggctgctgctgaatgtgttctagcaaaatgaggaagtgaatcaagaacggagaaagcatacaactaggaaataggacatccaaacaaagatggaggtgaaatgaatccacaggttgatgggggagggaaatgctaaggtaacaactatgcattaggcctagttggtaatgagttcaaattccagcaagtttagaagcctttgggaaagatttatcaagaaaataaaatcaatagaattcctaatgtgttagaattaactgcagtcagttttaaagaactggaaaaaactggttgaattatgcattggaaactaagcaaattgaaaaaatgaagacatgtattaactccagaatatcaaaaaattatgtaggaaagaaaatgtaatatgacatatattttacatggctcagttgtgaatagtttttacaaagtcataatagtttgaatgaaataaaatttaaaaagatttggggtctgggctgatgttcttcgtgggacacctggaagaaacaatataaaaccactttggagggacgctccatatacccaagctacattggatctcaccaaaaaagtataaaaataaatgccaaaacaaaccaactgaacaaaaaacaccaaaccaaaaaagtcctcctgaagatgaggacttatattttttataaaaaaattataaaacacacattttttgagtgagatatataataaatattaactcagtcatgcctatgttatttttcctcatagtctgtaattaatgtctgatatttaaggaacgtggattggttgtaatagtaaaatttattttctaatttagaaaggacaaattttacttagtgcgcagttcatttccacacaatacacagtggcacattttaaagttatttcttttttctctctttttaaaattattatactttaagttctgggatacatgtgcaggacgtgcaggtttgttacataggtatacatgttccatggtggtttgctgcacccatcaacccgtcatctatgttagttatttctcctaatgctctctaaagttatttcttaaatgaagttagcctgattttattttctcagtgtgatattttaatttttttaacagagtaaaaagaagtttgaaagagaatgtagagaggcagaaaaggcacaacagagttatgaaagattggataatgatactaatgcaaccaaggcagatgttgaaaaggtaagaaatactccaaaccaactttaatgtcaaaatattattatttgcataaggaaagtagtcacgacatttgtatgactacagtattaggattt

SEQ ID NO: 1995 - DNA, 2300 bp, Homo sapien
tttgggaaagatttatcaagaaaataaaatcaatagaattcctaatgtgttagaattaactgcagtcagttttaaagaactggaaaaaactggttgaattatgcattggaaactaagcaaattgaaaaaatgaagacatgtattaactccagaatatcaaaaaattatgtaggaaagaaaatgtaatatgacatatattttacatggctcagttgtgaatagtttttacaaagtcataatagtttgaatgaaataaaatttaaaaagatttggggtctgggctgatgttcttcgtgggacacctggaagaaacaatataaaaccactttggagggacgctccatatacccaagctacattggatctcaccaaaaaagtataaaaataaatgccaaaacaaaccaactgaacaaaaaacaccaaaccaaaaaagtcctcctgaagatgaggacttatattttttataaaaaaattataaaacacacattttttgagtgagatatataataaatattaactcagtcatgcctatgttatttttcctcatagtctgtaattaatgtctgatatttaaggaacgtggattggttgtaatagtaaaatttattttctaatttagaaaggacaaattttacttagtgcgcagttcatttccacacaatacacagtggcacattttaaagttatttcttttttctctctttttaaaattattatactttaagttctgggatacatgtgcaggacgtgcaggtttgttacataggtatacatgttccatggtggtttgctgcacccatcaacccgtcatctatgttagttatttctcctaatgctctctaaagttatttcttaaatgaagttagcctgattttattttctcagtgtgatattttaatttttttaacagagtaaaaagaagtttgaaagagaatgtagagaggcagaaaaggcacaacagagttatgaaagattggataatgatactaatgcaaccaaggcagatgttgaaaaggtaagaaatactccaaaccaactttaatgtcaaaatattattatttgcataaggaaagtagtcacgacatttgtatgactacagtattaggatttacttgagatacactgtatctaagtctaaaatatacaaatatttgccaactttaaattatacgtattggtctgagaaagtaatatatgttaatttattacaatatcttagctgcattcaaatttagaggaaagacgtagttgctactgggattgagtttttagcctattccaaaataggttagaaagctaagatgtgttgatggggtaataattagttagagaataactgttgtaatttgactttgtacaagagatcaagaggaacagaactgtattctaaataagcattccttaatttgactttgtacaagagatcaagaggaacagaactgtattctaaataagcattccttaaagtatctgtggttctacacattggtggaaacactgttgaatgttgcattattcaacaatcatattattatttagtttcactgtgatttaagttccatattttagttggatatagttggatcataaatgttttactgttaacttttttaacaatctgaaaatattcctaaagctacctgtttttctcttctgattaaaagcacactgtttcaagctataatgttttcatttgtttgtttttttatctggatttggtaaggagagtctatattagaatgtcttattgctatcagggaatactattgtaatgagagagggaagaatattgtaataaggagaccactctgacagtaagatctgcaggtgtctttaaatataaaatatattttaaatgatattaatagttcaaaaaagttatgccacgtcattattcttttgatgtcaggtgttggcttcttcattgataaaatctagttttagtataattttcaaaaaagtgaattgctgtgattttgttgttgataataatttcgaccattttgcccctaggccaaacagcagttgaatctgcgtacgcatatggccgatgaaaataaaaatgaatatgctgcacaattacaaaactttaatggagaacaacataaacatttttatgtagtgattcctcagatttacaaggtaaatcttagatatgaagttaatctagttttagattaactggtgtttaaatataaaacttgtaagtcttagacatcagaatctttctagattcactagacatcagggttggggtgagagattcctttatgattatagatttgaaaacaagtgttttc

SEQ ID NO: 1996 - DNA, 2300 bp, Homo sapien
gagctcaaacaactctataggaaaaactctaataatctgatttttaaaatgggcaaaagatttgctcttttgagaaatgagtatttctcaaaagaagacatacaaatgggctgggcatggtggctcacgcctgtaatcccaacaatttgggaggccgaggcaggtggattacctgagttcaggagttcaagaccaacctggccaacatggcaaaaccccatctctactaaaaatgcaaaaattaaccaggtgtggtggtgcacgcctgtagtcccagctactagggaggctaaggcaggagaattgcttgaacccaggaggcagtgagccgagatcatgccactgcagtggcaaacaggcatatgaaaaggtgttcaacatgattggtcatcagagaaatgcaaatcaaaactataatggatatcaccttaccccagttaaaaaggcctatatccaaaagacaggtaataacaaatgctggtgaggattgtggggaaaagggaaccctcctacactgttgaggggaatgtaaattagtacaaccactatggagaacagtttcgaggttcctcagaaaactaaaaattgagctactatatgatccagcaatcccactgctgggtatatacccagaagagtggaaatcagtatatcaaagagatacctgcaccaatgtttgttgcagcactgtttacaatagctaagatttggaagcagcctaagtgtccatcaacagctgaatagataagggaaatgtgtatatacacagtggagtactattcagccataaaaacaatgagatcctgttatttgcaaccacgtggatggaattggagatcattatgttaagtgaaataagccagacacagaaagacaaatgttctcacttatttgtgggatcaaaaagtcaaaacaactgaattcttggacacagagagtagaaggatggttagcagagcctgggaagggtagtagtgggtggggagtaggggatgggagggaggtggggatggttaatgggtacaaaaaatttagaaagaatgaataagacttatttgataacacaatagggtgactgtagtcaaaacaattatatattttaaaataaagagtgtaattggactgtttgtaactcaaaggataaatgctagagggcatggataccccattctccatgatacacttatttcacattgcatgcctgtatcaaaacatctcatgtaccccataaatatatacacctactatgtatgcacaaaattttttaaatataaaaattagctgggcatggtggtgtgtgcctgtggtcccagctactcgagaggctgaggtgggaggattgcttgagcctgggaggttgaagctgcagtgagccatgaccatgccacttcactccagcctgggcaacagagcgagagcctgtctcaaaacaaacaaaaaaactcagggcaattgcaaggagggaggcaagacctgatatttagaaatcctccttttcatagtaataggattggacttgagatgccttacagtgttagaaggggtaccttttcttctgtttcctttgggaaggataggctgctgaatggtcgaagcagggaattaatgtcatgcacagagtgggagtgtattcggcaggataacagaaccactgctgcagggaaggcctcctagttggccctgaatgatcctggtttaaaaactttttaagataagaaatgaaaaaaagactaagtctcttaagtcaacaagtcaggcctaatagagccacttttctgtttgccctttggaatgcagatcctcctagaacttgtcaccactttgtacacgcagcacgcccagaaatgtttaagtgggaggaggggaaaagatggctcatggcctgctgccctgccccagtgtccttcagtggctcccttatgcagctctggccaggtgccacctgccctgacgtcgggcctgctagttggctggctggtggcctgccctgggcgaaggtgtgtgctcacaggcaggttgcattccacaccctgccgttctggcccctggagtccagccgcagtggtcactgcttaaatatcacttctcgggagatatttccttttgtaatttgccctcggtcttgtcttatcttcgaaaggttgctggaatttctctgttccttggagtttgggggttttttgatttgttttttctttggtgcttgtaaaggtaggaaagaacttcgtgatttctgtaacataacaatgttttatgcttatgggaaggccaattaaagttcataacaacttggctggtgc

SEQ ID NO: 1997 - DNA, 2300 bp, Homo sapien
gggggaagggcatcatgtcgtaagttttttttcttttttttgagacagagtcttactctatcacccaggctggagtgcaatagcacaatctcagctcactgcaacctctacctcctgggttcaagcgattctcctgcctcagcctctctggtagctgggattacaggtgtccaccaccatgccctgctaacttttatatttttagtagagacggggtttcaccatgttggccaggctggtctcgaactcctgccctcaagtgatccacccacctcagcctcccaaagtgctgggattacaggcatgagtcactgtgcccaggcttttttttttttttttttttttttaatgtagtagatttcttggcacaatcaaataaataattattattctgactttgtttttttaagtttaaaattgattgtagaaaacatagatagcaaaaagaaggaaattaaactcttatccataattctcctcataattctcctggggataaccacgatgaatacttttgtgtacatacatcctcccgggctttttgaaatcaagtatgagattgtactacatatacttttttggtagcccattctactcacttactatgtcctgggaattttcacccactgtagaatattcttctgcaccagcctacattgtatgtctgtccacggtatgcatgcactacaatttactggacacatagggtgtttctaatactctgaccaatatcctttaagattgctgtgttcatacctacaattattttcacaggctcaattctaagaagtggcatttctatgtgaaaacatttttaaggcaaagatgcaattttaaagtaaccatggtagcctactattttgacctaacagaagtatactgttgatcaaatgttggaatgttccagaaaaattgtcagaattataaaaccgatactatcaccaccgtccgtctccttatcatggtcattacattcgtttactacttgcatgagtattaattttcagtgataaatcgttccaaactggataactgaacactataaccataaccgtaataacgagttattgctaacattttagccccttaaatctttgtagccattctataggtaatattatcatttgtgtttttcagatgatataagtgagccacaaggagattatgtaatttgtccagagtcatacagctgagccaggatgcaaacccaggtggtcaggctacaggaacagccaggctgcaccacattataaattctccagttgctgtaagcagcagcatcatgcttgttaactatttttgagcatccactgtgttccagtgcttacatatgttatgtatacaaatacataaccctgatagtaactgtaagatgagggaccccagcctgactttgttctaggccttctagccagtaattggtgtgtccagaatctataccccagtcctgcatgtggactcctcctccccactggccaggcctggagaggggcatcttaggagagggcccctaggatgacttctagacaccaacaaatacccttctttctcttcactccacttgttggggagggaaaatcaggcctgccaggcacacattttctcatttcttatttcctgtttcattacatcattcaggtctgtataaacgtcatgttcttgtgacacctccccaaccaccctattttactggacagccctcatcccctccccggcacttcctgcctcctttcctggtttacttcttccctgaccttacagctgacataccatagccactggttatttatcctcactaaaacagaagctccccaccaaaaacaggagctccataaggtgggctcttgtgtgccactgtcaccactgcatcccctgagcctgcagtggtgcttggcacgagtaggtggtcagtgaatagttcttgaatgaatgattggctcttctatgaatttgatctttgaaaaactaaagagctgacccaagaagagacatagtagcattgtcttctgttggcccagagaagtgggtagccataagcttttagaaggaatgtgaatttgcctttcctactcctcactcacctttttgtcccaaaggtgtctgaaaaccttgtgcagcgagatggtgacttcctagttcgtgactctctgtccagccctgggaactttgtcctgacctgtcagtggaagaacctcgctcagcacttcaaaatcaaccggacagttctgcgactcagcgaggcctacagccgcgtgcagtaccagttcgagatggagagcttcgactccatccccggcctg

SEQ ID NO: 1998 - DNA, 2300 bp, Homo sapien
atttgttggtgtctagaagtcatcctaggggccctctcctaagatgcccctctccaggcctggccagtggggaggaggagtccacatgcaggactggggtatagattctggacacaccaattactggctagaaggcctagaacaaagtcaggctggggtccctcatcttacagttactatcagggttatgtatttgtatacataacatatgtaagcactggaacacagtggatgctcaaaaatagttaacaagcatgatgctgctgcttacagcaactggagaatttataatgtggtgcagcctggctgttcctgtagcctgaccacctgggtttgcatcctggctcagctgtatgactctggacaaattacataatctccttgtggctcacttatatcatctgaaaaacacaaatgataatattacctatagaatggctacaaagatttaaggggctaaaatgttagcaataactcgttattacggttatggttatagtgttcagttatccagtttggaacgatttatcactgaaaattaatactcatgcaagtagtaaacgaatgtaatgaccatgataaggagacggacggtggtgatagtatcggttttataattctgacaatttttctggaacattccaacatttgatcaacagtatacttctgttaggtcaaaatagtaggctaccatggttactttaaaattgcatctttgccttaaaaatgttttcacatagaaatgccacttcttagaattgagcctgtgaaaataattgtaggtatgaacacagcaatcttaaaggatattggtcagagtattagaaacaccctatgtgtccagtaaattgtagtgcatgcataccgtggacagacatacaatgtaggctggtgcagaagaatattctacagtgggtgaaaattcccaggacatagtaagtgagtagaatgggctaccaaaaaagtatatgtagtacaatctcatacttgatttcaaaaagcccgggaggatgtatgtacacaaaagtattcatcgtggttatccccaggagaattatgaggagaattatggataagagtttaatttccttctttttgctatctatgttttctacaatcaattttaaacttaaaaaaacaaagtcagaataataattatttatttgattgtgccaagaaatctactacattaaaaaaaaaaaaaaaaaaaaaaaagcctgggcacagtgactcatgcctgtaatcccagcactttgggaggctgaggtgggtggatcacttgagggcaggagttcgagaccagcctggccaacatggtgaaaccccgtctctactaaaaatataaaagttagcagggcatggtggtggacacctgtaatcccagctaccagagaggctgaggcaggagaatcgcttgaacccaggaggtagaggttgcagtgagctgagattgtgctattgcactccagcctgggtgatagagtaagactctgtctcaaaaaaaagaaaaaaaacttacgacatgatgcccttccccccagcccctgtccacacacttcctgtcatgttgtccttggttaatgattggccagatcaggtttacaataaaaacccaagggaaattctatgcctcaattctgcagacttactctatttttcaatttttacagtattaaatgaaaaaacattatttatggcaatcacccaaatgacgatcacaaagtatattctgggccatgagtctgtggtcatgggtttaattccccttttttcccacctctgggtcacaggatccagtagggaagtgatggagagtgtgaataactgccagctcaatggggcagaggcagccttgttgatctgggccacctgccctctctcctcccgaagctaagccactgccttgagaaggaggggctgcaaatggtctgaggctgctggcagctggccaagagttcaattacctgggccacagcccgccctcctagttcttccggttactgactctgtggctgctgcctcccacaacgctgtgcttgcagaccccaggagcgctggctgtcccttcacttcctgaacatgtggatgtgtgctttgggttcttgacctcagctcttcccaaggtcttcttagagaagggtctaaatgaagtcatttttagagtatttgtttttggttacacaggtgcttccgcccatgtggcctcggagtgggaccctgcgggtcatcaatctgtacattgcctgagagcagccgtgtatgctctggaagggacaagaccaggtacctgtcgggggatg

SEQ ID NO: 1999 - DNA, 2300 bp, Homo sapien
tctttgggtattttggagatattcttagaataaacagagaaaacctcaggtaacaagagctgtgataccacagtgacctaagtgtctttggttttgtttttaccctggctgtggagcactttattcgtaattctatgtgatttacatgtctgagttatttgcatattactttcaggaatgcatttcattcacgatttctgggggaagggtgtctgggcttcggagtctcttggctgactaatctcacgaatttctgtgcaggatttcagtcactgcccccctcccttttctcaggcctgggatggtgcctgtctagcctcttggggaggtttttagcttgaaggaatcgttatttgctctccaaggagaataccaggtgaaaatggcccattctgtggtggctaatggcctgattgatgagtcatgctcacagaactgctggggcctgggcctggctgctcacacggacttaccctttgaactccatctaacggaaatgagggcaagccagaaaacgcttcctcacaggtgcggtactggaccttcgaggacagtggggacccactgaccagacagtcttcaagggctcttccagctcagaaaacccttctgagttctgccaccttggtgcttccttctaggttctctggtggactttctgtggcctgggagccgtcaagactgcagaccagacctccagagtcagagaggagaatgagtgagggaggaaagcagaaaggaagtcatcgcccacactcgctgtggcaatagcgcctcacttagcagctccatccccatgttgacacgttgatgaggccgggcccttgcccttgcgtgggtgtgagactgtggctctccatacctgctcactgggcccagagcaatttcctatttttgtgggcagacttgacctagtccaaaggccaaggtctcccgaggatttgacgctaatcccgttggatatttctcatacctccctcatgcctcatctggtattgttcctttctggactgaatagatcttgtttcttcctcattacaagtttctgcctgtgtgaagttttagaaagcttcaggacacattccatatttgaggccgaagccacaaaaagttaatatttggagcggtaggataggagaggaagagctacaggcagaaatctggatttgattaaaaaaaaaaaaaaaaaaaaagaactcgttgagcatccgctataactggaatgaagggaaaagcagttagttttccctaaaggtgttatgtggctcttggtaggggtagaggcctcaggtcgcagggaatccaggagggccttgcttggctgcgttggatgcgaggtttgtgtgcaggatctaggttacgcaaagtgggtaatcagagtggcgatgagtaattaaagtgaaggatttaaaggaaggtataggacaaacagttgagtcagaagtgggtacacagtccccatcctcccaacaggttgcacagccaggtgggagggcatagggcgctcagggtgtttgctgacagacttgctaattaaacaccaaaaggcaatattgctttgccagtagtgatggctgtgccaacgttatcagctgcaaactggctgccaggagcatcttaattaaaaataaacagctctggaggtgggcttgggagagtgaggacagggatcctgcctgggttacttagtacatctagtatttctcctagggaaagtcacttttaggccacctcctttcctcaaaggagcctctgttcataacaaggtggtgtgaatgtacaacttaccctgcttccttaaacctctgggtgctggagtgacaagcagacagaaccactaggagcaggtcgcatggtacagttcagccccagaaggaaattctgggtcgggggagaggggctgctaatgatttctgcctggtctctaaattgaggggacagctaaagcccaaggcctcttctaagaggggttagaatttcatcagaaagcaagtctggtcacatgagaatttctggcactgtgtgcatggcaggctggacaccagcctgcgagaattgagcgagtggatcgtattggcttcagcagaggggaaaagtcccagactagcctgggagaaggagccgactcactcccccggctgccgacttccctgacttctgggcagaaacagcacagctgctgtggtgggctagggctttaacgtccgaagccccctttcttttaaccctaaagaaagtgtgtggtccccgggactgaagaccgaaagatgcctaaggaatgcagtgctttccacgccctc

SEQ ID NO: 2000 - DNA, 2300 bp, Homo sapien
catctctgttgggtgcacacttaggggtggaattgctgggtcataggatacatgttaatttagcttttctagataatgccaagcaggtttttaaagtggttgtaaaaagttcattttgacgagcagtatggtcaggccctttaattttagtcattctgggtggtatgaagttagatcacattgaaatatcaatttgcatttttgggatggttaataaattgagatattttccatatgtttattggcttttttgagaaatgcctgtttgtcctctcttgaggacagttgaaatattctgcctgtttttaattggattttctgccttattctggctgatccgtaggtgttctttatatatctgtaaacaaaccttttttggatgtatgtgttgcaattatgttttctcactctgcggtttgccttttcactcgtggtgtcttttcatgaacagaagctcttaattttaatcttgtccaatgatgagttttttttctttatattagtactacatgtgtttaagacatcgtctttgtctaccccaaggtaatgaagatttttttggacattttctttggatcgtgttattggtttactttttacctttaaaatccatctggaggccgggcgcggtggctcacacctgtaatcccagcactttgggaggccgaggtgggtggatcacctgaggtcaggagttcgagaccagcctgaccaaaatggtgaacccgtctctactaaaaatacaaaaattagccgggcatagtggcgtgcgcctgtaatcccagctacttgggaagctgaggcaagataattgcttgaacccgggaggcggaggttgcagtgagccaagatcatgccgttgcacaacagcttgggcaacaagaccgaaactctgtctcgaaaagaaaaattccatctggaattgactggggatggggggattcagttgatccagcatcatttactggaaagagagagctaatctgacccccaatacagcacagcagcacctgacataaatcaagtgaccacatattgtaaatctgtttttggactttattccattggtcagtttgtctatccttctactatttctatgactttataatggatcttgatataagatagtgttaagtcttttccagtgggctccaatttttcaccccaccaaatcatctagtgctgaagtgccaccgccaactcgcactttgctttcaatacgtccatacgagtgcaattgatttgcctgttcccgtggatggttcatttgtggttacctggggctttgtctcatcaaagcccttcacattgaaagccagccaggtgtctgcagacgagcaaagcagatctgttgggtaattaaataacgcggggaaggggaaggagtggattcgacgaggctgtctctggagagagcttcagaaaggaagtgatcgagctatacttgaggactggctccttggggagatacgaagagagccaaactctaaaatccgggcagaggagggcctggctaggtcaccgaatgtaaatgtctcggggggttccgcaaggcagcgcgaatcggctcgccggggtggggccgcggagccgcaaatcaccagttgagggccggagtgcgcgccgccggctcagagctgcgcctgctgctggccgggcgggggacggggccgggaccggagccggagctgcggggcgcaccggctagacgcgcgcgggattctcggcgggcacgccccgcggaccatgagcgtccccagctccgggagcagccgcggcgcgggcggtgcgaggccggccgcgcggcgcctttgagccccagccggaggtccagagatcctgagagcccgagcgcccagcgccgcgccgggaggtgagtctccgccgcgcgcccagcgtcctcggggtgctgttcctcccggggcgcctgggcctcccccaccccggtgaggacacgctaggaagtttgttggacaaagttaggctctggggaaagtagagccggcgtttgttggtccctacccacccccgccagcggatttggcgttgggggcgggggtgactgaagtggggctggggcttgcgctctccaggccctccgagcgcgctgggactccccgagacgtggcccacggcggggagcgctcagcgattggcggccaggcatcttgctcggtggcactcgagcggcatcttcccgggcgctggcctcgcccgaccccctgcccgtcggagctgctctgccggccaccccgccctgtcccgcccgtcccctcttcgcagaagccggccggggtcgg

SEQ ID NO: 2001 - DNA, 2300 bp, Homo sapien
ttggagtaaaacatacaagcagagtcatgcacaaatcaattgatttttataaactgaaggacaggtgatttttataaaatgacatggattaataaatagaatattatcagcatgcagaagtcacctctgggatccctttctgtcataatccacagctcaatataaccactgtcttcacttttaacatcacagatatgctttgactatttttgaagtttatgtaaatggaatcatatagtatgtacccatttgcggccagcttctttcactcaatatcctatttgtaagattcactcatcttgttgagtgtaaatgagttcatgcattcttattactatgttgtatgttacacagtttatctctcttctgctgatggacatttgggttgttttctttttggccgtcataaagagatacattataaacatttttcaacatcttttggtgaatatgtgtatacatctctgttgggtgcacacttaggggtggaattgctgggtcataggatacatgttaatttagcttttctagataatgccaagcaggtttttaaagtggttgtaaaaagttcattttgacgagcagtatggtcaggccctttaattttagtcattctgggtggtatgaagttagatcacattgaaatatcaatttgcatttttgggatggttaataaattgagatattttccatatgtttattggcttttttgagaaatgcctgtttgtcctctcttgaggacagttgaaatattctgcctgtttttaattggattttctgccttattctggctgatccgtaggtgttctttatatatctgtaaacaaaccttttttggatgtatgtgttgcaattatgttttctcactctgcggtttgccttttcactcgtggtgtcttttcatgaacagaagctcttaattttaatcttgtccaatgatgagttttttttctttatattagtactacatgtgtttaagacatcgtctttgtctaccccaaggtaatgaagatttttttggacattttctttggatcgtgttattggtttactttttacctttaaaatccatctggaggccgggcgcggtggctcacacctgtaatcccagcactttgggaggccgaggtgggtggatcacctgaggtcaggagttcgagaccagcctgaccaaaatggtgaacccgtctctactaaaaatacaaaaattagccgggcatagtggcgtgcgcctgtaatcccagctacttgggaagctgaggcaagataattgcttgaacccgggaggcggaggttgcagtgagccaagatcatgccgttgcacaacagcttgggcaacaagaccgaaactctgtctcgaaaagaaaaattccatctggaattgactggggatggggggattcagttgatccagcatcatttactggaaagagagagctaatctgacccccaatacagcacagcagcacctgacataaatcaagtgaccacatattgtaaatctgtttttggactttattccattggtcagtttgtctatccttctactatttctatgactttataatggatcttgatataagatagtgttaagtcttttccagtgggctccaatttttcaccccaccaaatcatctagtgctgaagtgccaccgccaactcgcactttgctttcaatacgtccatacgagtgcaattgatttgcctgttcccgtggatggttcatttgtggttacctggggctttgtctcatcaaagcccttcacattgaaagccagccaggtgtctgcagacgagcaaagcagatctgttgggtaattaaataacgcggggaaggggaaggagtggattcgacgaggctgtctctggagagagcttcagaaaggaagtgatcgagctatacttgaggactggctccttggggagatacgaagagagccaaactctaaaatccgggcagaggagggcctggctaggtcaccgaatgtaaatgtctcggggggttccgcaaggcagcgcgaatcggctcgccggggtggggccgcggagccgcaaatcaccagttgagggccggagtgcgcgccgccggctcagagctgcgcctgctgctggccgggcgggggacggggccgggaccggagccggagctgcggggcgcaccggctagacgcgcgcgggattctcggcgggcacgccccgcggaccatgagcgtccccagctccgggagcagccgcggcgcgggcggtgcgaggccggccgcgcggcgcctttgagccccagccggaggtccagagatcct

SEQ ID NO: 2002 - DNA, 2300 bp, Homo sapien
acaaaaaattttaaaattagccgggtgtgttggcatgtgcctgtacttccaactatttgggaggctgaggtggaagcactgcttgagcccaggacgttgagggtgcaatgagctgtgatagtgccactgcactccagtctgggcaacagaacaagaccctgtctcaaataataataataataatataaatacaaattttaaaaaatcaatataagagacgaattaaaatcacagctagaaaccaccttttgtgagttgtggggaaacaggcactctcacacattgctaaggagagaaaaatggatacaatctctatggggcaatttgccaatatatattaaaaaatgtacagattaagaacgcacaaacctttgaaccagcaattcaactttctaggaatctatcctacagatagatgtacctgtacttgtgtacaataataaaagaacaaggatgttcactgatgcattgtttgtaataggaaaatactggcaatctaaatgtccagctattagggactgttaaatcattaccatacatacgtacaatggaacgaggcagctctacatatattcataagtaaaacaagccagtatagcatactaccattgtgtttttaaaaggatatgtatcaataacattgttatttacgacatatttatgacaaaagatgttaaaaatgctgatatgggcataaaataaatctgaaaatatttccaagaaaccattaccactaatggcttgtggagagaattgcaaggctggactataggaataacatggatgtttacttttccctgtatcttttttgacaattttggattttgtatcttttgtgtgaattacctttcattgttgttttacgagttttaagattccattcattcctggatttatttgctaaccttgtacaaagttaacagttgtcagaaaaagatatagtaattcctgtcttgaggagctgatgggcactgggcctaggacctctttgcactggaataatgggggaggggagcgggtgaccttatcagaaatgcagattcctgggccccaccccagacggaccgaattaagagtcccagagtgacggcagaaatctccatttttgacgggctcccgctgggattcgggtgtctgctcatctggaagcctccatgctggagaggtagtcagcacagcgcacgcagggcgtaggcgtgttttctcgtccctccctcgcaaccacagtcccgctcaaggcgtgggggtgtcacccgagacccgggcctcccctgcactttcctttaggccgaaaccgcgagccttcgcttcagtgtcgcttttccttcgccgccgccgccgccgccgccgccgctcttctcaggacctacatcgactgcccagtcggctgagctgggccctgggccaccgaggcccggggagctgaggggctcgggaccctgcgagccgcttaagaaaggaccgcaagaaccgaatgcagtgaactgcgagagcagggaatgagagagaagttaaaccgtttagcaaaaaaaaaaaataagagacatgatggaggcagaaaataaattgtaggggggagggaaaaaagcgttacgactccgccgggactcgaacccggaacctttgaatgccttcagcctctagaagtccaatgcgctatccattgcgccacggagccacctgttggagtctcagcgcatctgctatgttaagccagaggcgacggccccgcgctcttccgaccgcgcctcccgtcgtcagtgtcaccgagacccagccgccgcgctcagggcactgccatccgcctcaaacgccagccgcaggctctcggtctccccgcagtggtcgcccctcaacaaggtcggcgacccagttgagccaagggcggccgcagtccgacggtcccacctggtcggtgtgagggcagccgcaacccggtccccttcacggtccgggcccagccgtacgaatcacagtcgcgcttttccctccccggctcccttcctgccccaagcgccccgcctaccaggtctctccggcggccgctccagcccggccgggaccccagagttgcaggcccaggccagccgttgcaccgttaagccgggccggtgacgccgggcctttacgtcgcgcctgtgagcggccgaggccgagcggcctcccctcgggctgcgagacgtaagcggcgacccctctcgggcctgggctcttccctcgcgcccggccgccgcgcccgacccagccgcggctggacctgcgcgcgagcgccgccgcgcgacgtctgtgtgcgtgcttgt

SEQ ID NO: 2003 - DNA, 2300 bp, Homo sapien
attcccacatgcatatgggtttctggattctctgctgcatatgggtttctggattctctgctctattccactgacttttctgttaattttgattcaccagaactgtgctgttttaccatttagtagggtcagtccttgtagggtccagccccacagggtcagtgggttttcgccccatgtgtggagacgagagattgtagaaataaagacacaagacaaagagataaaagacagctgggcctgcgggaccactaccaccaagatgcggagaccagtagtggcccgaaatgccaggctgcgctgatatttattggatacaagacaaagggacagggtaaggagtgtgagccatctccaatgataggtaaggtcacatgggtcacgtgtccactggacagggggcccttccctgcctggaagccgaggcagagagagagggagagaggagacagcttgtgccattatttctgcatatcagagacttttagtactctcagtaatttgctactgctatctaaaaggcagagtcaggtgtacaggatggaacatgaaagcagactaggagcgtgaccagtgaagcacagcatcacagggagatggttaggcctagtcaggccctccacaagaggtaaaggagtagagttgtctctaaactcccctggggaaagggagactccctttcccagtctgctaagtagcaggtgtttttcctggacagcgacgctaccgctagaccatggtctgcttggcaacgggcgtcttccgagacgctggtgttaccgctagaccaaggagccctctggtggccctgtctgggcataacagaaggcttgcactcttgtcttctggtcacttctcactatgtcccctcagctcctatctctgtatggcctggtttttcctaggttatgattatagagtaaggattattataatattggaataaagactaattgctacaaactaatgattaatgatattcatatataatatctatgatctatagtataactattcttattttatatattttattatactggaacagctcatgccctcggtctcttgcctcagcacctaggtggcttgccacccacaagtcctctcttgttactcttttgtttttttaaacatttttctactcattcttgaattattatttttcctcagtgaataataatagcacttatttggcatttgttatatgacaggtactattctcagtgctctatgtatcttcatttaatcctcctgacagccctaccaggcagatactattatcccctttcatggaagaggcatctgagacagagaggttaagtaacttgtgcaaggatacacagctaataagcaacaagcctggatgagaacccagaaaggctgggtctatgggtaaaaccacaattccttatcatcttttcacatgagctttagctacagctagtctggctctaattttaggaggtatttttgttggagtcatgttatatttatagattaaaatagaattgggccaggtgctgtggctcatgtctgtaataccagcactttgggaggccaaggcaggtggattacttgaggccaggagtttgagatgagtttggccaacgtggcgaaaccccgtctctacaaaaaatataaaaattaggtgggcatgttggcacatgcctgtaatcccagctgcttgggaggctgaggcacgagaatcgcttgaacctgggaggtggaggttgcagtgagctgagatcgcaccactgcactctagcctgggtgacagagccagatgagagagagagagagagggagggagggagggaggagagggagggagggaggagggggagggagagagggagggagggagggaagagaggagagagagagagaaaatgagaattgaactaattaggatgttgagtcttcctgtgtaagagcagcaggaggaaataaagaacagctatgccttttcattttcagtcctgtgctcttctggagtgtgttaaatataaatcttgatttttttaactttatttccagatagtttatcttttttgttggaatcctttcctccactatattttgtaactggttattatttatatataagaaggcttttgatattttaaataattttatatctcattaaattatcttactatttaaaatagtttttcagttctaaatcacaatgagataccacttcacacccagtaggaaggctgtaataaaaaagacgacaatacaagcattggcaaggattggaaccctcattcattgccagtggggatgtaaaatgtgtg

SEQ ID NO: 2004 - DNA, 2300 bp, Homo sapien
ctacacctacctctgtcatcttaatttctattttcatgcatttgctcaaattaaagatgtggagattaaatgaatgaatacatgtaaagcacgtagattagtatccagcagatattaagtggccaatactattatgattgatgctgttgttctttgatgctttgatctccacaacctacatccaattggttcactttccttctacacgatttgtctcctcctcaaatctaacctttctcttctgttcatcttcttacatagtctcactgctacttggccctactaaaatttatttttgcttcttaccacatttgccacaaatgttgatataaaccatttccattcttctgagatgtatcacctacttacagaggttattatctacccaaaatcttctcttcttcactccacttgaacatacttgcattcacattctcctctctgtttcagatatcaactctttcctcctggctcaaaggaaggtgcattcttttctgactacacccacatctctgtttattatccagttcagttagcattaggctcggctgcaaatagaaaaatccttaattaacagtggcttttaacaaggtgtttccatcaggtgaaaaatctagaaggcggctcttgagggctcatagggcagctccacaagttgatttttccatctcactgctatgccatctctaaagcatgccttcatccttatggcacaaacttgccgcctgaaaaccagcgaacccaactttccaggaagtaaaatgcactttaaaagatcaggagggctgggcgaggtcgtttaggcctataatcccagcactgtaatcccagcactttgagaggccgaggcgggtgaatcacctgaaggcaggagttcaagaccagcctgcccaacatggtgaaaccccgtctctactaaaaatacaaaaaaaaaattagccaggaatggtggcgggcgcctgtaatctcagctactcaggaggctgaagcaggagaatcgcttgaacccgggaggcggaggttgcagtgacccaagattgcgccattgcactccaccctgggcgacagagcaagactccgtctccaaaaaaaaaagtcagggacggcctcctctcttttagatgccgtccctaaagacatgcacacaatttatacctaattggctaaaacgtagtcacatagccacatttggctgcaagagagactataaaataagctattttaagctgggaagcagtgtgtccatcgacacagtgttctgtgactttaaataaaaaattggttttctgtcatgaagtagagactaggtttggtgaggcactcattcatcctttctcacctccaacaataatttgcgtttacttattttttcaaccccttcccatcccctcaaacatagttctctaccttttatctcaaaagataaccaaagaaacctcttgattctggtcatactcttcctttcactgtgacaataacaacaacaacaacaacaacaaaaccttattcttctcctttacaatttctttaacgtttttttcttttctgctattcccaatccctaaacaccatctcacgtttagattatacagctttccacttcgtctcccagttcctgcgagcaccttatatcccttttaccccaaccaagtccttaaattttatttatagttagcgtcacaatacacgagtaaatattgtctttctttaaaaagcacaaatatctcaaacttctcccttggacataccaatggctacattaagctctttagaacgtagaaatgaaagaacgcctcccgggttcaaacgattctactaaacaaatgaaagaacgaatggcatgtaagtgcgtttttacaattcatgtgaacgggtacgctaagaccctctgtcactgcgggcttcgccgccccgatgaaggtctttcccagcaaaaatctggcttgccttctacagctctgaaatgcacacttaaacccaggccctttgtctctgaccgccctggcctgaactggctgggcggagattctcgcgaattctcggatctgcgcggaaaacgcgctcgaggcagttctctgacgcatttccggagcgccagggaagagggaagtcgtggtggtcgcgagggagccggaaagatggtggttaccagatctgcacgggctaaggccagcatccaagccgcgtcggctgaaagttccgggcaaaaggtaggaaatccagtcttccctacttctcgccgcttcgcagagccgcgctcaggcaggcggggcggcgcaagggtccggttaagggtgagg

SEQ ID NO: 2005 - DNA, 2300 bp, Homo sapien
ctggttaccgttaaaaaatgtgggggttggggcattgacccccctgcacagttgaaaatccacagataacttttgactaccccaaaacttaactactaatagcctactattgaccagaagccttgcagataactagttgattaatacatattttatatgttgtatatattatatattgcattcttacaataaacgagaaaagaaaattttaagagaatcataaggaagagaagtggaagtggatcatcataaaggtcttcatccttgtcttcatgttaagtaagctgaggaggaagaggaggggttggtctttctgtccaggggtggtggaggcagaagaaaatcactgcataagtgaaacttcccagttcaaacccgtgttgttcaagggtcaactgtattgtatatactatatatacctaaaattaaatatactgtatttgccctaaatccacttcagataaagaagataggcaaagaatatggcaaacctggtaagcccacgtaaaaacacttcttttttttttggcctatggtagatttgttgatagaccagctcaatcttctcatattataactatgtactgacaattttagtatcttacgtttgtttcttgaccttagattgtatatgagttggttttctcctttttttttttctttacttgaaagggccatgcttgcaagtgagtattagacattgcatgattttctaatattctctccagttttctacacctacctctgtcatcttaatttctattttcatgcatttgctcaaattaaagatgtggagattaaatgaatgaatacatgtaaagcacgtagattagtatccagcagatattaagtggccaatactattatgattgatgctgttgttctttgatgctttgatctccacaacctacatccaattggttcactttccttctacacgatttgtctcctcctcaaatctaacctttctcttctgttcatcttcttacatagtctcactgctacttggccctactaaaatttatttttgcttcttaccacatttgccacaaatgttgatataaaccatttccattcttctgagatgtatcacctacttacagaggttattatctacccaaaatcttctcttcttcactccacttgaacatacttgcattcacattctcctctctgtttcagatatcaactctttcctcctggctcaaaggaaggtgcattcttttctgactacacccacatctctgtttattatccagttcagttagcattaggctcggctgcaaatagaaaaatccttaattaacagtggcttttaacaaggtgtttccatcaggtgaaaaatctagaaggcggctcttgagggctcatagggcagctccacaagttgatttttccatctcactgctatgccatctctaaagcatgccttcatccttatggcacaaacttgccgcctgaaaaccagcgaacccaactttccaggaagtaaaatgcactttaaaagatcaggagggctgggcgaggtcgtttaggcctataatcccagcactgtaatcccagcactttgagaggccgaggcgggtgaatcacctgaaggcaggagttcaagaccagcctgcccaacatggtgaaaccccgtctctactaaaaatacaaaaaaaaaattagccaggaatggtggcgggcgcctgtaatctcagctactcaggaggctgaagcaggagaatcgcttgaacccgggaggcggaggttgcagtgacccaagattgcgccattgcactccaccctgggcgacagagcaagactccgtctccaaaaaaaaaagtcagggacggcctcctctcttttagatgccgtccctaaagacatgcacacaatttatacctaattggctaaaacgtagtcacatagccacatttggctgcaagagagactataaaataagctattttaagctgggaagcagtgtgtccatcgacacagtgttctgtgactttaaataaaaaattggttttctgtcatgaagtagagactaggtttggtgaggcactcattcatcctttctcacctccaacaataatttgcgtttacttattttttcaaccccttcccatcccctcaaacatagttctctaccttttatctcaaaagataaccaaagaaacctcttgattctggtcatactcttcctttcactgtgacaataacaacaacaacaacaacaacaaaaccttattcttctcctttacaatttctttaacgtttttttcttttctgctattcccaatccctaaaca

SEQ ID NO: 2006 - DNA, 2300 bp, Homo sapien
agtatatgaacagacacttttcaaaagaagacatttatgcagccaacagacacatgaaaaaatgcttatcatcactggtcatcagagaaatgcaaatcaaaaccataatgagataccatctcacaccagttagaatggcaatcattaaaaagtcaggaaacaacaggtgctggagaggatgtggagaactaggaacacttttacactgtcagtggtagtgtaaactagttcaacattgtggaagacagtgtggtgactcctcaagggcctagaactagaaataccatttgacctagcgatctcattactgggtatatacccaaaggattataaatcatgctactataaagacacatgcacaggtatgtttattttggcactattcacaatagcaaagacttggaaccaacccaaatgtccatcaatgatagactggattaagaaaatgtggcacatacacaccatggaatactatgcagccatcaaaaaggatgagttcatgtcctttgtagggaatggatgaagctggaaaccatcattctgagcaaattgtcgcaaggacagaaaaccaaacgctgcatgttctcactcataggtgggaattgaaccatgagaacacttggacacagggtgggaaacatcacacactggggcctgtcatggggtggggggttggcggagggatagcattaggagaaatacctaatgtaaataacgaattaatgggtgcagcaaaccaacatggcacttgtatacatatgtaacaaacctgcacattgtgcacatgtaccctagaacttaaagtattataaaacaaaaagtatagacaaatcttattcaatcttgagttcagaagatagttatatcgggtttcattatagtattcttgctatttttgtatatgttggaattatttacaacaaatgttaattgtatgttacagtgcatcaaaatgtgtttaagtagtggtggtgcttgtgggtagctctttcactataataaaaaatcaatatccaaaaaaaaaaaaaaaaagcagcgcaagctcgttcaatgaactcttaccatcattcattcagccaacaaatatttactcaacatcaggctcaatttctaacttcctagaaagatcttttttcccatccctcccctaattcttaccattttaccaactggttcatctctcttttcaatagctatattgtccccgcttataatgagaatctcattttgcctttaataatctgattcacctcaacgaatgtgaaagattgttgaggaaagctcaatacatgttcaatttgatgtttataccgagtccaccaccacacgtgaaatttaataggggtaaataatctcgaccacctctaaaggggtgggtgataaaagctttctgtgatctcaccggctcaagtgtcctctttaatctgaattcatctggagaataactgccctatgatgttcttataaaattacttgtttcctgtgcttagaacttgtctctgggtagagtgtacgcgtctcaagggcaaagactcagtcttgttcgttgacttcacacactgccagcaaataatgtgaatcaatagacctttaacggatgaagaaaaattagcagtttgggagaaggtccttgaaggtagcaaagcgaaaagaagaagggggcgcttgcgcataaacagctgcttctgagaacgaaaactacgtagcatttccgagtcccggtggccgctcaggctgccctttaaagagacgtgtaggaagcccaccctggggcggccgtgggcggagccgcgacctgaacgccgggagacctcaccaggcggaggcggtgtctacctcaccaggcggaggcggtgtctgcctcgcgctgtcctctgaccgccagggggagccctgccgcgcgctgcgctccgggccgcgccgccacgctctctcgacccgcgcgcccgccgcgcaccacccgtcgccacgcccgccgcaggccaagggccagtcacttgcgggccggcgtcccgcagcccattcgcgccccgcccctgccccgccgcgggatgagtaacggttacgaagcactttctcggctacgatttctgcttagtcattgtcttccaggaaacagctccctcagtttggaatcagctctcccgctgcggccgcagtagccggagccggagccgcagccaccggtgccttcctttcccgccgccgcccagccgccgtccggcctccctcgggcccgagcgcagaccaggctccagccgcgcggcgccggcagcctcgcgctccctctcgggtctctc

SEQ ID NO: 2007 - DNA, 2300 bp, Homo sapien
ctctccaagcttctctttcctgggtcacctgtttaatcactcccgggacttaatcttccacctatatgttgaccactcacaaatctatgtctccatctcacaagcttattcttgactccagacccaagtattcaactgcctgctgaatacgtgtggtcagatgtcatagaacttcagcttcagtatatcaaatgcaaacccctgttccccccaactgcctcctactccccactggccttcctctggcattccctcctcagttatgagcaccaccgtctcactagccagccagtcaagccccaaactccatctagctgacttctgcctcttcctcaccaccctcttccagtaactcatcaggcactgctgtgtctcattccttcctatccctccagtccctccccttctctccatcatggctgtcactgcatggttcaggctctctggctccccccaaaccacccccacattgctgccgaggtgaactgactactcttggcagccactggattaaaatctttcatcatcttcagcatgataaaacccatatcctttagcatgtaacaaggtcttaatgattctgccagagcttgcttgggggtagcctgcacttgtgggccactccagtcacttcacaggtgctcagtaaatctcagttgaatcagtcatcatcatcatcatcatcatcatcatcatcatcatcatcaatttttcagtctggttcctgtctccttttccagcatcctccattcatagcctcatagccttcactccagccatgtttcacttgtggttttcctgggcaagataagctattcctccctgtctttgcagagtttaaatgactcacttgttcaagtacccaccgttgccatgtgggaccgtgagcaaagtacttaatctcactaagcttcacgttcctcatctgtaaaacagcaaatatggacctcacaaaattgtagtgaggctaaaatgaaataacatatgcaaaagcagtttataaataataaacttactataaaatattattttgtaattctgcaagcttgtcttaaatgccatcacctccaaggagcctttttgccatcataagcagaaactatctctctcttcttggaagctccaccatgcacagcctatgggccctcatcacactccttgagttattcgagttcaagtcccgtgtttacaaccagaccgcaaactctatgaagtcagcatccattcctctctgtggttctccctccgccccatccaggtctcaagggtctagagtctttcaaagagaacacattctgagatttgaggaggcagagacaaaaagttccactgcgaagtgccagggaggcttctgtttggggtgtcccttgggatcacagatcccccacctggtgatgagtcaacccagcaccaccccattgcagggctggaatgacagtaatgggcccacctgctgcctctcctcatacccgcaccccagtcagacattgcaagtcagtcacggctctgtcctgctgggcctggagtgttccagtgccttttccatcacagcaccaagcagccactactagtcgatcaatttcagcacaagagataaacatcattaccctctgctaagctcagagataacccaactagctgaccataatgacttcagtcattacggagcaagataaaagactaaaagagggagggatcacttcagatctgccgagtgagtcgattggacttaaagggccagtcaaaccctgactgccggctcatggcaggctcttgccgaggacaaatgcccagcctatatttatgcaaagagattttgttccaaacttaaggtcaaagatacctaaagacatccccctcaggaacccctctcatggaggagagtgcctgagggtcttggtttcccattgcatcccccacctcaatttccctggtgcccagccacttgtgtctttagggttctctttctctccataaaagggagccaacacagtgtcggcctcctctccccaactaagggcttatgtgtaattaaaagggattatgctttgaaggggaaaagtagcctttaatcaccaggagaaggacacagcgtccggagccagaggcgctcttaacggcgtttatgtcctttgctgtctgaggggcctcagctctgaccaatctggtcttcgtgtggtcattagcatgggcttcgtgagacagatacagcttttgctctggaagaactggaccctgcggaaaaggcaaaaggtaacagttactgtctgtggtttaaaaatgaggtgtggagcaaataa

SEQ ID NO: 2008 - DNA, 2300 bp, Homo sapien
actccaggaaaaaggagtgacaacaagcctccagattagtggggaccattctatcaatgccactcaacccagtaagccatatgcagagccagtcaggtcagtgagagaggcatctgagagacggtcttcagattcctaccctctcgctcctgtcagagcacccagaacactgcagcctcaacattggacaacattttataaaccacatgctcccatcatcagtatcagggggaatgaggagaagccagcttcaccctcagcagcagtgcctcctggcacagatcacgatccccacggtctcgtggtgaagtcaatgccagacccagacaaagcatcagcttgtcctgggcaagcaactggtcaacctaaagaagactctgaggagcttggcttgcctgatgtgaatccaatgtgtcagagaccaaggctaaaacgaatgcaacagtttgaagacctcgaaggtgaaattccacaatttgtgtagggatgtcaaatttcagggtttttttgttgttgttgtgttattttgtggtattgtgcttgttttgtgaaagaatgttttgacagggcctcttttgtataggactgccaaatcatgggttttgccttttgttgttgtatttatcctctgttggtaatactgaatggtagaatgttttgatagggtcacatttgtgcctcactggaattatctttaaattctgtatttttaaagttgtgaataagataggtggattcgtattttttaaagttcagttgactttccccaccaaatggtccatttgaatgcatccctaatatatgatatagtctcaactaataggtgcaatttgggaaaatcaggtttattttttggagtggaactgttataagtgcttatttataaaaggaatgtttctgaatgcaagtgcctaaaaagatctttgttggtatgcatatgttttgtcacacaattttatagtgcatctttcaccatttgtgcttttttaagatacgtatgtaagctcttatttttcaattggcaattcagttaatttttaaatgtttacataatggccagaaggcttgcaaatctgtatttaattgcattttaattaattgccagtttttacatgtgatagtcagttgtacaaagaaaatgcacttaaacctgtttctaaattatatattcagttatattatatttggctttagatggttttaatacatttgatagtttttcaccccttggctttattttatataaacttttgtttttcagcagttctgaactttttagtattttataaatggtccaaaaaatgcctgtttcagaagtttttgaattcagtgcatttcctcttgatttgtctgggttaaaaccattccttttgtatgaaatgttttgacttaggaatcattttatgtacttgttctacctggattgtcaacaactgaaagtacatatttcatccaaatcaagctaaaatttatttaagttgattctgagagtacaggtcagtaagcctcattatttggaatttgagagaaggtataggtgatcggatctgtttcatttataaaaggtccagtttttaggactagtacattcctgttattttctgggttttatcattttgcctaaaataggatataaaagggacaaaaaataagtagactgtttttatgtgtgaattatatttctactaaatgtttttgtatgactgtgttatacttgataatatatatatatatatatatcaacttgttaaattatttcatgttcccgtggcttcttttcagttgttgcctattacagtatgagagtttaaggttattaaccattggcttagaagtcaacacctaggatcatacatccgttgactacaatgtggaatgaattttatggaaacctgttttatagttctatgtgatgtaaaggtctagggagcaataaccagcccttttttttctgaaggcttgtttttagtcctcattgtacaaaatataaaataatcatattgctatgaatacctaaaaagaaaattagagcccatgtgtattgagccttctctgtgtgccaggaactttgccaaggtgctacatagattattttatttcaagttcacagcaacctataatgggtgggtaagcatgttattatttctgtgttacagataaggaaactaaggcttagttaaatgacttgcttcagtgttccacaggtgtaacaggtggagtcaaatctcaaacatagggctgtcagattttgatggttagtgctcttaatgactgtgattactaaataatatctggtagtt

SEQ ID NO: 2009 - DNA, 2300 bp, Homo sapien
ttatgtaaaattatttcctggtgagagtcatcgtaaacaaatactgttggaagaatgagaaggaggtgtgtgtggcaggagtgttgagagccagcaggtgtgtctccatatgacattgcacaggtaggtaggagccagatctcatgttgagccttgtagagcatgatagcttctcacttatactttggaagggttttcagtagagaaatgacattatgagatttatgtttgaaatgttcactcactacatttgtgatgagacaagaatggatgcagatagatcattaggaaagtagtatagtagctcagaaaagaaatgatggtaattcactagtgtggtagcagtagagagaagtgggttgattagagaaccctgtagatcagaaagaaaaatgaactatggagttgggtgagatataggaaggagtaaatgatacaataatgtatcttacatatgactagaaacggatattacataaaacttcctagtgggccaggcatggtggctcatgcttgtaatcccagcatttagctaggctgaggtaggaggatcacttgagcccaggagtttgagaccaacctgggcaacatagtgaaactgtatctctacaaaaaaaaaattttttttttagctagctaggtgtggtgttgtgcccctggagtcccagctacatgggtggctttggcgggcagatggcccgagcccaggagtttgaggctgcagtgagctataatcacaccactgcactccaacctgggtgatagcgtgagacccagactcaacccttcccccctccaaaaaaaaaaaaaaccaaaaaactttctactgtaaattttatagaagtccttagtcatctaccatttttaaagtagccaaatattcaagacaaaatacttgaaaaaaagtgttaataataaagtgtgagttaatttaattcctccggttatttcctttttgatttccagagatacaaacaagattagaacttttaactctggaaaggtaaaatgagggtgaagaagaaaataactatgattttcttgagttccagctatgtgccagtattaggtgttttaacatatgaagtcttctaattttgtgatcccttttcatcctcacacaagcctgtaaataaattgtactggtcacatatctagaaaatactagagccaggattcaaatctaaattcttctcataccaaaagattacctttttactaccatcctgagattatcaaaaatattgctctgatgatcacacgtgtttatttaaccagtcagagtatgtcagattagtgggcacccttgtaacttattttcaacaaagaaatatccttgatgagacttggtaatccaggatgtgttgtgtgtgtgtgtctgtgtatatgtatgtatatgcattattaggaaaaactaactgtaattgaacttctatgttctcgacacttctgtatcatcgcgtcatgtaatccctacaatctcatgagataggtgttgtcaggatgttactcccattttataaatgagcatactgaagtaaagagatgaatagatcatacaataagtgacagaggaggattttaagaacaggtatttcttttttcaaagcccatatctcatctttatttttgaaggtgatgtcatggaaggagaatatgaccttctactaagtgatgtttcagaacaacttttacaattaaataaaattctataccctaggaatcaagaggaagttattaagagcatggattttggcatcaaggcagatacaggtttaagtcctagttcattatcagttgagagcttaaggcaaatttttaacctctaaacctcaggttcctcatttgtgaaatgtaaagaacagtagtttgcatgtcagagttgtcggaattactggtatttaataaatggaaactgctattatcaataatacagtgattgattattgatttttgatttttaaaaatttaaaaataggataccaaggtgagctgtgggctgtttgtgaaaatctagtgtaatatttccctggctgatttagtttttgtgtttctttctctctcctcgcttgtttttgttttgtttcttgcccccttaaggatttcagtttttctgactgttacatgaaaggatgattgctcacaaacagaaaaagacaaagaaaaaacgtgcttgggcatcaggtcaactctctactgatattacaacttctgaaatggggctcaagtccttaagttccaactctatttttgatccggattacatcaaggagttggtgaatgatatcaggaagttctcc

SEQ ID NO: 2010 - DNA, 2300 bp, Homo sapien
ttaagtctgaaaaataattgtggaagcaggtaatcaaggagccttggattcttatgtttgtatttttaaggtaaaacctcagagcctaattggcttcatttcccccagaactgtttgcatgtgagaaatgaccctctttcctttctctatcggtgggtagtctctatcacctctgtttgtctcttttatcttccttatctctctccatctcattttctttctctgcttccccttatctctgcatatttctttcttctttccctcttgtctttctttctcctttattgttgtctctctttccttctcacatatttgtctctccctttgtctctctttccctgcttttctctcctccttgtgagctcctttctctttgtcacacccccacctccatccatacaccctctctctccatcaggaacttgttcatgattttgtcagtgatgcttccagttccattttagtcagcaacacagtcctctttattaagggaaatggtgtataagtgcaaaataatatattttaaaatagacttaagagggtgtttgaggttgagggacttcctcaaaaatttccttccaaaaaccttacttatgattgaatcgtagttgcactgttcagcctccccttggcctggggactcctttgtctcctcttattagtttgcttcagttcaggcatcattggcttccatggtgagagtccttggcgcatttttctttttcagcacgattagaaggaattttggtttttgaggtttcctatttgtggcaggaccttgttactattattttggggatttgaggggaaaatctgtgtaagttgagtccaaaaaatccagtatggtgccaaagtaaccaaggagctgagttttcttatttatcttttctaagtagcacctgaggagccaaatttgttgtattttcttagcattgtttttcctgtaagggttcaaagatatgtctatgtaagatgtccctcttctctttctttgtcaatgagtttttctcttgccccgctaccctacttttggttctgtcatgctcacttacttttctgtttgttaagtgggtagtctctccttttatttttcttccttattttctctttttgccttcacttatttctgccttccttggttttcttcccttttcctgtgtctgcacctcattttctttccagttttcctcagcacattctcctgtgtctttttctgtttctcccgtgtgtggtcatttttctcgcagaccccagcgctacccacagtctccctccctgtgttttttcctctgtttctctatgagttctttctgaatgttccagcactgaggtaagtgccatcgcttgttccagcgagtggtgtgatatagggactatgtgctttctagccctgcttgctataattattccatctttctcagacttttttttttcttctcattatgaagtgagtttgaaagtgcagctaagaaagaaaggaccgggcacagtggctcatgcttgtaatcccagtactttgggaggctgaggcgggtggatcacctgaggtcgggaggtcgggaattcgagaccagcttggccaacatagcgaaaccctgcctctactaaaaatactaaaattagcttggcgtggtaatgggtgcctataatcgcagctactcaggtggctgaggtgggagaatcaattgagcccgggaggcggaggttgcagtgagccgagatcacgccattagactcgtctgggcgacagagcgagactccgtctccaaaaaaaaaaaaaaaaaaaaaaaaaatacagataggcctaagtggaaactattaccctccatagagggcagaggggcagagtagatggctggttttgaggtagttcattcttcattcagacgtgtggcgcccttccccaggccctaacccctggaagagggaggaaaaaggcgatccacagaagtgtctcataagaaatgtagctgctcatctggccattagccgcatctagtcctcaggtgacttttctctgagtcgctctgcctgtcccctgcaagccaaaagggcagccgacgcagcccgtgatgctgggacagcgtccggccgcgcgcaactgacggtcgcgttctgcgcgcgagctagttgcctcccgtacctgccgcggtcgccggccccgcccccgggagcgcgggccaatgggctgggctccagggggcggggctggcgggcgggcggtgcggccgtggcggtagctgcaggggcggtggcggctgcagtggtggtggtgcctgtggctgtggctgcggctgcgg

SEQ ID NO: 2011 - DNA, 2300 bp, Homo sapien
attgaaagcattagacaaaactaaatattttcatgtttgtgttctcatagcaccttgttcatatctctaatatagtacttaccacatttatacttgattttttttacacgtttttcttctctaacagcctctggagaatatgatctccatgatctgttcatccttgtgttatctgtgccaggcatacttaattacgtaaattatgtgaggtcgttggggctcacaacacaatactccaaaatgaaggtctcagtagcaaaagttctctgccctactctggccctcctgtctctcagtcccgtatttccctaggctagccatagatattaggatccctattcctcaagacaagatgtagaaaccagaacctctatcccctaaagccagccataaaagcctaaacatattttgctagttttccctccccctttttctgtaaaatctggccataaagaaattatctgacctgccttgtttgactgtaggctgttaagagctccattccattcctgccctatacccagaaggaaggaatggtgctcagaaggccaagaagaatctagacaggccttgctgggtgtccccactcagtctgttagcattagattataccatttttgtccaatcacatttctacatagctgtccatactttgttgaacctaaacacaaaaatggacaattttccaagtatctttgggtctccattctgaacgctcccatgtatacacattaaatttgtatgccttttctcctattaattttttcttctattaatctgccttatgtcagcggttttcagttaactttcagagggccaaaaccttttgtccctccaggtaatgaaaatgtccacatgacaaatagtgaattagtaggagcttcagttctgcataatttagaattcactgttgagcacctctatacgcatgccattattgtacctcgtctttgtgatcctcataacctgtattaggcaacagctcatttatattgagaaaacacctagggcacagcaccactactttgtaggctactttaatatgtatgtgcattatgcgaggttttatgagcttattttctgacacacttgcttttctccagtttcctcagctgaaaacagcgattcactgttactgtatatatgctaggctcaatgctggcgataacaattcctgcaacatagggtcagacaggagaagaatgttgtaatctgcaaagcccttctgattctgggagtgaggccagcattaatacaacgcacgattgttacttctgaatgtccctttgcaaagaacagtgtttctcaaacttttttctgaccagatctgcatacattttacatcgccgctggcgatacatacgtgcaaaacactgaaatcgaaatttctctaaacaactcctttactacgtgatgtactgtgaaacttttctattttgttctattctcaattttattaaaaacggagggtgatgatcccgatctaccaaaccaatttcacaatgcgctagagattataacccgcggtttggaaaatactggcttggaaaaagctctttgatctgtgtcattctcctcacatctccctacacctctgcggagttccgattgtttggtttcgtcctgataatcactgtgctgtgttttccctacacgctctgtgacggggccgtccgcctccttcctgggctcctttaagagggtggtaacggtacatcaccgcgggagtggagaggcagggcccactaggtcgtcgctgcaggccaggcccgctcatccagttattgtgaaagccggggtgtgcgcgcgaagagtgggagggtaggggtgaggcaggggcagcactgacgcctcgcagggctgagtagcaacagctcctccgcgccgcgtttccggagaccctgaaggagtccgcgcgtgcgcagagcgcgtcccgggaactgttccgcccacggaggctgccgagcgcgctcccgccgggccaaagtacaaagtgggctccagagcgcgggcggcgcggcggcgcgagccagggggcggtcctgcgcggccggccccgccctctgctctcctcccagtctcccccgcgctgcgtgcagtaaggtagccgccgccgccgccgccgccgcgtcccctcgccggctcgctggtaccggcagtgccatggcggccttcagcaagtacttgacggcgcgaaactcctcgctggctggtgccgcgttcctgctgctctgcctgctccacaagcggcgccgcgccctcggcctgcacgggtaagaaggcccgtagccgtgcagctt

SEQ ID NO: 2012 - DNA, 2300 bp, Homo sapien
tcggcttccctttgtgggtaacccgacctttctctctggctgcccttaatattttttccttcatttcaactttggtgaatctgacaattatgtgtcttggagttgctcttctcgaggagtatctttgtggtgttctctgtatttcctgaatctgaacgttggcctgccttgctagactggggaagttctcctggataatatcctgcagagtgttttccaacttggttccattctccccgtcactttcaggtacaccaatcagatgtagatttggtcttttcacatagtcccatatttcttggaggctttgctcgtttctgtttgttcttttttctctaaacttcccttctcgcttcatttcattcacttcatcttccatcactgataccctttcttccagttgatcacatcggctcctgaggcttctgcattcttcacatagttcttgagccttggttttcagctccatcagctcctttaagcacttccctgtattggttattctagttatacattcttctaaacttttttcaaagttttcagcttctttgcctttggtttgaatttcctcccgtagctcggagtaatttgatcgtctgaagccttcttctctcagctcgtcaaagtcattctccgtccagctttgttccgttgctggtgaggaactgcgttcctttggaggaggagaggcgctctgctttttagagtttccagtttttctgctctgttttttccccatctttgtggttttatctacttttggtctttggtgaccgtgatgtacagatgggtttttggtgtggatgtcctttctgtttgttagttttccttctgacagacaggaccctcactactgatttcttctcttctttcctccctttttcctttttttccttcctaaatgatatagaaattttaggtagtcatgtaaaagatatctcattgatatataaatgagatataaaagatacctcatttatgtaaaacaacatatttaaatctctttataattctctttatatatgggaaatatatttaaatatgttgttttatataaatgagatataaaagataaaagatataaaagatacctcatttatataaaacaacgtatttaaatctatttcactttacctcattacttagagttaataaactgaccttttcttaatttttccattaactttatctaaacattagagtttttttatgaataaaactcaacaataattatttggcaatttttaatttatccgttttattttctagcctgagcaatattttaccaaagctgcttttagtagctaagtctgaggctatctttattggttccattctttaagtaattattcaatagtatcagttttctttctttgagaaattgttaccaacatctatactatggttaaattttggaacaaatgtagtatatcctagctgttttatagtttctatataagtaaatgaggtagatgaggatttttaacattttgtatgtgttctttgggagttctcaataaataaaaaaggtcatattgagtatatatattatgaattcctactattccaagtgtgttcatgatcagcagcagcagtgtcacctaggggtttgttagaaatgcagaatttcaagccctgctaaatcagaatctgcattttaccaaaattctaagatgattcaaatgcgcattaaagtttgagaagcactggcgtgatgatgaaagaatttgctattctttgtagaaagattttaactactgattttatcttgttaatgatttattttctattcttgaatttgctttggtaatatataattatacatttgttcatgttggttttcaaatatataggtattagagatgtttatggtattctcatgtacataaaaccatgtagtctgcagttgattcaatgacatagcagctctttgctggtaattttgaccacgtgatttcctcttatgctctagctataggcttgaagtccccacataagactgtataaattctataaaacatcagttccatttaaaagaaaattcatatggggcctcattgataatttaaattactgtgataccacttaaacatgtataaacatgatgaggtgtgaattccttaagcttagagctcttttacagctacaaaactaatataaacttacacattaaatacattaaatacagacaaaacttaaatacagtttcaaatttacaacattaaagagacctatgataccgtttagatgaaactaaaccagtggtttgggatttaattaaggaaagatagaatctgagg

SEQ ID NO: 2013 - DNA, 2300 bp, Homo sapien
gggaactgttaactgctaagcttgactttactgacaggagtaaaaaaaattgtgttaaggttagggaataattttaacagtcaatttgttcttgtgaacaaatttcaacagtgaaattttagatatgtactttttaatggtgccaagcagcagttattatagatcaactgctgtttggcaccattaaaaagtacacttcgcaccgtcaaaaagtagatctggccacaattagatcagtcagggaaaaacacttcgcaatgaaatattatttaccacgttttcttcctccctcttcttgaaaatagtaatgattttagcatttttaaatcttgaagaatgtcattccgtactgactaaaaagcctgtgcaaacacccaacatcttctctttcctgtctattttaatggatatacaaaataaatattcatctaatttatcaatatttaaggcacattgtgtatcacaatccaatggtaaacatttttcttatcaaatggctgatcttgacattgtttaaagccctatatgatttcagaaaagtcagtgactccaagtggaattgcaacaatttcttgggtcttgtaacaaacctgaagtgtaactatttctcttcagctaccttcaatcccagagagcaaagaatcacatcccaggtggagctgaagatctcttagggaaaatgactcaggctagagcctgcataaaaagaggattgcatggcttagttttgcaaacataaattttgtgggtttcagagctggcagagagctcaaagaggaaatcatcaagggcaactttctgcttcgaggaaggaaagtctacaagggctaaacctggatgtgctatttcagttcaggcaaaggaggaaaattaaaattttgcacagttttattctgttaaaacaagtggttcagtaagctaaacgagatatgtatatagtatgcattaaaatgcaagactgacttccctgggaaaacgtgggaaagaaggagagaggaaacaaacaattcttacactaagaattctccagtcgtgtcttgcaggcaatatagagtaataataataaaaatgacaggagatactttgacaggatggcttaaaatgccactcaatagatgaagagttgttctcatgcttggcaagtttacagcaaagcccagaaggagaagccagaaaataatttagaaaaaccaaagcttaaaactagtggcacacaactctggttacatttttcattttcatttttggttcctctgcatttcggtggaactcagtcccacagatgtcttcttcaatgtgggaaccatcctttctggaaccacagagctgcagatgtcacgctggaattctcccagaggcaaactgccagatgtgaggctgctcttcctcagtcactatctctggtcgtaccgggcgatgcctgagccaactgaccctcagacctgtgagccgagccggtcacaccgtggctgacaccggcattcccaccgcctttctcctgtgcgacccgctaagggccccgcgaggtgggcaggccaggtattcttgaccttcgtggggtagaagaagccaccgtggctgggagagggccctgctcacagccacacgtttacttcgctgcaggtcccgagcttctgccccaggtgggcaaagcatccgggaaatgccctccgctgcccgaggggagcccagagcccgtgctttctattaaatgttgtaaatgccgcctctcccactttatcaccaaatggaagggaagaattcttccaaggcgccctccctttcctgccatagacctgcaacccacctaagctgcacgtcggagtcgcgggcctgggtgaatccgggggccttgggggacccgggcaactagacccgcctgcgtcctccagggcagctccgcgctcggtggcgcggttgaatcactggggtgagtcatcccttgcagggtcccggagtttcctaccgggaggaggcggggcaggggtgtggactcgccgggggccgcccaccgcgacggcaagtgacccgggccgggggcggggagtcgggaggagcggcgggggcgggcgccgggggcgggcagaggcgcgggagagcgcgccgccggccctttatagcgcgcggggcaccggctccccaagactgcgagctccccgcaccccctcgcactccctctggccggcccagggcgccttcagcccaacctccccagccccacgggcgccacggaacccgctcgatctcgccgccaactggtagacatggagacccctgcctggccccgggtcccgcgcccc

SEQ ID NO: 2014 - DNA, 2300 bp, Homo sapien
gtgggatggggggatgtttcgggatgaaaactgttccacctcagatcatcacgcgtgagattctcacaaggagcgcacaacccagatccctcgcatgcgcagttcacagtagggttcgcttctgtgagaatctactgccgctgttgatttgacaggaggcggagctcaggtggtaatgcttgctgtcttgcccgccactcacccccccgctgtgtgtcccagttcctaacaggccacggaccggacccctgcactaagttgctcgcaatctaatgggccagacagttgtgtacagagaaggcctgaaggagaatgtagcacattgggctccccagaaaactgtctctgagacagagttgggcatccagactgcccttgggttcaacacctgtggaacgaagaaggaggaagcagcgtgggcagaaatgctaagctgtgatacaggcttgatgaaggcgaccccacagggagctctgtcccttcagagttgtgctgggttagatagagatagccttcacatgctacactgattcatcactggatgtgggccaccagacaggggcctgacatgggcagctgcgggcatccttgaggagctgacagccaaaggtcatctaccaacagcacttctagcaacgggggcaacaagttctgcaatgaaggaggattcgggaagtgcagtgcagggcccacctgccaggcgaatcgccctagggaaggaggaggagcaatcagctgctgggaagactcatgaaggctctactgggaagcatcttagaggatgagaagagctttccaggcaggaaaaggcagaagtaaatttgagctaaggtgcatatggactaccgtcgcctggtgggcgaagaatggcatcctgaggggcgagtaaaagaacacaattccttcctcaccccgccatactttggctgcactccagacacagcagtgtccaccatgaagacttgactccatcccctttcctgaagccaggaagcctcggcatgttcccgaaatacttgatgagcataacagtgtggataaacatttagtaagctgctgtggccagaaagaaatccaatcatgatcagctggagaggaacccaataggatttttaaattggcaaatatttagttgttaataaacaccagcacctgcctggctggctcccgcacttccttcccagaagtctggaggctgcagtgtgtgtggaggaaagggcaagtgctttaaattagacagacccagaacccaggcctgactcagctgctcattttctgtgtaaccttggcccagtcacttcacctgtcttcaaacttcagtctctcaaacgtaaaacagctaacactttccagggtgcttgtgagactcaaatgaaatagcatatatacaactccactctatctactgggtccctgctaccaatctgctgccttggacaactcactagaacttcaggaagtgacttcaacctgctttaaggccactgttgctctctgtcactctgtcttgaaatatactattaccattagtgtaagcctgaggacacttttgtgtattcatagtctttccagacaaagccatgagccagtaatgagcagagactgggaaataagtggcctcattctttctcttcttgctggctctagactggggttagagatggttgcttagcgacagtattcattcatctgagtgatggacagacccaagactgccccttcccatcagggaggaaatgctaccatgcccatcagagctcttgtttctgaggagtatttgggtggtttttcttgaaggcggttttattctaaaggaggtaaattggagccctttctcagatggtaattgttgccgagatgaaagaagagctatgagatgtggggctgggggcggggtggatgggagctacaatctggggctcttgcccactcttttcatgaagttgattatttcagaacagaggcaggatgaccaaagaggggctgcacaaatgggcctctgttttatgcttggcaggaagagctgtgacctcttttctccttttaagtctttctaagtcccagccattgtgttgacaccataatgggaactaggctcctgagcttctcagaactgaaggcgaaagaggtgagttagagcacgctaaattacagtggcattgcagtgccctgggaggtcggaatttctggactgttcccagtgagctgactgctctggcctcccaaagatgtatgggctcccgcactctctggaggggacacactgcttatttcttcagcctacagcctagattccaatt

SEQ ID NO: 2015 - DNA, 2300 bp, Homo sapien
ggtgcctccaaactcccagcacacaagccaggttcttcaagagctttcccagggtcaccatgttctgctctactccgagggcacccccagtctcagagcacatccaagtctccacctagctttggggaggaagtcacctccccttgtgaacaccacattgactaacacttgccctctttctccttctttccctagctctctgcttatattacagaggggagctggggtgaaggctggggggagccagcaggacgagttctgaagcctcttattaagccttgagcaaggggtctagcccctctttaaaatgaggggttcctaattaacacccttcctttcaaatgcagcctggcctcccattcctcttccactttcttttccagctgcttttcaaagagcccaccttttggtgttgacttttcatggactccacttgtcagttgtaacagctaccctcacaagtgagccaaaggattcaaaataaggtttcctgtgagcacagtccataaggattgggatttgtatttatgaacatggaagaagcccagccccatagaagtgaaacacaaaagaacggaggagttttattaaatgctatggtctgaatatttgtgtccgtcccaaattcttatggtgaaattctaaccaccaaggtgatggtgttaggaggtggggcctctggggaggtaattaggtcatgagggcccttaggaaacgggcccgggagctcacgtgcccctcccactctgtgaggacacagcgaggtgccatttatgaaccagaaagtgggccctcagcagacaccaaatctgccagtgcctcgatcttggatttctcagcctccagaactgtgaggaataaatttctgttgttgacaaaccacccagcttgtggcactttgttatagtagcctaagtggactcagctactaaacttaacagaataacaggtgagatggggagaactgctgcgcttcaggcccctcccaggagaccaccctcacctttctctgagctacctaggggctacagggaaacggactttgactctgaatggagctgtgcaggggcttctatctgtgacccagccccttgggcctcagagccagcaggtgtggacgaggctacattcacagtagcggcccacctgcagctgcctcttacccacccacacaggcctttctccaatgcacactccagccccagctgtctctgcatccccaaagcattccctgccagcagaggaacccctgggtgctgcaggagctgagctggtgctgctctctgatgtgctggagcctctcggggtctgcggagaggcgtgaggcctgcttcgctctcctccttgggcactgtcagacagtcccaaactagagcttcttgtgccctgtcttacaggtgctttgcgttttgtttatataacacttagcatttacagcattctaagcagtttacaaacacgaactccaatgacttcagagcagccctctcaggcactgcgggcatcaccatttaatgatgaggaggctgaggcgtagagaggagaggtaacctgcccacagtcacacagttggtgggtgacaggatgaagctgagatttttaaagaatattttatcatatatatatatgtgtgtatatatattttactggccaccctttctctcctgtgacccagatgaggtctccaagggaccagatggagaacagatgcaaccacactgaagtcagaatcgcagcttgcctccgacacctgacgcttcactgttggcgaggcccactatgcctcgctctccccctgtaatgagttctatcccagaggctcctataccctttagaaataaactgctcaggcagcccaaccagttcatccaagaggcctggaaccacagcagcgtcgacagctgagatgagagttggtccctgatctgatacagagcctgggtttagctttgatttctctcttcctaggcaagatctttagagaataactttttgtgcctggccatctcctgctcttttctcaacccaaaagggctatgttcacctaaagaggaaaagcaagaaggcttcctgggctcgggaggtcagggctggaaagaactgctcaccatttctgagccgatgaggactcacctgggctcctcactggtcagggaactgtggcccagccgcagagtgattgctttgtcaagaagggaaacatttacctttccttcttccctctgctctctcctaattaacaattaaatggaaggagttgaaaagacatgtcagagacttcaatctcctcccggcctgag

SEQ ID NO: 2016 - DNA, 2300 bp, Homo sapien
taccactgggtcatcagtaccattctcaagataatggaatatttccatcacttcagaaagtttctccagattcccttcacccccagcacctgacaaccattgatctattttctgccttttccagaatgtcacataaatggaatcatagagtagcttattatatctgactttttttcacttaacatgcatttgagatcatccatgtttttgcatatgtaagaagtctgttccttcttaatgcttagttgtatttcatcgtatagatgcatcacagttatgtatagccacccaccagttcctggacacttgggtggttcctggtcttttttctaacacaacaataaattcagcctaaatatttggccactctcatgctatatctattgtatcatctcctgaatttgtttctcttcttgcttgattatgtcctccaagaatgtcattcaaatgaatctttcataagaatatttttattattaatacattctcacattctaatgacaatatggcttaatagaaaataagttcaaagttatgcttttaaatacttacatatagaaacattttgcttgagataaaccttttcaatctgaaggtttttttctaccttgaaatttatctccattatatcttcaaatatttccccttctctgtttttatatttcttcctttctgttctagttttaccctagatataagctagaaaatttacaaataagctaacttgttttttaaaacattttctactgcctctggaggtttgctgaaagtgctcttccaattactaattcatcgtcagctgcatcttttagactattgcacattactaatacgtagcatcaatattcattctaattattatttttatgcttaatatgttttagtttcatattttttcctgattcatattgctaatatcataactcattttaaataaatttatcatgcttatttaaaaatcttggtccatctgctctactgatcagtttcagatggcatatgttattcagttgtggtcttttaacagtagttgcactcctccagtgtctaattctttgtcctatgaattcatgttcccctggggtttcacctactctgtctgataaacatgcatccaggaaggcccagtgagtttgcagtgggagggtggtgtgagcccagaaggaaatcgctggcaccagagaaccactgtctatcattcccagtttctcccacttacccagatctttcctccagtcaggtttctacccttagggagaagcagcacctaaaggaagcaattaacctagcaaccctaagggtggcagggggaagggtagaggcttgattgagaggaggtggggggaggtcggcctgcagttttttttgtttttcgttttttaaattcctcaccccaacagtgcttttgcgctggtctgacactacctggaaaactatgccaccagtcgcttcagtggacactaccatttcaattgcgaagtcaggcaatgattgtcctaaggcaaggtgggagagaagtcagagtaaaccacctcgagagcgccggtctcccggagtgtctgggttcgactcctgcctccacaacttactgggtctcctcgaacaagttgcatcaccaatggccgtgcctcagtttccctcctccgtagattaggaataacaatagcagtgagaacagaatccagcacacagtaaatgctgcttacctgtttgctatgtggaatacgccactacactgttgctcggccctcaggaagggtctgctgagactttctacttcctgctcagggcagaggccgaccacccgcccaaggtcgtggcggcgccggctcagctttagtcgtcaaagtgcacatcctgggagccgctgcctcgaggtggttgaggcgagagggcagggaagcgtctgagcctcttcctcccaccagagcaggaccccagctgacagcgggtgagctgggcagaaacccatgccgggaagaggcggacccagtggaccgcagcgcccgcagtcgccgggccaggcgcagaggcgaacgggaggcggcgctgcaccgtgcccgcccctccccggcccggccccggctccagccccagccccagccccagccccggccccggccccggctcgcgggcgctgcgtctccgcgtacaggaggcggcggcggctcccagtcaccggcccccgccggcgagcgcacgatgcactgcctgggcgccgagtacctggtaagcgctcgcagcctcggccctcgggggaggagccccggggaagggtcgagtcccccgccttcacgcac

SEQ ID NO: 2017 - DNA, 2300 bp, Homo sapien
cagttatgtatagccacccaccagttcctggacacttgggtggttcctggtcttttttctaacacaacaataaattcagcctaaatatttggccactctcatgctatatctattgtatcatctcctgaatttgtttctcttcttgcttgattatgtcctccaagaatgtcattcaaatgaatctttcataagaatatttttattattaatacattctcacattctaatgacaatatggcttaatagaaaataagttcaaagttatgcttttaaatacttacatatagaaacattttgcttgagataaaccttttcaatctgaaggtttttttctaccttgaaatttatctccattatatcttcaaatatttccccttctctgtttttatatttcttcctttctgttctagttttaccctagatataagctagaaaatttacaaataagctaacttgttttttaaaacattttctactgcctctggaggtttgctgaaagtgctcttccaattactaattcatcgtcagctgcatcttttagactattgcacattactaatacgtagcatcaatattcattctaattattatttttatgcttaatatgttttagtttcatattttttcctgattcatattgctaatatcataactcattttaaataaatttatcatgcttatttaaaaatcttggtccatctgctctactgatcagtttcagatggcatatgttattcagttgtggtcttttaacagtagttgcactcctccagtgtctaattctttgtcctatgaattcatgttcccctggggtttcacctactctgtctgataaacatgcatccaggaaggcccagtgagtttgcagtgggagggtggtgtgagcccagaaggaaatcgctggcaccagagaaccactgtctatcattcccagtttctcccacttacccagatctttcctccagtcaggtttctacccttagggagaagcagcacctaaaggaagcaattaacctagcaaccctaagggtggcagggggaagggtagaggcttgattgagaggaggtggggggaggtcggcctgcagttttttttgtttttcgttttttaaattcctcaccccaacagtgcttttgcgctggtctgacactacctggaaaactatgccaccagtcgcttcagtggacactaccatttcaattgcgaagtcaggcaatgattgtcctaaggcaaggtgggagagaagtcagagtaaaccacctcgagagcgccggtctcccggagtgtctgggttcgactcctgcctccacaacttactgggtctcctcgaacaagttgcatcaccaatggccgtgcctcagtttccctcctccgtagattaggaataacaatagcagtgagaacagaatccagcacacagtaaatgctgcttacctgtttgctatgtggaatacgccactacactgttgctcggccctcaggaagggtctgctgagactttctacttcctgctcagggcagaggccgaccacccgcccaaggtcgtggcggcgccggctcagctttagtcgtcaaagtgcacatcctgggagccgctgcctcgaggtggttgaggcgagagggcagggaagcgtctgagcctcttcctcccaccagagcaggaccccagctgacagcgggtgagctgggcagaaacccatgccgggaagaggcggacccagtggaccgcagcgcccgcagtcgccgggccaggcgcagaggcgaacgggaggcggcgctgcaccgtgcccgcccctccccggcccggccccggctccagccccagccccagccccagccccggccccggccccggctcgcgggcgctgcgtctccgcgtacaggaggcggcggcggctcccagtcaccggcccccgccggcgagcgcacgatgcactgcctgggcgccgagtacctggtaagcgctcgcagcctcggccctcgggggaggagccccggggaagggtcgagtcccccgccttcacgcaccttccctgccggacgcttccgcctttcccgcgcctcggggatcccgcccccgcttagtaccttggggccacctggcggggaggaacctggaccctgctccagtgctggggcggaggcgggggagacgcgggccgcggggcgcaaacttggggtcgtcctcaggtgcacctccaggtaagcacttggcggcagggggcttaacatccgctccgcgcagagcaggtgtttcaaaggctgtgtgaaagagcttcaggtggccacgtaaaaaaat

SEQ ID NO: 2018 - DNA, 2300 bp, Homo sapien
tagtgagaacttggatatattaaaacttcagacttattttgcaaatgaaatgtaattttaaagcagtttccagctccgtgccacctctcagctggttcacaattcttcaggctgtgataggtcatctacaaagattttccccaggattctcagctgttgggctgagagtttggtagtgaggtcctaggttgaagctgtggaggggctacggcagatcattaaatcacaataacagcttgaggtcaaagctgccaggcacaaggcaggccagctgctccctgcatttatacaacagcagtctcagataaaaacaccaaccatctgcgaagttaagcagaaggtattgtaggtgcactgtctctcccagctcctaggggagagttccaacgtaagcaacaaaaaacatctgattatgtgtttcagacctaaccttccactgtgcctgtaaccaagcctgtctatgtgaaacgggtcataagtgaacaaatgcctttcttacttggaaagaacaaacatgatattttagggcctattcagatggaattcttttcaacaaaggtaattactatctggtagttattaccctgctctataaattaatcatttaccatgcagcaaatagcatgccttatcctggcatggatgatttcgtgaaagtggcctttgaaaatgtcgggtgagacgttttctgctgttacctacaattctaaaataagtataaaagcagcaagattcggcttccaacagactctctcaggattataaccgcatagcctgatggagtttaccagcaatcatacatacctcgaaattagagtgggaaaaatcattccttgttagctatggttaacagtgttggctgctaaacacaacatatctctcgcgcgcgtgtgtgtgtgatgttcagctaaaggaaatgcagtttatttctaggcttaccctggcttttcctttgttaaaggtgcaccaaaagcttgaggaatatttgatttgggggtgtggcaggtgctaaaagaacttctgttcagtaagttcggagagtaaaaggagacacattggccttactaaatagcaatcacattgcaaactgttaattcccatttcctaatggagtcaccccttagaacatggcctgtagcaaaaagacagcctttctagcgagtctaggacaagaattctcccgagtacaaactgatgtttattgtgggttaacggcagaagtctctcactgcagcaccaactacgatttacatttgggacagagttatttccagacgtgcacacacactctggcctctttcctaccaagcacccacacttaccaaaccagtccaaaagagaaagaacaggaataaccatgccgtatctgtgcatttcctataaatctggggtcgccactccctttgcctaggggctccttctgcagaaaccttccagaaaaagggagagttgagaaaaagaagataaacaggtggactcaacctggaaaccgaacccaaatctactcgaagaggggccaaagtaaccaatctttttctaaatttttaaaattaatattatttttttacgtggccacctgaagctctttcacacagcctttgaaacacctgctctgcgcggagcggatgttaagccccctgccgccaagtgcttacctggaggtgcacctgaggacgaccccaagtttgcgccccgcggcccgcgtctcccccgcctccgccccagcactggagcagggtccaggttcctccccgccaggtggccccaaggtactaagcgggggcgggatccccgaggcgcgggaaaggcggaagcgtccggcagggaaggtgcgtgaaggcgggggactcgacccttccccggggctcctcccccgagggccgaggctgcgagcgcttaccaggtactcggcgcccaggcagtgcatcgtgcgctcgccggcgggggccggtgactgggagccgccgccgcctcctgtacgcggagacgcagcgcccgcgagccggggccggggccggggctggggctggggctggggctggagccggggccgggccggggaggggcgggcacggtgcagcgccgcctcccgttcgcctctgcgcctggcccggcgactgcgggcgctgcggtccactgggtccgcctcttcccggcatgggtttctgcccagctcacccgctgtcagctggggtcctgctctggtgggaggaagaggctcagacgcttccctgccctctcgcctcaaccacctcgaggcagcggctcccaggatgtgcactttgacgactaaagctgag

SEQ ID NO: 2019 - DNA, 2300 bp, Homo sapien
tcccaatgtgaattcaattggatgaaacttgatctggacacttttcagcctggctgtgttggtgaatgagcctatttaactagggaaaatcacacagtggctgtgtgagacatttaaattgtagacacagtgtggggcagtaaggctgctgaggaagaaatttttttttaacctaagaaaggacacattttcccaatagtgacatcactaaaagcaattttggcccttggtccttgtgggatctgggaagtgataaataaccttttagacctcagtcagagagaccttgggccttccactgaggtccttgggccttctcttttagatttatgaaaggccgtttccccagagagtttaaaatgcctagctttaggagggagagcaagctcccggctgctcattaatttatgattatctattaccaatgcgcacacacacatatcacaaatagatttaaaataaaacgctgtcctgttcttcaagaaatcctgcaagtttcctaagactgaaggattgatttcaaaatgcaggagccaaaagtagctagttttgccctggatatggaaatgcctcttcaagtcatcaaaatgtggccaagcaaaatattaatagaaatacaagaaaatattctacaatcaggggcaactgcttagcatgcatttccagataaggaagccagataattttatgtgttatccaatcaattgcttctaattgataaactaactttaaatcttggttatagattttaaaatatcaacaattcagatatctttttaaaaagtaaatgaaaacaattccaaaatacaatgtaaacctattggtaaaatgtcctgaatttactaaggacacatagctatactcaaaaggttggaatcaggtaagtttgtgaaactgaccaagtcaccaactctaaggtggtgacgggggaagagattaacattgtgtgagaacagaagacttgggaaaagtccaatcttctcttgtttggcaggccagaaataccatgagaacagctgttttcctggtgttctggtttccactggcattcataaccaaatgtgcatggaaataaaaactaggaggagaaatcccccaggcacaaaagccctacagttctctgtcctttgagctgagatgtaggtcagcttgcccatttctcactctcaagcgcatgtgtacacacgcatgtacacacacatacacactctcattcaaaccctctccttttctccctcgttcttcctcacacacaccaggaatttcccatgactgtctctaggaaacacaaaaggcaggcaatattttagcatcaaaacagaaatgaacaaatattattcctatcttatggtatatttttttacttaaaaaggcatgataaatgttcacaaaaaaacttgtttaaatttcaccttaagagttcatcccgtctgtttggcatttacataagaaggaaaatcagctaactcagaactactccctccccacgccatctccaccgagttggagaaaacccaataaacaaaaccataaacaaaacacagactctgggaaaataaaagttttgctgggagaggcgggggatgggagctgaggagtgcaggagctttctgcacggcccgctgtcacaggtcacatttctgtcctgggacctgctgtagttttccagtaattaagtttctggcaacccaaacacagaacgtgctgtgtatcaggaggtagccttacctgttctttcagtgcgttttgcatgtacatgacaatgattctcggaatcctcaccacagagattaaaaatgaccctttcacaacggttccttgatggtagaagaagagaatggagagagacgaaaggatgggatgatcaggaggatcatttttacttctggaaatagggaaaaggatagcattttaaaaacactttttataaagcagcaaaagctctctggttccaatcatctgtggtactaacaacttagaaagttgtgacataataagcatttggcgaactttttatactccttggtagcttcggttaaattgtttcttgtattaatttaattcgttttggtgccacttaatgctacaaataaaacagaaaaaatttaaaaaaattgatgagttaaaaaagtttccctcttcataatgcagagcccatccaccaaccctttagggtgcctattcatctcattttcactttcagaattttaattgcggcacaatctccaaggtttaacttacacaggagtatacataaatattgccagcattcacctggtgattaaaaatcatcaccaaat

SEQ ID NO: 2020 - DNA, 2300 bp, Homo sapien
ggtagattctgtttgttgtgatgttcatttccatgggtcctctataaaattttcctgtgagctcctcgtcttctccaagggttgttatctgtaggactcctctattccctggcctgggaggtggcgatgttgctttgcctttgcaaaaccctagtaattttaacactcttaggcacatagtgcatttctgtaccaccttcctggaatggctgactgaggctgaattgagtatgaatcctgaatttgttgaaggagctcacttccctagcaagggcctaattgcatgcctgttgcacctttgggttcagctctcacaaaccattagatcccgcttgctttctggtacctaaacttcctttcctgccctcaaactctattgtgcattaaaaaataacttatcgccagggtggtggctctcgcctgtaatcccagctactcaggaggccaaggtacaagaatcgcttgagcccaggaggcagaggttgcagtgagccaagatggcaccactgcactccagcctgggcaacagtgtaagactgtctcaaaacaagcaaataaaacccttatgctttacccatcatttccacatgtttgtagtgggacattcatattaaccataagtacctatttatcttttctatttgctgcaactatatgaaaatatatatggatataatcagactggaaaggactttgaaaatggtatttgttatgggtagagagagtaggtttattgtaactctagtttgcaaacactctgtattaatatattgccttaaaaacaattgttataagaattatcttttaaacaattctcttctgtttcagaatgcatatactacaactgctattaatgggacagatttctgtacatcagcaaaagatgcattcaaaatcttgtccaagaactcaagtcactttacatctattaactgctttggagacttcataatttttctaggaaaggtgagatatcttgactaaataaaggagcctgggattctgaaaattaagccatacaacaattggtttgaaagggaactatatttcttgagtacttactctatagtgggtgctgtgcttcattatctcatttaatcctcaatcccatgaggtatccctactttgcagaagagaaaatgaaggtttaataacctttccagggtactacaataggtagagccagaattttaatcttagtcttactctcttacctgtgatcagttctaccattctgattccctctttttcaggtctaaaatgaaaatgctactaatctcagaaaatgaacgtttgtgggtttctcattaagaatatatggaaagagtattgaaacctggactgggcacagtggctcacatgtgtaatcccagtattttgggataccgaggcaggcagatcacttgaggtcaggagtttgagatcagcctggccaacatgggaaaaccccgtctctactaaaaatacaaaaattagccgggtgtggtggcgggtgcctgtaatcccagctactcaggaggctgaggcaggagaatcacttgaacctgggaggcggaggttgcagtgagccgagatcacaccactgtactccagcctgggcaacagaacgagactctgtctcaaaagaaagagggatggtttctaaaaaaagttttaaagtgaataggcttattttggtgttaagtgaaaaagcagaataaaaagcttgtgagatattattacatttatataaatacaaaagctaggcacagataaaattacatataaccttcctactcgccattaactgggtttccttttgatacagcttttcattttttcctctatttcattctgccaaaatttctgacaagcattctttacaatagtgcacacacacgttgcacacaggaacgtatattaaaccattacttgtaactgacaaaaacatctaagcaactgattcataaagattttcaacaaactcttcttttgcacaggtgttagtggtgtgtttcactgtttttggaggactcatggcttttaactacaatcgggcattccaggtgtgggcagtccctctgttattggtagctttttttgcctacttagtagcccatagttttttatctgtgtttgaaactgtgctggatgcacttttcctgtgttttgctgttgatctggaaacaaatgatggatcgtcagaaaagccctactttatggatcaagaatttctggtaagcaaacatttcatttccaattgcaatctccatgctcgcaatcttgaaagttttgtaaagctgcacacacgaaagaggctc

SEQ ID NO: 2021 - DNA, 2300 bp, Homo sapien
taattcgcttcacaccgcctacccccgcagccccgggatgttccagctctgacaatgccagtgccttccaccagcggtcggacggtgcggtggcaatcctgacatgcttgggctcccgggaggttaatgggaattaaaccacaggcagccctcctttgtggcgctttggccagaacagcagaaaggagacaatgagcgttctgtgcacagttccgcgccgattggctggtctctccccccagaaacccctgatgtcatgggcttggaatgcagggagggaggaaggaaggagaggatttggggagggggacgcctctcatctctttcccaggccaaaagtcctaaagataaacctaacgcattcttgggctcagtggcaaagctgagcgtcaccaaatcccaatcgctccaaactataagccgcctcagcaaacaagccccaaacaaaagcaacccacaaaaataatcctttatgtcgtgaaagtctaatgtacttcaaacttctcagtgtttcataaaaagtctcaagcctaagcagatatcactcgcacagtggcgcgctcaggctttgtctccatttcccgcaaaagcaacagcagaagcagcagcagcaatctgcctccaaatgcctcccaggcaccgagatcggagactgtgatgggtcccggaccggcttccgttcctcggggcccctggggtcggcgggacattaggcggtctctctccccgtggggaggcgcggagtccgccagcacccggggcccgggcagatggcgggggctgcggcagcggctcgccgggtccctggccgcgcagacgggctccgcctaagggcgagtggccacgcaggagcgcccccttcccggagggcgcgttctgcagtcaccaaacggcccccgagacccccgcagccggaaaggctggcgccgcgggactccaggcgcccgggaacccaccgccagccactagtcctgtcccacggcgcgggaacaaagccaggcgggtgcccgggagccggccccgcaagcccggggactggacgcgaccgggacaggcagagacgctcgcgccgcctcgacggcccctctccaggaaaacggtgagccacagcgcgaagagcaaacgaagcacggcccagcgccaggccagcccaagggtgccccgggggcccccgcgcccgcccgagccaggcgtaccttgttcttgacttcggccgagagcccataggaagggcccttgttgaagtgggtcatggtggttcgggcggcgggaagagacagcgctggggtccggggtctctcgcacttcgcttccccgctcctggccccgaggagtggccgccgcgggggatgctcgaactccctcctctgggaggcgcaggagacggccgcggggcgcgggcggtgcctgggcgactgggtccaactgggtgctacagagcctcgagctccgctgcgaagcacccggctgcctcgctcgccgcccgcacctcggttccccacaggccgcccccgcctccgcctgggccttcgaggattggccgccgggcccgaccaatggagggccgcctcctcccgcctctgcgccgaggggcggtgcggccaattgaagggccgcgggggccgctttccctcccgctccctccccgcgaggtccccggcccccgccccagccctcacgccaccggggccggcggctaggcggccccgcccccgggctaggcagggcgcctgggggcttcccagccacaggccattcacgtcaacctccaggcatcctccgcggcgggccggaccgggccggcggaggggagcggaagcccaccggggctggcccgccgctgacccgccgcctccgtctgcctcctcccgggctctgggcccagcgcgcccagatgccgggcaggacccctccgcccgctgctggaacaccaatagcagcgttggagcctctgggccggaggaactggggcctccaccgacacctgcttcttccctcacctcgcagccttccacacctgttgatctgacctctgccccgctgccgcccaggagtaacctaaggcttttggcctgattcgagctcactccgtctaaacctctaaatgcggtgcgaaaaaatcctggggaatgtgccatgcaaagcctgggcatttcaagtgcttttctggattcgcatcaactcctctttacaggcatctttatccggaattcagctcgtcccaaaccccacgtggtgtagctctgcttgtgtttttgaatcccggggcctctttgaatcagaagccctttgtatagaga

SEQ ID NO: 2022 - DNA, 2300 bp, Homo sapien
gaggataacagttgatcaaacaaacaaatgtagaaaatttcatgtttactttaaagtcacgtaagtgtacaatggcattaagtacatttacaatgttgtgtgaccactgtcactacccatcttcaaaactttttcatcatccaaaactgaaatcctgcactccttaaaaaataactccccctaaacaataaaattcatggttttcaagacaaaatacaattcttgaacattttacaataagctaaagtagattaaaatgactttgagcatacaacaggagcagtcaggcttagattgctgcaaaaaggctttgcaggctggacaccatgatttgtacctcaaatctggctgctatttcccacactcctaggtcccaaagaaatgtgggtgaggtcctgcggttgacacaccgtcactgtcatactactggaaaaacagcccaaactgttagcctcaatgatattgggtcaattgtgtcatcttcgtgtgggaagaatgccctaattatcattactccctttggacaaaattagcaagtcatttataaatcatttcactttcctccctatttgcctcctcccgcttccttcaggttccatccctcaaagtcattgggaaaagccttgcaaactggatagcagttttgtgcatttccggttcaagctgccttactcactttttttttttaatttaaaaaaactttggattttttgtagagacaggatcttgctatgttgcccaggatgttcctgaactccaggcctcaagcaatcctcccacctcggtctcccaaagtgctaggattacaggcatgagccaccacacctggttcaccttactcacttctattccaggacggttcaactatgatgttttggctcctcttctcaagcagctttccacacctggttccatgatctcttctggcacagtagctggtatttggcaaacataggtttcatcctgggatctcagggattgaaatctgtcctaggtgtgcaccagaaagtggtggcaagagatgaagcttcggaggaggctgacctcggccaggattcttaagtctcaaagtttcagctttctcacccctcaacggacatgaaatctacctatttgtaactccagggaagtaaatgagataatgtttggaagatatctagtctaccagctgctcaggcggggggcgaaggttctgttccctgtcccttctctatcaaatggctttaaaatcagaagaaagtattacgggtaggaaatgggactgcgaaaaaaatggaggctgattctggcctaaaggatacttatctctatacaaagggcttctgattcaaagaggccccgggattcaaaaacacaagcagagctacaccacgtggggtttgggacgagctgaattccggataaagatgcctgtaaagaggagttgatgcgaatccagaaaagcacttgaaatgcccaggctttgcatggcacattccccaggattttttcgcaccgcatttagaggtttagacggagtgagctcgaatcaggccaaaagccttaggttactcctgggcggcagcggggcagaggtcagatcaacaggtgtggaaggctgcgaggtgagggaagaagcaggtgtcggtggaggccccagttcctccggcccagaggctccaacgctgctattggtgttccagcagcgggcggaggggtcctgcccggcatctgggcgcgctgggcccagagcccgggaggaggcagacggaggcggcgggtcagcggcgggccagccccggtgggcttccgctcccctccgccggcccggtccggcccgccgcggaggatgcctggaggttgacgtgaatggcctgtggctgggaagcccccaggcgccctgcctagcccgggggcggggccgcctagccgccggccccggtggcgtgagggctggggcgggggccggggacctcgcggggagggagcgggagggaaagcggcccccgcggcccttcaattggccgcaccgcccctcggcgcagaggcgggaggaggcggccctccattggtcgggcccggcggccaatcctcgaaggcccaggcggaggcgggggcggcctgtggggaaccgaggtgcgggcggcgagcgaggcagccgggtgcttcgcagcggagctcgaggctctgtagcacccagttggacccagtcgcccaggcaccgcccgcgccccgcggccgtctcctgcgcctcccagaggagggagttcgagcatcccccgcggcggccactcctcggggccaggagcggggaagcgaag

SEQ ID NO: 2023 - DNA, 2300 bp, Homo sapien
ttttcttcctctttttaagtttcttgtgatcacccaggagctaaaaagttattttgtttctatgttaacttttgggaggggccctttgttttgaatccgttaattatcttcacaatatctaatcatatttcattttcagcttattataaatgaaagtctagattagtgtcatctgatagaactttctgcaatgataaaaatgttctattctatatgatccaaaatggtagctactagccacatgtggctactaagcattagaaatgaggctagtgcaaccgagggaccaaattttaaattttacttagttttaattaatttaaattgaaatacacgtagccacatatggctagtggctactatactggacagtgcaggtctagattgttaattatacttggctaatatgggttcttccagcaaatgtattgatcactattgatttcttcagcaagaccccaccttttcctagtctggtgagctccatggaaggtacaaaagatggctgagctgaagcgtagaaaaagatcagtagggaaacccccccaaccttagtaaggcttggcaggaaggtgtctgtctctgcctctttgtctttctgtccttcaccaccctcctatacatacacacacaaacacacacacacacacacacacacacacacacacacacacacacacacgtggtggtacccagtggtggccagcagaaatgttcacgctatctccctcaacagctcatttgcatctctgcagagctcttcccagcttcagattcatgagtagaggctcttttaggaatggagcagaattttctctctaacagtggctgcattgccccagtaggcgactgttagtaaaaggaagttgaacagagatgcttagtcctacattgcacttcgaaaatacaaaataatggcactataaaaatccaaaatctggctgggcacagtggctcacgcctgtaatcccagcactttggaaggctgaggtgggcagatcacgaggtcaggagatcgagaccatcctggccaacatggtgaaaccctgtctctattaaaaaaaaaaaaaaatagccagacatgatagtaggcacctgtactcccagctactcaggaggctgaggcaggagaatcgcttgaacctgggaggtggagactacagtgagctgagatcacacgactgcactccagcctgggtgacaaagtgagactctgtttaaaaaaaaaacaacaaataaataaaaataaaaatccaaaatatttttatagttaagactattaatgtgaagcaaacccaacttacttggttctaagtgttgtgatgcacagtatataactactgtccccctaaaattcatgtccacctggaatctatgaatgtgaccttatttagaaataagagcactgcagatatgatcaagttaagatgaggtccttctgaattagagtgggccctaaatccaaccggtatcctcataaaaaaggcatgtgaagacagagatacagaaaaggtcatatgatggtggaagccgagattagagtgacgtagctgcaagctaaggaaggccaagcattgctggccaccactagaagccaggaggaagcaaggagggattcttcttcagaacctccggagggagtatggccccatgacaccttgatttcagacttctacccttcagagctatgagaaaatacatttctgttattttaagccacccagtttatgggtggcaaaaacccagttttgttacagcaaccctaagaaactaatacagtattgattcctaaaacaaaaacgaaatcactttggcttattttccacagaggaaaaaaagtaccacacattttgctatagctgaatgatagcaagcagatttatataccaatcttgtttgacgtggattttttgagaatacattttagtagtatgttagttggggataaggtttacaaatgaccaaaagttaacacaaacagccttgagagagagagagagagagagtgtgcgtatgtcacaaaggtgggaacaaagggagtggggtagggttctaggagtgggtcctgatttcccaagaaaagaaccaccaatccaggaccaacacagctatagcagggcctcttgagccactgaaggcagcaccagacactggcttctcctctcttcctgtacattatcttcattcttctatctatagactacctttatcttctaagtgaaaacatgactgtcagcagctttcaagctttatcatttacagagcttgcctgaagacagactgattccattctctaggtc

SEQ ID NO: 2024 - DNA, 2300 bp, Homo sapien
attctgggaccactagtgtcttaagtatcaggtaagactgtttcaggttgaagacattattaggaatggcagagtgggcatatacaagtaaatgatactccttgtattatccttgagctgtttttcttactacaccaaagaccctacctctggacttccaactacgcatttgtaagcccagagaattctgattccattaaaatttgagagacactgacttctaagtccacaactatgaactttctccacccttactagctaagtagacttaggcaaattatttaacttttatggaatctacttctttgtctgtaaaaagggaactaatatccactttaaggtcttactgcgagaatgtatagttaagaagatttgatggagccgggcgcagtggctcatgcctgtaatcccagcactttgggaggtagaggcgggcagatcacctgaggttaggagttcgagaccagcctggccaacatggtgaaactctgtctctactaaaaaaaaaaaaaaaaaaaatagccaggcatggtggtgcatgcctgtagtcccagctacttgggaggctgaggcaggagaatcgcttgaacctgggaggtgggggttgcagtgagccaagattgtgccactgcactccagccaagcgacagagtgagactctgtctcaaaaaaaaaaaaaaagaaaagaaaagaaaagaaagaagatttgatggaagacaatttggaaagtgttgtaaggtccacggactctactcacaaagtctcccaaacttgcttgctgataggaatggacacgctggttacataagctaatcccaggtgcccgatccccggaaattctgattcagtgtttcctaatggaccctgggagtctgcacctttaataacacattctaggctccaggtaagtgtggtgatcaggcaagtttgaatttagcaaaggaatacaggatgcagtactcctgtccagcaggactcagatttctggtttctgattctagatctgacgctattccacttgggcaagcagttgcacctttctgaacctttttactcatctgtatacctgttcaatataacctacaggtaggtctatggtggaccgaaggcaaattatatttggggtgaaggggctcctgatcttagtattttatgttgtcgtaatgtggattaattagacataattaatttattaacaattaattaattagacataagcaaaattgagattgaagggggtgttggcagatcatcattttggctgaggacatgagaaacacactggaaatgctttgtgataaaattaactgaatattaattgtaggactgtgccttgtctatcctgctacctagagccactgagctttgcaatcctcttaggagtgtggcttacctttaggtggtcaccctcaactactctggtcacactgagagctgtgaaaacctcgagaaaagttaaaaacatacatgttgggagacagggggtttggatgagggccctaaattcgatgtttaagcctagggtccttactggcgaacactttcagtaatgtctgtgtgcaacagaaacatttctcttggcattaaaaaaaaaaaaagaaagaaagaaaggatgtattcccttagcttcaggtggcattcacgaagttgacagagccagaacacctcctaactggggagtttcgggacctttagggcgcagagactgcctgacctcgtcgtgggcgtaaatcaagcttccccagcgcttaactttacaattttcagcttacgcttggctgcagctgcgcacaatccgcgcagaagcaggggttccgctgacaaacgtgaacgtacagaacgtagaaaccttttaacgctaatatgcagtttccctgtatggctgttgtgcattattaatctaggtattgcgtatttagtttaggaaacacgaatactacatgataaatgaggtaaaatggattgtgactgggacctcagcttctccgtcgcctccactcctcccagctcaggaaagaccagcccaccaagacgtgcgtcctccgcgtttgagtcgcttcggcacccgtagttgtgaactttgacagcggctggtccccggaagttggacgcatgcgccgtttctctgcatggtgtgcgttctcgttctagctgcggccgcaggagctgtggcggttttcctaatcctgcgaatatgggtagtgcttcgttccatggacgttacgccccgggagtctctcagtatcttggtagtggctgggtccggtaagtatcgaggaggcgactgtcggacttgggtt

SEQ ID NO: 2025 - DNA, 2300 bp, Homo sapien
gaactctcaacctcaggtgatctgcccgcctcagcctcccaaagtgctgggattacaggcgtgagccactgcacccagccatgaactggatatttttaaagagattaagctaccctgaatttttcaggaaaaaatacagttgatgtattcttctacctcctaaggtcactgagttttaattagcttaaaacttgcaacattcaactactatttactgaattcctctcatagctcaggccttgtccttgatatattaacttatatgttctgtacaatctcaaaaacaatcttgcagttttcatgaggcatttgtagaggcctaatatgaaggaatatagtgggacatagagtatagtggatttctgtgggtttacctggctttggttactgctgttggtgttagagaattatgcatatcaaagataatgatggtgcatttatcaggaaagaacagagctactatcagccaccagagactagcatgggagagtttctgtaggaggtagtgttgatacagactcttgagaggacactgtgaaattggtattttctgggctgacttcacagatgttcacatataaccatcctgcccacagagagttatgaaatagctatgtgagtgcacaaggtagctattgcgcaaaccaaagttgtcaggtactgcacatattgtgaagggactatgatgggacaccgtgtggttcaaagagcactggagccctggtacatcctgagagtcttggggagaaaaaggggaacacgcatttgggggcctgaaagatctttctctctgcttgactgcagggcaggtttctgtccctccctgttctgtggtatagattttgtcttttccacatcagtccaggtcttcagagtcactatgaattattattaccattttaaagatgaagaaattgagcctcagtgaggttcagttagctaaaggcacacaactctaataaactgacagaattccaggttctgatttaaattctattgccctctcttgaaaataaacatggacagcttatatgagcttttgtgtatatattttctggtctaaatctgcggcagatatgtgtgtctttctgcgcatgtatatagtagatcaaatatgttagctctattgacatttcttagaaataaatatcctgttatcaatgatagtgtttacaaattatttatttagaacttacctcttttcaagaaaaggccttgtgattgctctctgcgaattataatgcatgagtatacctctttgttattttgttttgtttcagacaattatctctggttgatgcagatcacttggaggcttttggggctgtatataacaggtcagaacatctatttaatgtcaaactttatctactaggcaacttggaattctcagccagcaccaaatattcaaatccaacttccacaccccgacaacagaggggttccgggtgtaggtgtagtgctggtgcacccatgagggtgtttttcaggaattctggaggtggtgctggagagaacacgcttcttctacacgcgccccctaccagtttggtatgcacctgcagccccaaagaagaactggcgggactcgagtgtggccgtgtcagacgtggcaagaaaaaccagcagttgccttttcatctcttttctgatgatctaaccatgaagtccccagtatttgagcatttaaggcagaatgtaaattcataatttaagaagattttttgttacgtggctagcccaggtactgaccgctgcgggggcgggctcacacagttcccccgctggcaagttttgtgacttgctttggaaaacccgggaattgcaccctctgcccttggcaaggtgtgagcttccaggatctctccgctgcgacttcgggtgttagggtttttgggctctttccgggacccaagttccagggcaagaaggtctgctcggcggcccgcctcggggccccgcccactttggccagggtcggagccgcccggagcgggagccggagcccgagcggccgcggcccctttaaggagcagctctgcggtaacccgagcccgcagtccgggcgggcgcgacggccgccgcggtagctggagcctccgcgactgcacctccaagcggcccggaacccgcggcttccctggctcccgtgagcatctcaccgggcggcactggccagcgccagccctcgggccggcccggatgagcagactcctgtagacacccgccgccctctcccggctcggcgcagccgccgcccgcgcgcgactcgccccgggacccggcacaggtgacgccgt

SEQ ID NO: 2026 - DNA, 2300 bp, Homo sapien
aaaccttagaaaagagaaggccgggcacggtggctcatgcctgtaatcccagcactttgggaggccaaggtgggtcgatcactgaggtcaggagttcgagactagcttggccaacatggtgaaacctcatctctactaaaaatacaaaaaaaagtagctgggcgtggtggttggcgcctgtaatcccagctactcgggaggctgaggcaggagaatcgcttgaacccgagagacggaggttgcagtgagctgatattgtgccactgcactccagcctgggcgacagagcaagactctgtctcaaaaaaaaaaaaaagagagaaactaaaattaaaatttagttttcatcccaagatgtcttttctgcctttcttttgccttatttacaagcatggataaaaatcttaaaggtttaaataaaaatgatcaatataatggtgaatcttttgagaaatctcttaactgcattggtattttttctctgtgaaagatgactatgataatctggtacaaatggttttatgtcaccaattttgctgcaagaatgggaactgcttttaaatctgtaaatagctcttaacatttgttgtatgcactcttttcttactatggctgtcaacacttgtgtagggtttaatttctaaattgttggcatgttctttttctcaggctattcagaagtaacaacatttttcatttcagacatgcaatcacctattaatgatgaaatattttaccactttgggaatatttaattagtttagtcatggagaatacttcccacattttaagattttttcaaatatcactgtcatttctattttagcattttatcaaattattgcttttttattttataataaggcttaagacagattatagacctccttaagagatgagtttcttcttctaaaaatgcatgttgatagaggactatttaggctaatcggaggaatcattaagaaagaaagttttaacactgtttatccctatctgctttccttgcactttttctgtgaaaaatattttctgtttgcaaaatcttccctgagttctgaacccagcaccatcagtaccaaagtcttatgcaatatgtatttattatgctcctgaaataggcctcttcttgatgagacccaaactattacaaaaatatcagtattcatattttactcacaattcatacccgtgcttacttagttggcattttagtgctttgaatttctatcttaaagcacagaaaaaaaaaggtaatttaatccaagtattctatcatcaaaattattgtctgattatatgaagataaatgactggcgactctggttgtgtgtgtatgtgttttgcttttactttaattcttgcaatccaaatatagaattatatatttatctattattgcctttattctttaagcacttgagtttaatgattattcttacctgagaaaggaagaaatttaattctaccagtgatgaatacttgaaattaattgaactcataccaaaagatgtaatccagtttctcagtttgaaggagaacgtttgactcactttcattgttcatgctagctgaatataatcaagacttttgatttgatttgcttttattattcaatgcagatagagcctgataagttttagaacatttaaagaagattgaaatctcagtcagtaactaaatgataaaatgagattgattggcttatactaggtacatttatttttgaaagaattaatgtaaaataatagttatttttaaagcagctaatattacactgataatttgttgctaaatttagtgctgtccacatcataggtgcttaaatatgtactggttaactagaggggggtaggaaagcaagcggttttatcttgttcttacctttttgcaggaaaagtggctttaaaaaaatttatataataaaactattttggaaattcattcttttagaaagagaccttgagataaatattttttgactctggatatttctatagttctgaacacagattttaaacccactatcaaaatgaaaacaatataaagctatattagtgagtctccatgtagcagtttgtttttatagttactgtttcatgcttaaaacttcattcttactttcattaatgttacccttcactggtatagccactcactaaataagtatatttaaaacatcaaaattttgaactaaagtttgtgattctcttattcagcaatccttatcttatgctggctgcatgagttaattcaacatccagattaaatatcctgaagtaggttctatatatttcctcata

SEQ ID NO: 2027 - DNA, 2300 bp, Homo sapien
agatttttttttgctcttgagacggagtctcgcttggttgcctaggctggagtggtgcaaaggtgcgatctcggctcactgcaacctccgcctcccgggttcaagcgattctcctgcctcagcctcctgagtagctgggatgataggtgcttgccaccacgcccagctaaattttgtatttttagtagagacagcatttcaccatgttggtcaggctggtcccgaactcctgacctcaggtgatccacccgcctcggcctcccaaagtgctgggcttacaggcatgagccactgcgcccagcctattttatagattattttcaataaataagtcaaaaaccaaattgtttgacttttcatagtaacactggatttcgaattaaaataacttagtaatattttaaattaaaaacgtattcttttgttcaatctctttagcagttaattatgaacctactgaactgctggaacgtctgttattttggaaataaaggagttttttttttcttcaagccaattggccatatcagagataactgcatttaaataagccttcatcttcccaattatgtgctcctaattactcggggtcactgaaatcccatggcatcttctgaaaagcattttccctgcagtccatcttgttaggtttcctttctgttccgggaagccagtatcttttcctttatcagattccttttttaccaacagcgggaatggtaatggtgaatggatgcagggttttaaaatcagccaactttgttctgacttccgtaggtcagtgactggagtcactgcctaacaacctaaattcccagatttatctcatgaaatgtgatttctcatacaaacaaaagttgtgagaactccatgagcaagaccagctgcttgtggggactgccaaattttaaactgttatttgaacagcaaaaagaccaggcaaacatccgagagacagacctaactgcagataagtcttgtaatcttgttcactatagtcaaaacagaatggattgcttattctgttaccctattggtattgctcacattttaaaatttaggtgctgggctcaagaatgataattttattattaagcttcaagagtcacattgtattgtatgcattgaatatcacgaaatcgaaaacactgaaaagctagcgtttacattcttggatcatacccccaaaggccaaggattcccactggccgcttgcagcagggctgtctcctgtgaaggcaagagacaaacgaggagcgttatgacactttgctcccaggactttggcgcacagttcccatgagtccaggtccgtccagtcaacatcctgaagccaggactggcaggtcctgaccctccctttttgcacccgtaaggggaagggcccgggaatctggaccttgtctagagtcccggcgccagtaccagttcggagggcatcctggaggttgttactaacccgagcctcttccaggcttcccaggcaccagggttgctaacagctccacgggggcgaataattttgtttattttgttaactgtggttatctccaacactcagttcagacctgagccgggcaaagtctcaccttgtctcctggtcacttccctgcttgtttgtttcttcctaactcccaagtgtctttcgcccagttcatccccacctcagcagcccaaggctcggcggggacggtcggggttcgaagcctgcagctaaacttagagggttcaggctttgctgggaggcctccctgtgctcagaagagccgggggtaagctgggcggtcgccttgggtgcagacagaggcgcagggcctcggcctccaagaaaattcccaaaccgagaggctgagcttcgcgtctgtagttactgagcaggagcttctgggcggaacttctaagggccccgcccgccccgtctgccctgaccctcgcccggactcgcctcgcccacgtcccgtttcgcttcgccccagctccgtctcgccccgcccccgtcccgcccggttgcggaggcgcggggcgcccccgggtggccgcgggcagtgctgctcctggccggtggaggcggcggctgcggcagcggaaggggaagcgctgaggcggtggggcccacagccatggcggagcctgtgcaggaggagctctcggtcctggccgcgattttctgcaggccccacgagtgggaggtgctgagccgctcaggtgactacccgcgcgcgggagggacagggcgccctcaggggccacccgcgttcgctttgcgtctcctccccaccacggagcctgggcaccccgcc

SEQ ID NO: 2028 - DNA, 2300 bp, Homo sapien
aagtgctgggattacaggcatgagccacgcgccaggcctagactaccttcttaaaggttaaccaatttatggtcagaaagccaattttaatggtagctacaatataacattagaacgataaatctcatgccccaaacatgtacataatgtatctgaaagctaagtgaaaactgagtcactttctcatacatggcagtgttttttcttttttttttattcaatagaagccacatacagggacagtaagtttcacctatcatcaaaaaatagtcaaaagaacctctctacactgtaagctcctagaggccatgggtagcggtgtctctgaaaccctgacaaagtctgtaggcagcagggattcaataaatgtgggctaaatgactaataaagccctcaagagcttgtttaaaaaaaagtatcagaaggccaggcacctgtggctcacgcctgtaatcccagcaccttgggaggccgagacgcgcggatcacgaggtcaggagattgagaccagcctggccaacatggtgaaaccccgtctctactaaaaatacaaaaaattagccagtcatggtggcaggcgcctgtagtgccagctactcgggaggctgaggcaggagaatggtgtgaacccaggaggtggagcttgcagtgagccgagatcgcgccactgcactccagcctgggggacagaacaagactctgtctcaaaaaaaaaaaaaaaaaaaaaaaaaggccgggcgcagtggctcacgcctgtaatcccagcactttcggaggccgaggcgggcggaccacgaggtccggagatcgagaccatcctggctaacacggtgaaaccctgtctctactaaaaaaaaaaatacaaaaaattagccgggcgtggtggtgggcgcctgtagtcccagctactcgggaggctgaggcaggagaatggcgtgaacccgggaggcggaggttgcagtgacccgagatcgcgccactgcactccagcctaggcgacaaagcaagactccgtcttaaaaaataaaaaataaataaaataaaataaataaaattcagccaggcatggtggcacgcgcctgtgatcccagctactcgggaggcggaggctgcagtgagtccagatggatccactgcactccagccagggcaacaagagagactccacctaaaaaaaaaaaagtatcagaaaagcaatcaacttggaaatagaatgcagataaagttgaggttgagcactggataaatgaaaaagttcagtcaacaaacatttacctactacctaccaggtgcctggagtcattaccaaacagaccctgccctcctgcaacttaagacctacaaatacccgtgtagagttagaaccggggagtgctctcgggggggcctagggcatagtgcttaggaaggacacagaacaacgagggggcgtcagcacaggcttctttatagggtgagatctgaggggtgggaggctgggggagggcctgggggtgcgcacgcaggggcccccggctccgggagcgggaccggcggcagaggccccagtgggccgcgccgctctcttagtgtttctggggtcgcctcacactcccgcccgctgcgacaccactccggcctccgggcgtgtcattccatcattcaactaacccggtccccatacgtgggcccaggcggggtgcccaggctccgtggtggggaggagacgcaaagcgaacgcgggtggcccctgagggcgccctgtccctcccgcgcgcgggtagtcacctgagcggctcagcacctcccactcgtggggcctgcagaaaatcgcggccaggaccgagagctcctcctgcacaggctccgccatggctgtgggccccaccgcctcagcgcttccccttccgctgccgcagccgccgcctccaccggccaggagcagcactgcccgcggccacccgggggcgccccgcgcctccgcaaccgggcgggacgggggcggggcgagacggagctggggcgaagcgaaacgggacgtgggcgaggcgagtccgggcgagggtcagggcagacggggcgggcggggcccttagaagttccgcccagaagctcctgctcagtaactacagacgcgaagctcagcctctcggtttgggaattttcttggaggccgaggccctgcgcctctgtctgcacccaaggcgaccgcccagcttacccccggctcttctgagcacagggaggcctcccagcaaagcctgaaccctctaagtttagctgcaggcttcgaaccccgaccgtccccgccgagccttggg

SEQ ID NO: 2029 - DNA, 2300 bp, Homo sapien
ccctcccaggagaagaatcccagtgcactgtctatgacaatgtattttcaatattttttataacaaccacaaattctgtttttaaaaaacaattccattcttcaatatgctggagggcattcatagttttctctcccaaacactgaagggagaaaattctcccaccttagccctttggtcttttctctttcaatcagactttagcaggttcaagttgagactgctaaaaggagcctctgttcactcccctgtcaaaccaaacctttctgcacagccctttggttttgctggatgttgttataagacccagtccttacaagcaacacagtattttcagcctgagccatccacaatttgattcctcacccaaaatgtagtatactgtaagagacatatcatggctataagattaatgatcgccatagggcccactcatacatctcacagggcctacactatgtgtcacttagcagtatgatgtaacctggcctggggagttccaactctggcccaaagattacccagtctctatgacaacggattgccctagagacaaggccacctcagtacagatgcaactttcatgaaccttaaaacaaagcttacccttgaaagaacagtttaaactccctttatgaaataaatacctggtaactggcccagagagaatacaggtataagaaagggggaaggatcccccaaactctgagaatggtatccaaaggaaaacctccccttcagggggtcatctgacccctgactatatctggtccatgccaccataagagtgctccagaataaactgcctgaacaccagatggtgcctgactcttatctttgatgcaaatatgaccaaataaggaaaagtcacccccggggaagctggttaaccagcccacctgacagccccaaacaccacataaaactgattctttgtgtgtgaattgcgactttagagtgatacccttaaaccccaaactcctgtatctgctaatatacataattcctccctggtttagttctgacccactggaagagtgggcaatagattcctcactgacattgccaacagcaaaaaggctatgaaacacaaaagataacaagttacagggaagaacaacagagctgtgcaaaccactctgctgtgatagttgcattttaaaatcatatcaagttatttagcaaatagaatccacactctcccatgatctcaaaacactaaataactaattaatattttcattgctctggccttcaacaagtttgtgagagttttgccagatcaagtattcagaatctattcactttatagattttttagtgaaattagtctttatcctggtctgaagaatcctaaaagttggggaaaatggtgggatatttttcttctttgtttctaacacataatctttgtacataacaattttttaaaaacaattttaagccaagtaaatattatgagcacacttcccaagtccagaacatttcacattcattcatttacaagatatttcttgagcacctgctttctgtcaggaatggtactaggctctatcctggaaactgtaaaatacacataggatgaatttttaaatttctgcctttttgaatgtgttactggccatctttgccttgcaaaaccgtctcttttattagcataaagtctttgtagagattgctttcctgtcttatttatttgcaaaattagaactttgtgagagcctgcacttctactaaggtttctattagacttgggtttttaagaattatgatcttttatggcagcacaattgagtcccaaggcctaatttttctacagctgtttcaattacaacaaaaactttaatataacaaaaagcatgccaaagtcctgctgatggcagatctagaggcagtgttcagttgacctctaaatgccttcctgctggctgtgaccaggagccacaggagctggtagatctccatggcaggttttgcagctgtggtccctcccccactgtgatggtcaatactgagtgtcaacttgattggattgaaggattcgaagtactgttcctgggtgtgtctgtgagggtgctgccaaagagattaacatttgagtcagcggactacaagaagcagagccaccctcaatctgggtagacaccatctaatcagctaccagcaaggctagaataaaacaggcaggagaagatggaagagcagacttgctgagacttctggccttcatctttctcctgtgctaggtgcttcctgccctcgaacatcagactccaagttcttcagctttcaaaatcttg

SEQ ID NO: 2030 - DNA, 2300 bp, Homo sapien
aagtggaactagaggccaggtctaggtaaaagtaaaatgagacacattatcagtaagatggcatctgaaacacattatcaaagagcactatccccatctcctcaagccttattgctttcttgatgtctgaaccacacagtgtcactctttacatcttgtgctgggttataattgctcatattagactgtaagctctttgagggcagagagtctgttctttgaagtaacaatccctggtgttcactctacctagttgtactgtggctgattatagttggtgagatcaaagtgtcatagacactaaacaatgaaaatgccattaaatgaatataaaacttctagaagatacctgctgccaacacaaattagattagttggcataaaaatctgctctggatcaatcacttgttttaactgtttgggtaatattgctgtcatgttataaattgctgatataaatttttctcaagtttcataatattcagaaagtgactctttaaaaagtttcaacgtgtcttttactttgaaatcatagtcttttgcacttgtattagtctttgtttgcttttctctggtctcagcaaaatgcttgtgtaactgtctgaccttttcacaaattatggcagtgcttaacagtacatttttctgggcttggtcttctttccatatatagagaactcagagctgtcttgcatgtgcccacttgggctacagaagtagggacagtcattgctctgggtgtttataatgaagcaggtggggactgaatggatgatgggcacatagaaagataattgattaaaactcacttatacaaagacaaaatcactatattttaaatccaaagttggccaaaccactgtagtgattactgcatctccccttaatagttaacaactacaataataacagcaacaacaacaacaaagagctgctgtcattcattgactgcttactctgtgtcagatgctgttcttagcactctccacggctaactcactaaatcttcatgacccaagtaactatgactttactcattttacagataagataactaatacacagagagattaaatttctcaggtccctgagttagtaagtggcaaatctggaattcaaattccaaagcagtccagttttagaagcttctcattactattatatgctgctgcttctaatacaaaatgattgggctttaagtacttatctattcagtggcttacacattatcaacaagaacagtcattagtgaaatcaaagaatttcaaagccagaagaaaccctagggagcaacaagttggtcagatctctccagttttcagatgagaagttggaggcccagagagatggaagagcagaattatagatatggaaatggacagagccaggagttgacttcaggtcttctgcctcttaggatattttctttttaaatgacattaaatattctttcctttgttttcatcatgtactatcttgtataaaaggtagaaatttatactattcctatttttattctataattgtgcaaaaaaaagatcagggatgtaatatttgttgagcaactgttatgcgctggctccatagtaattccgggttgcaaatgctactgtcctttttatccaactgaggaagccaaggctcagagaggttaaaaacttgcctgaatcctagggctagtaagtgttggaactccatttgaattcttactcattggactttgaaaccaacagtctttgtactccctggactgtccatggttaaggccttcaaagagtacagacttcattaaccatatatatttagctctagctatttactcatttttctactgagagacatgctctcctccaatgttgcaaatatgcctggtacatctattaatgatatagtttattaaaagggaggttttatggatctctgccttttggtgaaaaaattttctggcagagtgcctcctgaaaaaaaaaaaatctccattactgagaagccctttcatttgtaattgcttcttaggtaagactattagatattcctccctagctgctgtagctgggctataaattgtctgcactttgttttgttgggattttgtggtttaattgttccaagtcacttacatggagctacatttacagacacaaagaggagctggactgatgtttagctgtcttgcaccagcttgtatttttggattagctagtatcccaggaaaagggtttgtatccaagataatccttcctctggactggttttctttctgtgttttgaccctcccagaagcagaagagtcatcttgc

SEQ ID NO: 2031 - DNA, 2300 bp, Homo sapien
attaagtgccacagggttttggtgtacagattatttaatcactcatgtaatgagtgtagtacccaacaggtagtttttcaatcctctccctcctcctaccctccaccctcaaataggccctagtgtctgtttttccctactttgtgtccatatgtactcagtgtttagctcccacttgtaagtgagaacatgtggtatttggttttctgttcctgcgttggtttgcttaggatcatggcctgcagatccatccatgttagtgaccacatttcaagggtgcttttacgttctttcacattagggaacactatcatgcctccagctgaccaagagctgagtcctcttggtccaggtgcacttccatgaaagtgcctgaattgttcttttgcttaggactttataagctccttaaaagttcatgggagaggaagtcaagaccaccaaggaaagaaaccatacacatccaaagtgaactgaagcttaagtatatttttaaaaattcacaccatctaaaggcatgagtgtggtgtgagggctccaatctcttttcactaggagattcttgaaatcctaaatcaaaaatggtttgggattggtgatatccagttgtattctagagatcttccttcatcctgacttagtgtttctgaacagaattattcacttctccagtccaagctggtttgtttgtttgttccaaatcttaacatctgttttctatgtggttgattaaaaggttagaattcaaggcaggcgtattttctgcctcaaccacccataatttaaccactatacagctatttttcttgctatttctgtttctaaatactaccacacatgatttttttgggacttctttttgtgacccctctatgcgaggaagttagatttgtttatagagctctagggcttgaggtagaaaaaaattatctccaggactctttcctgcctggaagaaccttcttcagccactttcacatcccttctgcttgtctgcatctcatccattacctgggactcctccactgcccagtcctgaggcagtgctctgggttcttttccaggagtactgcttttggtcattagctgactgctgctcactggatggctatgtgaagagtctctttacactgcagggctggttggaaagtcatggacccattgaaggcagtgtgaactcactgtcttgtgtttctgaacagaagagcaaggcatatctggctctggtagaactggaggggacagatgtctctccttgttctacctgtttaaagttaacaaagagtaatagtctgggaaagaaacctgaaaaaaaaaaaaaaaaaaaaacaaaagaaaaagaaaagaaaggaaaagaagaaaaaagtgagggagaggccaaaaaagagcagccagaccttctgcccttgcttcaataatatctgatccatcatgatcgttcctgtgtactggagttctgaatgaggtctccattgaccaaaggagactgctgcaaagataaaaaactgaagggcacttatcttatccagtcccttcattgcaaaagatgagtaaaatgtgttataggaaggttatgaatagctagggaatatcagaaacacacatattgtcttttccctttattaatagattgtggggtataatgctgatctgctactattagatacattgagatcagatataatctgcatccatacagtctttccagaaaatattattcccatcctttggcaggggtgctcagtgcacttgagtcagatgagaaacattctttgggaataatagagttcttctcccttagaaatgtttcatgtacttcagagttgctgccatatggttcccataaaggttctgccaaaattcccgtggttctcacaagagctcctacctcctctgttcttttaatctcctgctgcgggtggcagacatgggagagacaggcaagctgcaaagggaagtcgacgaaataaaattaaagccctacaatcgtgttcgtgtcaatgtagatggggtgcccccctcggtttgctcacagaggtgggtgtgagatcctacaggacggtctggaagacatcccatggaaggcactttattttgcccagaagctggaggaaaagcagaaggcaagtgttgtctcttagaaggcctgggcggggggtagggggatggtaaaggtttaaggagaagaagtctttaggaatttttacttcacagaaaaaagagaatgatacctagaggcttgtctgaatttgtgaaacaatgtaacaacagaaagaggcaatgtttagaaaggctacccc

SEQ ID NO: 2032 - DNA, 2300 bp, Homo sapien
aggagaagaagtctttaggaatttttacttcacagaaaaaagagaatgatacctagaggcttgtctgaatttgtgaaacaatgtaacaacagaaagaggcaatgtttagaaaggctacccctcctgattatgtgttctggcaggcagggcagaaacagtctcggtgcccatgtgaggactggaactggtttcttttctcctttacatgattgttctgagtcccttctgtttcttggtgagctatattgtggtctctctcccaatcccccaccctaaattctatgtacgtaagtgattgacaactttcttctttagaaaatcgcaaatttctcttgaaggtaaatggcagcgttacaagatacactcgtagagtctgtagttgtggaacatatgctcctgcttgctaatttctgactgcacattttgaaatagattctttgagattaatgaccaattattagctctgacgtgatgcttgctaagttggatgtggattcatttagtaaaccttgtgtgtgcatttgtttttttatgtttagcaactgcttacatggatcacctgtttttgttttgctatgacttcaaagtaggtaaggcaaaaagagacttttggcccctgaaactcattccaaaaattatactgaagaagtgagatctctaggtaggtcttgctgagtttggcaagcccaggggggcttatattttgatgtcatgtcacttctttcccaattgtcctgttgtttgactcatctagaggagatttagcacacatgttggagagcagtgaggtgaaataaaggtcactcaggaatagcatcctcacaggtcctcattctagccagggtccatctgtataagctctttgggtgatccctccccacctccgtaaatgtttgcctctcatgttgcaggtagtcatggggcttttgcttgatttgactgagacagtgaattgatttcactcccccatttccctctccttctaccctatttgaattgtctctgcatgcttgaagatgaggtaattaaatatatctttgaaggatatagaaaacaacaccaccctcctccttgccttcttctggggagtgcaatccggtaaactaccaggttgtcttgtcaaatgagttattgtttttcaaaatgtagcctgaatggcatcctttataattaaggcttctggctttcagtttaaagtgatatttgccagtaaaagcctgccaaaaaataaataaataaaagcaggcttaccgttaaatattgatttaaacttggaaactggctccaaattttgttatactagtcttgatcttcacggcctctgggcatctgtttcaatttggtcaaattgaaatggggagggacagtgccaggctaacagcaaggtgatccaatatagtaggatgagttgtatttgatgaaaaagagccaggcaaagtcatctacaggtcctggggataggtgaactggactcggataaaataaaagctgatgggcatcttaacctgtcccttgggctgacctgagccagtgattatatttttgaaatgtaaaaaaacattgggttatctttggaggacagaattttttttttctgcctttctgtgtttcctgttatatagaagcatttcctgcaactggtctggatgggcatttttccttatgatccttccacagtactgggagggatatttaaaaagctcaaatgcaaaacatttccctaggaaccaaattcctcaatccccactttgagtttttttcctatgtaggaaaaggataaggttctcagaagagttttctcttcctgagtatatatgtttgagattgagaagtgttcttatctatctctatctctcataagagaaggcaaacaggaagggggagagttaaaagttcctgaaaaaagggcccttgatgaaactgaactctgtgggtgcaaagtgcctgagatctattagttttggcaaccccagttattccagtgtctctcatcatctgtaaagttaacaagggctgataagagatgatgagacggggtactggtttgtatttccagactcataaatatttcacaataccatttttttttttttacaatcagatacattagtttgccaagtatgctgctggatgttcattcagcactagtgtttaacaaaagcccggttttaaaatcagaggatatgagttgggggggccttgaggtaagcatcacttgttattgtacctggctttcaaatgcatgtcctaatttgagagagggagttggtatttgacctctagaaactgctgctgtctac

SEQ ID NO: 2033 - DNA, 2300 bp, Homo sapien
gtgagacaaggcagaaatggcttcccaggagacccagagagtccacaggacgtttcccactgcttcgttaaccctgtatttcccttggctctctaaattgactcaggtccaggtaaggccagaatcttttcccatgatctagaccttcaggttccccagtgagggtgtgtgttcagggatggacaattcctctttcctatttccacagcttgggcacccacaatatttgagatgtctcctgggtcctgcaggagcaatctacttccttcatagggtctgtgagttctctcagcttttctggtttatccctgcagtagttctggagcaaaagttcatgatgtgagtttccacacactgctctgtttgcatgagagctgcagtctagtcctgcctcccatccaccataattcctccaaattcccctaactttattatttcattcactgccatattcagtgaaacaagaaatatgcatgttaagatgcatataatttacctacctatttatttttcctgctgaacttttatgtcatgttccaacataaaaatatttctcattttatttatatgtttcttattttggacgtttggatgacagctttcttactcctttaaggctgctataataaataccttagactgggtaatttataacaatggaaatttattgcttatagttctggaggctgggaaatccaggataaaggctccaacagattgggggtactggtgagggcctagtctctgcttcaaagatggcagacaccttcttgctctatcctcacatggtggaaggggagaacaaactccctcaaaccgcttctataagggcacaatccccattcatgagagctttggcctcatgacttattcacctcccaaatgtctatctcttaatgctatcatactggcattcggtttcaatatataaattttgtggggatacaaacattcagaacatatcaggaggtaatgagtttttatgttaccaacaaggttgtgatgagcatccttgtacttgcctctttggacctgtgtctataggtatgctgaatcgtagaatgtggcacccagaactctaagatggctcccacaattccttgtactctagtatacacagcctgcatcaacctctcccctttagtgtgactgagactgtgactataaaggatttcactcccatggttagaatacattataagacaaagatgaaatgagtttcagatgtaattaacatccaaaattagtcgagtttgatttaatcaaaagagacattattctgggtggacctgacttattcaggcaagtacttacaaggaactggacccttcttaaaaaaagagatcagaagcatgagggagattttccttgctggcctttaagaagcaaattacctcattaactgcttatggagggggctgtgtggcaaagacctgagagtggtctctagaagctgagagaggttcttgttcagcaaccaacaagaaaataagaactcagtcatacaactgcaaggaattcagtactgtcaacaaccagttatcttaaaagtgatcttgaaaccttacatctaatctactttctgtcactacagattggattttatttgctataatttgtataatagaactttacaatctatactctttttttctggctgttttcattcagcatagttattttatgactcatctgtgttgcatgtattaatagtttattacttttattgtgtagtagtattctagtttttctgtccttgtgaatatttgatttggtcagtcttttaaattgtaaccatttgatttcagcctggtgagaccctagcagagaatccaaccaacccatactcaaacctctgattcatagaaactgtgagataatatgcttgtgtggttttaaggttatctgtgccccaattctccacaaaggaacttgatgaggcccagatgtttacgtgcatgtgctagggtttggcacacaggagaaaaaccctgaaatcatgagacttagtgctatattgggcagctggtacatgtaccccttctcccactagaaagagagacaaaactttactctgtaaacaaatctcagcagaagggagagaattactctggattgtaagcaaatatctctggaagaaaggggtaagttgtttctgtttattacccttgggatgtaagcaaatggctccaggagagatatatctctaaactgtatccagagcaatttgtgttctctaacttccaaggcatgtttaccattcaatcatgaagtctgggttatacagaaatagaaaaata

SEQ ID NO: 2034 - DNA, 2300 bp, Homo sapien
aaatgtgtttttgtgaacactgtaatttcttctgctgcctaaggacaagcttccctcctcatagaatggtttgtctttgccaagataaagtgagaaccaatcaatcaatatcgatcgagcgaatgtggggaataccaagaattaataccatagttcccgccctttggtagcttgcacattcaattgttgagtgaaaacacatgtatgaaaccacaaatatgtgaaaagtgattattagtggcactaataacagatcctttattttaaggtttaaggtgaagtggttattgtaggaaatttgatatgtggtttttttttttttttttttttttgagacagagtttcgctcttgttgcccaggctggagtgcaatggcgcgatcttgactcaccgcaacctcggcctcccaggtttaagcgattctcctgcctcagcctcccgagtagctgggattacagacatgcaccaccaccccggctaattttgtatttttagaagagacggggtttctccatgttggtcaggctggtcttgaactcccgacctcaggtgatctgcttgcctcggcctcccaaaatgctgggattacaggcgtgagccaccgtgcccggccttttttttttttttttttaacgattgacaatcccataggcaaatcaagaatttgtaaaaatttgggtgctttgaagagttctatagcaaagtgtttggacaagatgctctttaagggtctatccaatttaaaagtaatattatttatggccgggcacggtggctcacgcctgtaatcccaacactttgggaggctgaggagggcagatcacctgaggtcaggagttcgagaccaacctgaccaacatggagaaaccctgtctctactaaaaatacaaagttagctgggcgtggtggcgcgtgcctgtaatcccagctactcgggaggctgaggcaggagaatcgcttgaaccagggaggccgaggttgcagtgagccgagattgcgccattgcacttcagcctgggcaacaagagcgagactgggtctcaaaaaaaaaaattctaaaaattatacacaatatcatttagtatatgaaattccaattagcaaaggataagagctttgcctgaaggagacacagaaaaacccagagtgagtattgagagtaactggagggacacagggagtatttgtcatttttcagaattagaagtgcatttgtccttgtgtgtgttgggggtggaggtgaagggtgcaggagaaggatgggtactggcaaagtcgctactcactgagcaaattttcaagcgggtgcctttcccaattttgttgagcctctgataaaaacacgttgaagtaaaatgtccactatagtatcaagtaaaaattgagaccgtaagatatagcaaagggagtcaatttgcatagcccattttaatgcttctactttctctaaccaatctgaagactcagttgttcccactcccatctccactttccctttcatgcctccaaatgttaaactccaactattgtagcattttaacacatggctccatttgtgtctatttccacctagcgtattgtgaatattttctacaggcgcacactaatcaccaactgaagtgagaatcacattttcctccacttggcttggtactacaggtcttgaagcaaaagcctgtatttcagtctgaggagttctacttgcttgagaaagtactgttgttaccaagtggtctcgttcagtggggtaaagatttttgttttagaggctggagccggtctgcaaataaaagatggcttaggagaaaagctatccaatgttttttccttggcccgcataggttgacggtagccaagctggtacttggcttggagtgaaaagtggaggctgcctgggggcgtcctgcagtcagggcagagagagtgtggagagctgttgggaggtgtcccacccacgcccccacaaggaggggaaaccaggtcgccgcggtctgcagcagaacgccaggttccagaggacggcaggcggagggcggagggagaaaggcgcgcgaaggcgcggaggaggcgtcggctgcggcgcccactccccctagtcccagcgccctgccgctcgcctcccgctgccgggcgccggcgcgctcggctctttccgccgccgccgctgccgcgcggtggcccgtgcgcctcggcaccttcggcaatttccgtcgggccccagccgccattttctcgccgcttgtgtggctcgctggctgcgtggctcggttcttgtgagcgaagctttgtccggttcggca

SEQ ID NO: 2035 - DNA, 2300 bp, Homo sapien
ggtagtgtacatcataattattggaagaagccaaaccaaagtagaatacatctgatatgattccatttatgtaacttggaggaagcgtgagtatggcttctagagtgttgataatatactgttttttatctgggtaattatttcacagagatgtccaatttgtggtattttatggagctttatacttaggttttgtgtccttttgtgtgtgtgtgtaatattttgataagaagttttattaaaatctaggtttgcaagccaacactgctccatgaattataagaaaaaatatatgaagtcattaaaaatgaaatcataaagaaatgtatgaagtaatttgttactgatgtgagagaacatgattgttaagccataaaaggaagatagagaacaatgaatagtattaaataaaagtatgaatagtattgaataaaaatatgaatagtattgaaaaaaatacagactaagtataatatttatatatatatgcttgtagatgtagctagtatctctggaaggatatcgaagataatactgtgaggggttggtaggggaaaatagactgggtgacagagttgcaggggaatttttaatctttaataccacttttataccatgatcatggattcctattttagaaaacattttattatttgaagcagatgttagtgtttttctaagttgtggtagtctatgcttgttattatagataaatacagtaagaacatgttcactaatgaagaagataatattgcaatgagctacttaaaatatttaaatacatttaaacatttgaatagatactgctctataaaactaattttaccaatttacaattattttttcaataatagtatcaagatgtctactaaaataatctatcacatttcaaaatgttgagttttaattagtaagtcattttgactaatacataaatttatagataaaattaagtagcatttaaatgattgtttagatatatatctggactctcaagccgtgtgatctgtggttatataatattttagtaaaatgacttttcttgtttattctcctgagtgtcctaattcttttgtattctctttcattaacctgttgatatagatttttcaaactgtaaacctatgtataggtatttgtggtatttgtcattgttatattttagaactatttgcctttgtatgttttttgaccacagataaggtagaaagaaattatttccttatcatagactgtcatcataataacaggaaagggataatagtaataaaggcagtcttttggagcatttaacataatatttgattgacagatttcctacaaatactgtgtttattcaattttatgggtatattttttcgcattttaaaatctcagaaatttgatgtgtcctgcaatagtctatcttccatagttcaattggcaacatcttattagtcatacataaaacaatagtgcattttataattaatggtgtatttgataccataaaatgtatgggaaatattcttcatattatatcttgaagtttacctgagaattttgtggttttggactagactacacgttggtttctattctaaaaattttggtgtcagaagttaagtgtagtatgaaaaatgtattttctgaatgttcctattttaagattgtattagaaataataagctttatgggagttcttttggataattcagtaacccccttgttgagatttacaacgtacctgttttatggagtgattaatgttaaagttgtattctctaaatttctgtttaaaacattttctgatggtacatgtatttataaaactacatcttgttcttttgagaataaattacatatcatacctttgcatgttcaacattgatcccaaagcctggataatttttttgaatgaaatactagtagaatatttgatttattaaacaggtagtacctggctcatggcaggtgcttaaaaatatctgttgaggggccatttaattttgtttaatctgtgtaagttctaggaacaaagtgaactagtagtgtaacaggttgcaaagtatgtgacaataatgggtatgtttctaaactacataatcttaatttccagcgtgctcaggcagttcttcaagctgtgacagctgtccagacagcaaatactcctcttagtggcaccacagttagcgagagtgcagtgactccagcccagagtccagtacttagaataattattgacaacatgtactaccctgtaacacttgatgttcttcaccaagtaagtttaatctgcataattacctataaattagaga

SEQ ID NO: 2036 - DNA, 2300 bp, Homo sapien
atgctttattttaaaattagggcttcctgttgcagctgttccaggagctctgagtcctttggccattccaaatgctgctgcagcagctgctgcagctgctgctggccgagtgggtatgcctggagtctcagctggtggcaatacagtcctgttggttagcaatttaaatgaagaggttagtaaaataatctctaatgtttattctttaactccatttcatttgtgaaagtttttcatgtttatttcattttgcacttgcctttctttttatgtacattcattagtcaaagtattttctgtatgtttctacttctgaataaaatctacatattgtttaggtaatactttatttccttaaacagtcatgtctctttatatctatatctatatatgtatattttttaacctaacctatttttcctaagaaaaatatggtgaagtactgtagtttggcttatctttttgttgttctcaaaggcaaatgtgatctaatttgcaaatttaactgtaaaacaattttgctctttgccttttctaattatttgcttgttcatttcatgcttatatgtcattgcattttttttaaatcttattttatgtgaactactctaatacatttttctttgaaggttcttccaaagatcttgacgaggcactcttcccgtctttcttagtaattttttctttgcagttattagtcattgtcttctaaaaatattttttaactttattcccccaccccttccttccttaccaccccctccacccagttaaataaaatttattgctaagttattttctttagttgtacattttatgtctggtatattttattttgaatgctatgaaagctggtatgaaatgtgggaagctcagtgtatcagtttatgatgtctaatttgaatatttgtttcatttttaattggcctctgttaatatgaacattagcttattttatccatttaatactattatcattcacagttctgcatgctaaaatgtttgaatcagagtgcctttgtttttattttaagacttttgcctgcatttcataaccagccatgcttatgcagttaaagttcaaagtttaaaattcctatgcatgctttccttccctatgttgagatgaaatgctgtaatttactctttgatatagatgtactttacccatatttgtcttggatgactacattttactcagtttttcttgtacagtacataaaccaaccattttctgaccaaattcctgcatttcctatgtactgacctatattttattttgtttttgttccccaattccttatttttttcttctgcattgctgtttcccttccccatttcatccttttccctgtgtgttcaccttccctttccttgtcttttcccaaatgcccattcccttccctgtcttatcctttattttccttgtccttgtcttcattccctgtctccattccctatgttcatgcttctgtgcttgaacaaatgttcctcggaccaacttgccccaattaaccgccttgaaccatgatccatgaccacctcaccattctgcgggaaccacccttcgttatggatgatctgttcatctccgctcttcctcgactcttctctcttcttgtcttacgctgcttgctcttctctccttctaaagatggttacgccccaaagtctgtttaccctcttcggtatgttattgttagcactatacttttattattgatttgatttttgtttcaccttaattcttatttgtagctagcactttggcttaaagttgaatagtaaatcttttgctatttttctttgctatttaaaactctccatagacacaaaatttgttttaatgcatgctaatttattttgcatggtctttaatttaatatcattcacatagctttgagggtttatcaaaaattattcttttcaaaattcactgttcaaaatcttgatcttctttattcatttgtgagaatgatgagattgagtgatcatgttgatgtctgaatgtttcattgatatgtcagaaagataatctttaggtgacttccacataaaattaattccatttttggattacctctctgtggctccaaaaaaggtgtttatggagatgtgcagcgtgtgaagattttatacaataagaaagacagcgctctaatacagatggctgatggaaaccaatcacaacttggtaagattaaactatgttttatctatacatcttcacttctgctttcaaatgcataatgtgaatgtgcgaataaaaataaactcctttacatcagtaagaaattatt

SEQ ID NO: 2037 - DNA, 2300 bp, Homo sapien
aaggaagcagagaggtgaatacagacaccaacatcatgttctttcaatccttttctactttccccaacctgttcttcagcttccatcatatgagactacacgctgctctctgaactcagtgattttctcaaggcccaccttcccctacctcttccatgaggttaatatcagaaggaaaaaggaatcatattaaacatatttcaaagtaaaggatcaaagctacaggacaagaaataattttgttttgtagaagtgtaaaaggggtattttaagtttggtattaattaaataaggagtttagaacccagaattttgaatttaattagaagttttcatttataaagatttaaaaattgtttattatggcacaaataattacttacggcataaaacttttttctagagattgaccatccttattagaaccttgtctaattcatttttgatttgtccttgaaaagttttggaaaactttgagaggttgaaaatttgaatataaagtaaatgatgcaatttatggtacatttttgtcactgaattataatttgagagatgaaagggatccctttaaaatgcaaatattgaggtcttggaacaactgtctatttggaaaaaaataaagttataactgtacatgatactttagagccaaacaaattttagagaaattgaagtaaaatacaaatattaaaatcctaaaacaactagatggggtaaatactgatataatcttatggtagaaaaggttaacctaagcaaacaaacggcaaaaatcacaaaatgagcctttgctagagatgattacacaaattaaagcttctgtgtgtgtatgtatatgtatatatatacatatatacacacacacagttttatagtataatataaatataaatacacagttttatatttataatacagttatttgttataacagatttaatctctaattttctaaagagataactgcatttataaaaactgaaaatgcttgcttccccgaaaacctcgccactatcagctactattttgttttttgacagggcacagcatctgcctagaaatgacaacaggtggaatgagtatggacattctggggagaaggccaaggtagtggaaaatccaccagacattgagaaaatctaccacagctgcccattaagatgttgacactgataaggtctaagatgctggtaagatggtatctacaatgtcttgaggcttatgtaacatgtaacaccaaggacatttcactctggataacctccaaagtaagacaacttaggagaggaacataaacttgcactatttttaataagatgccttattcctctttgatacttcagaaatctttatctacatccaagacttcacaattctttggtttaattctgactttgatttttttttgattaatgatctacaggctttcatgcaaccacagattttttgtttgctctgttttgttttttgtctaagttatcaatatttaatatacaatctctgaaagatttgagggctagaaaaggtaaaaatgctttcataatcatattgcacttcttttatttcaaatataaataatatcttcctttagaaatttttacacctaaggaaaagatgcctagagatggagattttacatttaattcaaattgattaagaagagagagaaagctgggagaattcctattgagaggtgaagccagctggacttcctgggtccagtgggacttggagaacttttcttacaagaggattgtaaaatgcaccaatcagcactctgtaactaggattgtaaaatgcatcaatcagtgctctgtaaaaacataccaatcagcactctgtaaaatgcacaaatcagtgctctgtaaaacgcacgaatcagcagggtcctaaaagtagccaatcacagggaggattgaaaaaagggcactctgataggacaaaaacagaatatgggaggggacaataagggaataaaagctggccaccccaaccagcagtggcaacctgctggggtccctttccatgctgtggaagctttgttctttcgctcttcggaataaatcttgctgctgctcactctttgggtccttgccacatttaagagctgtaacactcactgcgaaggtccacggcttcattctcgaagtcagcgagaccatgaacccctgggcaggaaccaattccagacacactatatctccaaatcatatagtagtcatagccacacattggcaaaaaggctcgtgaagggctgtaggttctggccttcgcattccattagtgttcagtttgttcag

SEQ ID NO: 2038 - DNA, 2300 bp, Homo sapien
ctacaaattcattgatagatattgtgacctatttctcagcagtaagtaggacaatgagaatatgtgatgcagagaaactaaagtttctaaaatgaactgcccagtgtataaacgaatgtactctgttcattcaatcaccaagtgttcttggtctcttatgcttcagtcctgagctaggaactgagtatccagtaaacaataaaagtacacatgggccccctcttcctggagcttcctctctaaatagaagacatatattaaatgaatcacattcaaataaatatttaaacaacatttgaaaagtctatgaagacgaaatataatgaaaaagacagagtgggtgtaattttgttggtgatggggttagatcataaaggcttcagtgagacctaaatgatgagtagaaggggaagaagagctccaagtggagggcaatgtgcaaaggtagagaagtggatggaggatgagaagattaccttgtggttggaacataatgagtcagggcaagagtggcggagaagcggagtagagcaggttattcagcggttactagggagtttgtattatattctgactgcaatggaccattgaaggatttataccatgggtacctgggtgtgtggatgtatcgttgtatggcatgagccagttaatactttctaaagctcaatctggtatggatatgaggtaagaatagaagctagaataccagtagcttggaccatggtggatgcagcaaaatggagaaatgaatgattcaaaatctatttaggaggttgacttctgagagtttgggcatagattaaatgaggcaataaggataaaggagtcaaagatgattctaaggtttccatttaactttctagtgtctgttaatatttgattcaagaaaaatgtatctgtcttttagtaatttccaggttctggaaggtaatctgatggtttgttcagagaagccttctcaaccacgcaaggtacccataccctagttattctgtcctatttttcttttatcttacaagcaggcatcacattttcttacttgcttattttgagtataatctccatgacagtgatgtgtattcttgaagactatatccggagaacctagcacagtgtctgtgtctggcatattgaaaatgctcaataaacatattcgttgaataaaacgatgaatggactaatgaaaaaataataagggagaaatacttgactccaaggtgtcactacctagccaagtgcatgaaggagtgccgcaaatgtcctaacggaagtagaaagtgttatggtagaagagaggtgggatgcatctaacaggggtggggggggggcggggagaaaaggagagaggtctggagtacacatatcctcaaaaaacgaggtgaatgttttctggattgggaccaactctacaggaaatctctcccttctcctcagcaagctctagagcaaaaacgaagagcaacttttcaaaagagtttcacgttttagaataaaaaatatttaaaaaaataaccattaaaatgagactttcctgcaaaaagacaaccttgattatgtaccacctgcagcacttcctgtatgctgctgcgggctgtggatgtttttgctcgcctccctcccctccccgctggggctgtgaactctcagaagaccggtgctttggtatcctccactgcagctcaaaccccgcccacctacttggtggatggatggaggaacatctactatttcatccttgaggagttcctgaaaatgcagttgcccctcaaacaatgtatctacatctcgcggggtttctgtggaagaaaagaaaaagtgcaagttgttgcttggagcgcggactgcttttacctttgcctggggatccctcctatctggccccgcctgcctagctctgtttttagcagtttagagattaaaggccagtccccagagcgggtgctctactccctccctcccttctgcttgcaggctggggcgcggagcgggctgaactgggaaggccgggctgcggctgccgtgcctggcgcgggagccgcaggaccgagagcgcagccccgccccgggggcgttgccgccccgcgcccgctccgcccccgcgccgccggccctagtctgcctgttttcgactcgcgctccggctgctgtcacttggctctctggctggagcttgaggacgcaaggagggtttgtcactggcagactcgagactgtaggcactgccatggcccctgtgctcagtaaggactcggcggacatcgaggtacggacttcgcgccggctcgtcggtggtggcg

SEQ ID NO: 2039 - DNA, 2300 bp, Homo sapien
ccttaaattgcaaccaggtcagttagagatgagttgtggtagtgggagagattctgttatataattactccttgatgaagagctatttgcacttacataatttgggaaatcataatgtctattgccatgtttccatattcccccccattccccttacatggatgtactttcatgtatttgagagtaaaggggaaagcaaattgagaactttctaaggaagctacaccatgtcttgggtagtgacgttgcacttgtccattttatttagtgaacaataaacccccattatcagaatatccactgcaggatcttaagacaaagcttttccagtaagagccatattgatcatcaaagaatcacagagattctctctctgaatgccaaaattacagtcactttgcaaatgagtttttattggctttttcttcttaaaataatatttatgaacacagagcttcaaaggtttttctgtagaggtgtccacaacagctgtacagcaatgcatttatagtatatattttaaaagtgtgctatgaaattaaacattgtagtgatataaaatgatgcttaaatcatagaaagtctaccagcttgtcaactcagtgagttttgacactatggaaaatgggtttaattactgtgtgccttcaagcttttttttttctttaaaaatcattatgttgtatagctataaggccttcaaaggaaagacgcctatttttgtacatctataagtatttgatttcaagtagtaaattgaatgagtgtttattttccatgatcttgggcttgagaaaagtgcatttccaaaacacactactgaaaatttcacccatgcatgacctatctttatttaagcctcacttcttcccaaagccgtctaggcaaatatatttgtatttgtgtgggtaactattcacgtctcttacagggttctctggccgccatggcactcaatcataccacctagagtggactggccgagaccagactgggtaccaagcagagaagtgcagaggaaagcactgggagagcaccaggtaaactgaaggttacttgtcactcccacttgtgcccaaaaagccttgccacatcttccctcctcactggaaagacagcactcttctgtgttaagtatttgattttgtgatttgtctttcagaattggaaatagagcggccatttggatttgggcaggaagcagccgagcacagctttggatccttctttagggaaatcgagttatggatttatggtcccggtcaagctcagcccatccccaggcaggggcgggctcagcgagcagcaagagttctggtggcggcggcggcggcagtagcagcggcagcggtagcagcggcagcggtagcagcggcagcggcagcttggtcctctgactctcttcggtgacgggtattcttgggtggataatacggattacgttgttattgcttaagaatacgcgtagtcgaggagagtaccagcggcaggggggcagcggccgccctccccagcccaccagctggccactaaacgcccgtggttgccaaggtagcactttcttgttcttttcatttcctcgggtgttttcgcactggttccaccggaaaggctgtgcgctgcgcctctggtgaccaggactggaaaatgggttcgcgcagggggcggggggcgaggtgaaggggatgggcggggagcggaagggggtccgtttccccgagcctgcggggcggttcggcgttcccagtccgctcctctcctctccacggtggggtgcggctggagggagagacgcggacggggcgattttctaaagttgggaacgactgaaaggccttgagcagtttgggagcgtcgcgagtgaggcgccgaagctgggcagagggtcgctgggggctgcctccgcagaaagggcgtgtccgtgggcgaaggtgcccccgcaagcctgcggaagcgcgtgacttcgcgaatcccgagcccggggcggtgccggagccccacccccggccggccgcgctgctccgcaaccagacttggcggccgagatggggagggggcgggggcccgggggctgggtccccgcggaacttccagatcggaagtgtggcgggtctctcaggaacgcatattttcttttcggattctccgagaaggggtggagaaacaggatgggaaccggattggttgcagtgtggcacagacctggaaccttcctgaaagaggttggggcaggcagtgactgttcagacgtccaatctctttgggacgcctcttcagcgctgtcttccctgcctctgcct

SEQ ID NO: 2040 - DNA, 2300 bp, Homo sapien
gaaatggtttgatttgcacacacttcattgagtctaccaaaagcatactgatatcaaattgcccagggctatatatttattatgagaattcataattccaatcctgttacatatgttttttttttaattttgctggatcttatggaataaggataagggaagatgaagaaaactatactaaatgtgtcaaaatgctccttgtatcacaacaaagtggatggtttactcaatgcagctaaattctcagaagaaaaactgaagtcacatctttaaagagcatttttcttaatgtactacctatctgtaaataaatagtttaaaccataatgaaagcaaacttaaaaagttgactctagttaaatattgggagagactgagtaacttgtgtaccatcaatttcctgaggacttggccaaattctgcctgcactttcagcctaacctgcagggggcaatagcttgacacgaatgacaacaaaggctgctgaactattagacttgaatatctgactatgaccctggaatgttgtgtaggttggaaagagtgcttaattaatgtatattgaaacaaaagatcaggtaaattgtttgatttgtcttcaagctatatttttagactaatttaattcataactgttaggtttttttttccttaaagagattatcaaagttttaggagacacattcatctttagaattttcctgaacactaattgtttactacagaatttatgtaatgtatgttaccaaagaaaagacagcagaatcaaagtgaccatagttttcagtgttcaaatggatgacaaaaatcagaggaaatatggaattttgagatatatttaataaaagatagtcacatatctagataataaaccctatttcaatattttttaaacctataactataaatgggtggggggcagtcatcccattgtttgcaatatgtcttctttccatgtatcaaacattattttttaaaactggtttaaacttaaaatcacgatcaacaattagtgagttatctcttttattgctatatatttttctattacaagtggaatagaatttattggctatcgataatccacactctctttccctccttctcggtatttccactccctcccccatccctatatttccccatcaactgatctgggaagactggaaacagaccaaaaggggttttggctagagagagtaattacagaattagaaaggaaaactcttctcatctcctcactgcaatcatacttaatgttcattatgtcaattttaaatgatacaaaatgccttccccaaaaggcatcctggttttaagaagtcaaaagggtacctggcattaaacaaccttgaatcaatcctggtgggattaactggactgagtttctgtatactgcacatgctatggatctactttgatcacagtaaggaaaaaaatgagaatagattttttttttaaagaattgctgcacaggagtgttccgtttcttttatatggcagagtttgatcttgataaaaaccttttaaaacatccttttccccccactatggtaaagagatcatatctgtttttgcttttctttaagaaaagaaaatggggattgcttacacggggaaagaaaattttattctccaacaccccctcccattctactaaaccattttagtcgacatatgtttgttatcagagagaggtgctgtgaacacacagccattttcttagcagctttttgactgtatgttaccatagtcccacaaggcattggtcctttcccattgggaagtcatgaataagagactatgaagcttgcacgtcagatcttcctcaattaatccaccattagcatgtttgggatccactactggatggttaacagcagcttttgtaactgtacgccgaccatatcgaattatgctctgctaaaaatgaactctttgcagaccaaccctctcggctgtcagtgttttccgttttcctattttaacgtttgtgtatagtggcaggcgacagatggtgtagatcagatcgatttgattgcattagatgattttttcccttccccactcctttctggaagctcgcatcagctgaaggctatcgcctgggactcctcggaagcatgagcaagccgccaccacgcgaaggcactggggcacagccagcgcgaggcgccgaggtcccttcccaaggcttgttaacactgtaacccggcactcggagagaagaagcagctcacactgcccagagcctacctcactgcacatcagatgactccctggcttctacacacagttgg

SEQ ID NO: 2041 - DNA, 2300 bp, Homo sapien
aagacctactatttgatagcacaacagagtgactatggtcaataataattgtacattttaaaacaactaaatgagggtaatcagactgtttataataaaaaggataaatacttgagggaatgaatgccccattctctattatttgattattacacattgcatgcctgtatcaaaacatcttatgtatcctataaatatatatatctactatgtgcccacaaaattaaaaataaaacaaaaataatataatctttaatcatttaacatataaaaggtaaggtcatgtctatgctaaaatgaaagaaagagcaaatttgtggtaaattgtatagcttttgttctcctggcaatgtttattctataactgggtctttcttttttgtatttttaaagtaagcatttaatcaaaaacatttagtcaaaacatcatgtttttgtttgtttatttgtaagaaattatatttcaacatatgtaggttaaaaatgtgttagtttggtttattttctttgttattttatctccttttttttttctttcagatcatcactcagccttggtgaattgttttgattagagagagagaggtctttgagatggtttgcagtgagagcgtcatggtttgtgcaggcaggcagtattctttttgtctttttattgggccaaggacatctacagattttatcaataggtgcataaaaatttgtagatgggggtggaacaaagtttcattctctccatagacacagcaccaaaattatcaaattgaacacatttctacttgagaaggctcaagatttgtccttagcctgaattgtgcatgttcttccttttaatatgcatttttttaaatgccaggggaaatttaagcggtgtttattaaagcagaaatgtattgatgacatgtgttggaggttttatttcaatcccccgagttctgcaatgaacagatctgttttacactcagcccaggcagcctgatttacccactggcccttctgttggatacctggtgattttatttttcatccgtgatatggttcggttgcccccattaaaaaacatatgtttaattgaaacttttaaagaaaatttgagaaaatcttatttaaagaagtttatcacacattataaagaactttttgagacagaaaatattttaagaggaaaaaaagccttaattttctaactgtttgtagtgatgctcagtgacattgctttgatatagaggagtatgataagggctgttagctgattttctgagatcaacccattttaatgtacttgtccaataattaactcaatactagatgaaagcagtcttccaaattccaacattaagttttaataccaagccaggtatgaggcattcaaactcattgcagcaaacaggtttctaagtgtggctttttctttcatgcagagaagggactgattagtttcccaaaccataaaaattgttttctttctttttctttttcttttttttttttttttgaggggggcggggtgcggttctgaaactgatttcttggttgtctccattactcacaaatccgcttgccatatttggtagcaaaggcaggggctaaacttatcttagctgttgcccacaatttatgaagagataatccagttcataggaaatgaggtacttcaagtatttgaggaatggcaagtatttctttgtcagcattgattcagcttcaaatacgtctcctactgatctctggactaccgctctacgccgcattgatccatgcaggaataattgtaaagagtttccaggatttcttttactatcagaaaaacaacaccctggaatcactttgcctgtggtttatagtgaaaacagccgtctgagcattttgagccaatagctttggataaggtgtgtaatttgtttggtgctaagttctgtgacatgaaaagtaaattacaattgggaaggatagtgggaagagggataccattattaaagaaaaagaagaaaagaaaaaaatattgtttcagcagcaaggatttttgaggtttaattcttctccccactccaaatttgctggcttgaggctactcatcgcttcattgccacccataaaagcacatggattttaagctgatgaaaaagatggacatggattatgccttttcctctgccaatgctatgagaataccttggttcactagaagaaatgctgacaggtaaaaatgaatagaatatcataatttttattcaaataggatagcaaatgcttgtaaaatattcctaaaattgtgcataacctttgattcagataaatcg

SEQ ID NO: 2042 - DNA, 2300 bp, Homo sapien
cacttaataggaagctgagactacaggaggaatagacatactgctttggagttgtactaataatgagtaggtttgggattatctccctttgaggggctgtgaactgcatgctcaggtgctcaaagcatggaggtagggggagtatgtgaagaaaggtaatattaattggacagccaaaggggcaaattatagtcacgttttccctactcttcttcctcatcctacccctcttcctatttttcttgtttttggttgacaagcatcaatatggcctttctatgtttagaaaattctctgccttaggaatttccatgaaacttggccagattggccaagcacacatactctccagggttttaatactagaaaaatcaacacagagaaacagggtgatggagacatttttgtggcagtaatagcagggaagttctcagaggtagctgtggtactgctgccagggaaagcaactggagtccagtaacatcagtgttaatgacaatattgacactggtgaagatggtgtggcaaccagtatcaggcaatggtagcagcaatgtctgtaccactggttctgtggccttgcttttggctataatccaagctgtgcagccttgctttattctgcccattttctgagcccattctctatggtttctagcaattctgtgagttacagcattattaagaatttcctggttcagattgcaattagaaaaccttgaatcttccttactagtcagaataagcttatcaaggaaaaaataaagtcttttaataacttatattatttacagaaattagcagagagcattttgagagtacatctgatactgtggttaatacatatcaggatcctcaacctgaaaatgttatcatttactaaggaatggaaaacttgtacatgaaacaaatacaatctgcaagatggaataaaattaaatgctaaattgagaacagactgtcatttagaaagtctttctgaaagagatgggactatatttaatttctgaaggatgggcaggagatggcatttaaagtacagaaatcatcaagcacagaaacaaatgtggatactcatggggcagtgaccaacctgactgaagggtgggtgcacgtctgaaatcaatgggaatacatttgaatgattaggagataatatattattaaggccttgcctctaatcagaaataaagatattctctatttccccaaataaggaattcttacatagagcttaatgtatttaaaaatttttaaatgggcctacagaaaagaggtggggctgacggaagtaaataaaacctgaagataaattaaagaatatatcaacgtgggcaaaattttccattagttttggaacttagttttgtttttgaataataagcagttaaataattaaagctttgccttggcaatgcaaggactgaagattatttctcggtggcaattttccagacttgctagttgtccttgggtcttggtaacattctgctcattaacttcaggaagacgtccaggagtaaagatgcatttgaaagtggctgaaaatagtttgtaaagctcagctttcctggctcgacagtgaaatgaccgcacaggccagtcactgggtcaaaaatcaattaacaaaacgggaagttttcatgtctttatttttacattagctcgaaaatcacaaccaagaagaaaggcaaccactgaatacaggaaatacagtattgttattgctgttttttttttttctcttggcaaggctgggtcgggtgccttccagcctcgctgtggatcccgcgaagtggacggttcgcttcgtggcttcttcccagaccccgccactgcggaaaccgtcactcggtggcccccgactgggtcaatgcgaggacgcccacctcctacctttgagtctctcctcttctccagggtacagccaaccctttctccaacgtagccggagtccgagagtcccagttccgcccctccagcccgccccaggccaggtggggatgcgcccggcccgggccagcgctggtcccggcagttccgcgtctgcgcagcgggcgaggggctggagcggggccggccggggaggtgcaggagacgtgggagccaatgggcacgctcgggggagccgggctggcggcggcggtggcggccggctgggcgcgcactctcgggatggagggcgagcgccgggcatcgcaggcgccctcctcgggcctcccggccgggggcgccaacggggagagcccggggggcggcgccccctttccgggcagcagtggctcttccgccctgctgca

SEQ ID NO: 2043 - DNA, 2300 bp, Homo sapien
cagaagggaaaacaaatgccagcagcacagccatcctcccaaacctaccacttccttctcttctaaactgattcccaaacccattctcttgtacctaaaagaactaaaagccaaaacatcgaaatcaagttggattctgacttcagaaaaatctatccacttatattctcaatgcctgcctgaccagccagcttccaccttctttcagagaacaagctctttggaagcaatgtaagtcgcatggcattcaggcatccgtcctataggcatacaaatgccatacccacctttttttttgttttcagatattccttattatctgaacctcactttcttcaaatattaattggagataatatctcctgaaagagctgctctgagaaatatacgtgactatgactattcggtacccaaaatagagtaggcactaaatagtgactaattcattctttttctccgtcctacattcctcctaagtggagaatcatccaaatcattgggtgagtgtgctctcgtctctaactagcacctgccaccatgattggatggttaggactgaaaagtgctatcttatttaaataagacatagaatgggaattaaaggatgagttacagacattattgattatagctatgaccaaaccaatgagctgaaagtgacaggctcttcctttttctttaaaacaatccttgaaaaatatctgagctatttagtctcctggaaaactgtacatgggaaaccccgatctccagaaagtaaaaagggcccccaaaaatcgacctttttttttttctctgccagcttgtcaaatggagaaaagagaacacaaacatgaaggctggatttggggcttctaacacattttagcaacttattttacatatatatatatatatatatatatatatatatatatatatgtaaaacattatctggggcaaggtctaacacatttcaaaccattatgacagaggcaatttgaagtcaactatcacaggacatgtgataaagttactttaaggttatcaagaaattacttgatttgttcactgatttctatcttatgtgttaggaacttttcattattttacaaattagtaagtcattgctcctaaaattaaaaaaaaagatgaacatccaaacttaatggattcaacagacattcttaacattcaatttacacatttagctactgaaaataaaacttcattcttcctttccccttcattttcttatttcccgtttgttatctgttgagggagagagagagcgcgcatcacaggaagggaacctccaatactttgtcaatattaaaggaaccataaaatatcaggttttctaaagaaacaccaacaattctcctaagaataaatatgtagcatattcacatatgtaaattactataataaaattaatattattatgtgtaatttatccccaataatttcatatgtatatatgtgaggtgtgtgtatacacgtgagtgtatctgtatagtcattctttctctcacacacacatacactcaataaatccaaaaggcatgctctgtgaggttctaagagaaaaggacttaaattgcccagggagcggagcagcctttaaataaatctgaagtgctcttgtaattgaggtacagctcctgcttttcagcaaagcactggtgctgaggcctcttcatttagaaattctcaaattcttttttcagatatttgttccctggtcagcttagtcccattggcactttcacctgaaaaggagggaggtggcgaaatagaaatacgtgccccgactcgggaagtgggagtccctttcacaccccagcaattgatcccctctctcctcgccggcccgcccgccgctgctcttcttccaggcacaatcgaagaggaggcagtgagcgagtcaaggccacagagtggatggaatcaaggttcacccccaaagctcacctcctttgcaacccggatccccactcctcaccacctacggcccctcttcccttccatccccgcccagtcacccaacgctgaagccaccgcggggtgtgggggggtgacgtgtgggaagagctgggggcttccttcgcacccaccctcacgcgccctagaatgtcctctggggaaggggctgcccataacttggaggaacttagaaggcaaaacctactgcgccccaacccttagaggggcctcaaccccgaaggcgaggggcgagatcagggactcggcgacgagggcgagcgcccccgggcttaccacgagcacggggaccccggcggccagcgagtagaggagca

SEQ ID NO: 2044 - DNA, 2300 bp, Homo sapien
agagtcactgctcttatgctgaacttacaccttttacttcagtgtgaccatgtaagtatgtgggctgtgtttatccggattctgactccttaacccttgacaaattttgtacgtgaaaacagtttcccattgtacttagaggagtcagttcgtttatttactcgacaaatttttcttaagtaaccataatgtgcaatacagtgcagtgctcatgctggggacacagcagtgaacaggtcagacaaggactctgctgtgttgcatgtactgtgctgggcactccatacacattaacaacgcaatacaatgagtcttaattgtgaaaataatgctcactttcattagactgaagaaatgagttgcccttaaaaattaacatcattcttccaaaaattggaaaaatgtctataaacaagacttcaggggcattcctcagcgaatgagatagtttggggggattcctacttagaaccagagtaccagtttaaatacccttacagtctcagaatgattttcttaatgaagccttaaaacatgtatctttgtagtagttatattttcataatataagctgctcatgtccattttggaacagcttactcccactgcccaaaactgcttgttatacacattgcttagtgttgtctatcttgtagctctaagtaattagttgtggaattatgtttacgacaatgcggagggtgaggtatgtatgatactacattaaagaaactcacactgcctttactatcccatcccaaaactaccaatcatttgccaaatttcaacagatttttaagccaacagtgttttgttttgtttttcctgatgataaaggcccacctctaaaattcatcaagctacagcctattacaatgaaccaacattctagaaccctgctaaggtgattccaggttttaatgagcagggcagggctctaaaaatattttcctcctcttgcttgtattcatgcttcctcacctgctcactggagtagaggagtgtcagcctgaggctcaaagaaagaccccttgagagtctgctgactaagcttgcagcagggacccacatggcatgacagaacgggctccttgcacatatgcagttccatagttagttacatacccacgcataggcgtggatagccatggacggatgaatttttgtatgcatgtgctgtgagccagcattggtctccctctcctttatcccgacccctgaggaatccctgcagttccctggaattcagggaataaagaacgagatgaggcaaatagtcctttttcctaccctggtggctgggaccgctcagtgcctggaatctgcaatgcctcctctcacaagcagctaataaagacagactgaaaagatgagcaagagaatgcatggatccaggaaggggccgctgtacaagagatgatgcttcgggagctactgggctatgatttctattattatttgtatatacatatatatatacacaaagccctaggaagctgcagaggaggcaaagaaacctcgctgagatttttctaacagcgcctagaaaccaccgccaggctccagccccgggctgggtcaaggaattcgagggatgcaggctgaacgcaccggttgaaactctgggcgccgcatcggcactttgcgccttggtgggctttgcgctcggaagacgcgtccacgcaccattttcccaggcgttgtgcgggtttcttaaacctctcagctggtgcctcggaagagtttctggaagctccatctctactgcctcccctcccccccttttgattttacccccgccaggagcttctccagccccacagcgtccgccctgtgaggggtacaggtgccgctgtcccgccggctgccgccccgtccgcccacgcagcgcctcctccgggctagcctgggggattgacccagcgccgctgcttctcgaatggtctcgtgcaggggcgcagcggccgctgcccgtcgcccgggactccccgccctccctcgcgaccccgcgccggggcgggcggcgcttgcggcgggcagggggcgggcaggggagagggggctcgtccgggggtagccgcctcctctgcagcctgccggcgcctcgaagcccggacctgcctccgcctcttcctccagcggctccatcccgcctcccgtgcctcgtcctcccgccgcctccgccgccgcgcccccggtggctgcctcggcggaccggggagggggcccaccgcgtcgaccgcccgctcggctcggctcggcccggcccgggaggcgtgcatgcccctgctgcccgcggc

SEQ ID NO: 2045 - DNA, 2300 bp, Homo sapien
caacaagcacttaatgaacatatactatgtgaaaaactatgctatacggttatataagcatcacttaattttattgttccatttatttcttcactatgtactgacaacctactctttgccaggcacacttgtagttaccagaaaacataataatgaaaatgtgcttgactttacagagttcactagtgggtgaggcagacaagataaaaaaggacacagaaatacttgatatactatcaaatggtgacaaattctatgaaggaaaataaaatagtataaaagaataaagagtaacagaggtctgagattatgaatctactcggtgcatcaaacacaacttccctgaggagttaaaatttgtgcagagatatgaattaaatgaggggttaagccatgcaattttggcggaacagagttcttggacaaaggaacagtaagtacaaagctcctgaggcagtgaaaggctaggctggaacggccagaccattgaggtgcaaagtgatgtgaatgaggtcctagaaccaggcaaggtggccaggcagggctttaaggaagagacgggaagtttggactttccattgaagtggaagagagctcttggagggtttgggtaggggaataaaacaattgggtttactttccaaaggacctttctggctgctgcgtagggaatggtttgtaggttgtgggaatggcaaatgcaaaagctggtagaacagttagaaggccgttaggttattccagtctaggcaagagatggcggtcgctgtgtgtggtggggggtgagggcaagcactgagtttaggaagaagatgtagttctcttctgattacttctattttctaagtgaaataagagttaatgtcatgaactgagaatgaggagatttgagaagtgagaagttgtgaatgggaaaatggctggacagaaaaaattatagaatcgtgggggcaactccaggacctacttggagtttgtggtcatgagttggatgtgagacagcatcatgcggttgtgtgtttttctccagccactttcagttgctctggtaagggcagagaattgggttcaactaagccgggatattatcaggtgagtatggcaaattgggaggcggaaacaagcaattatattgctagactttggaacccaagcctggcagaagaaagtgggggcaagaggtggtgttggcagtgaaatgagtatattattagataggatggtcccatactgccaaagacctattggaggagcaactaaaaaagggaaatggataaatgagttgggaattggccatcacatgcttgaaatggagacttggagatattggaaatggcctgggacatgtgatcacaaaattaggtcatctttattagtataatatcatgtctcgtgtttgctgggtctttctctcttctatatcaacttgatacttctggttgccaaagtaatcacaaaattgagactagccatgtatactgccaacaagatgaaggactttagattattaatatctgaagacatacttctttttactgttatgattgcaatactgacactgttctgggggtgtgacagtgagattagaacatacagtagcctctgggctcaatgaggatgcccattacctgtgcattcacacatctgcctctctggatgcaaggaacccacatcattcccacacaaccggtagtgtttgttagtgggtgcttcgatatggaagggagataaggagtctcctaggcagagaatcccccgtaggagctgtcattcctgggtagcaacaagctgtcagttaatgcctacctcagcctacttttcagtatgggatccaagatctcatttcgtggaggtaggggttggttttcttgctatgggtcagcgcgctggagcagggcttctgatccttagcattctttaatagcattcctagagtgacctaggaggctccccaggaggagactaggtggcttagctcctcagcctaactactgcagaaaccaggagtgcgtcctccttttcggattcttgacgtcaagctccgacagccttggagcgtcgcaagggcggtagagagctgagggagggtgacagggaggggaagccattgcagcaacagcttggaggagggagctggacgtcgtctctcgccagaaaaacggggagcaggagccagactaggggaggaagaggactggcccgctcagggaatagctgggttgctgcaaaaaggggcggggagaaggcgggggcgctgcatgcagcgcgctggctccagcggtggccgcggggaatgtgac

SEQ ID NO: 2046 - DNA, 2300 bp, Homo sapien
tgtggaaatgatgatgttattctggatcctataagaaacaaatgccaagatgggttaaatgtacagaattttattaggagaaatgactgtatgagagaacatgggaggacaggcagaaaaggctggagctggacatgtctaagaggcaggtgaaagagaaagggaggcgaagttgagtggaaacatcctaatctgtattgcagtccaagggagattgtcaagaccatcagagctctggctccaggattccactcaggtcccccagattttcccagctccagccttttctgcctaccactcacatgatgataccaatcagttgttgcaactctgctccctcctaaattcccatcctctttttttaaatcttgtcctcccctacactagcaaaatcttgggttttcctctagcagaaatgagatttgagaggtaaattgtttttaggaaaagatccagactaataattggatgactgcccatttgttctaggcaccaaatatgcaattctgactgagatatttatcattactgctttcttgtctttaatttcagccaggatctacaaataaacataatcagaagtcttgaaggtttgattttttttacacttaaatatgtttccaacagtaatcaaacttggcacacatccaaacaatcctcccattctctggtctccctaagtatcccttctgagggtgtatgagcaaggacaaactactctcaagtataatttcagactcttaaaacatgggtttcaccttatagtgactgacagaatgagggctctgtggttggggaactccagtcaacaatgtggggaaacctcagtagggccaataagtttctccagaggacattcccacaccgttctgccttaggctgttacacccagctgtagtgttctaggagctagacagagaaggaggctgggggtccaaccacttctcataaagactgacttaaccttcagcctgtgcctctccttgccccgtgtccttgggcagtccttgatgaatgccacttataaagtcaggcagctggtgttccaatcctggctttgctacttactagctatatggcaaattacctctctgagcctgttccctcatttttaaagtagggattatagcacttatctctcagcactttgcaagtatgcatttacctgtagaaagaatgcaacaaatattagctattattattactaatatcaaaactgcaaaggaaattaaaccatatgttcaatgtttgggttgtccttttaacctcttcagctgaatgttgatatgaaagcgcttaatagcattcaaacacataataataaggtagttggtaattaggatttacttcagcaaaatttaattaaagaacctgtagggaaaagaaaacagacagagccaattgtacagcttcccagcctctgctttgacctaagagtctcactgggcttgcctgcctttttctaaaggatgggcgaatattcacacagtgccgggctccaggcagttaccaaatgtctcatcacattttcaaaggctcactcctctctcttgcgtaaccggtgaggtcaaaatgggcaccttcctgaaagccaagagtgtcatttctgaacagcgtccaagaaagaaaactgcattccatagaaatccaagtcaagcaataacaaaaggtggcacttggtgcttaagccacactaaataccttggtgggccaacttcttaatatagtcacattaacacctttgatttctccatgacctaaagattccaaagtttgcaacaaagtgctgagcaggggggtcgggggtggggtgtagacgggggagaacgaaccaatgtaaatttaccactacatgaagtttaaagtagctatagattgttgtattattatcaaatccaatcagtggaagaaaggcaaacaagtgacttggcacttctgcctcagtcaaggtaaggctctctcccctagagctagcaagcaggtaaacgagctttgtacaaacacacacagaccaacacatccggggatggctgtgtgttgctagagcagaggctgattaaacactcagtgtgttggctctctgtgccactcctggaaaataatgaattgggtaaggaacagttaataagaaaatgtgccttgctaactgtgcacattacaacaaagagctggcagctcctgaaggaaaagggcttgtgccgctgccgttcaaacttgtcagtcaactcatgccagcagcctcagcgtctgcctccccagcacaccctcattacatgtgtctgtctggcctgatctgtgca

SEQ ID NO: 2047 - DNA, 2300 bp, Homo sapien
agaaaacttttaaaaattatatcataacatatttacatctgatatcaaccatattcaatgtactttcatatacatcatctcttagtgtcaccacatatctgtctgtatatggtaatgagcgtaatctgtaattatgctcattacacacattacaaaacagagtttcagagaggttaggggaactggctttcacaagaaatgagtagcagagacagaattgaatccagatttatcacttttagtgcagagctttcccctttaccaaattggaccaacatatatccccacagctctgctgaagggtaaaagtgctgccatggatgtggaggaattttaataaaatggcagtcacagttcagtcacttctaagaaaccaggggctactccatttcacttagaggtctgtggcatacaagaaaacctcctcagttataaacggcaatctaccaatggccagaggcagcagcaaagtaagaactttgaaactgaagcaatgagcaagagagctgtcaagctgaccacatcttgggcttttactggtgtgacaatagtgcagcatttttgagctgccaggcccatgaccatcttcaagaaggaagccaagaaaactgacagttctcttagctgacacgaatatccacagctgtcacctcctggaccagctgctgaatctaatcagccatcctctgaggcagctgactttagagccttagtgtatttggctgagaaaccatgtgtgttacgtggctgccaagggccagccttctgcgtgattgccagtgtctctatgtttttatagaggagaggtcacgatgctgccccctggagttcatttgaatctgacacgcagctgtacactggccaagataccagctcagaatgcttgcaacagtctagtttcaaatgtctgtctctttgttgctgtaagttccttatgctgtgtcaggccatgtgtgccctaccccccgcccagaaaatgtagcctctataaacagcagcagttgaagctactgtactatatttggtccatttctgcatctcttcaccctcctcactataatatggcccaactcttaggaaactgaaattaaatcaaagtgtcattttcaatggtagaatatgcaagaattttaagtactaaatgactatgattattaaatcagtttaataattataatgttttcttcaaataatttatatgatgacttggatatgaaaacctgatgaactacataataactacaaatgtaccattcctttcggtacaactttaaacttatgtctctgtattttaaaaatctcttttatttggaaataacattagtaattgcaatgaagaacatggagcaaaggtcaaatgctttacctaatatattcctttgtcaaaaaaagaaaacttgaaaatcgttcaaagtcgggcattaggtatcttccatatattaagtatcatgcttagtgtgatgctaagtgtgacattatattcttagaaagtgtctggctacttacatgcatattccaaggaaactttatatatggggaagacatatttgagaactccgcatttgtactgtgttaagcaataaaaagtatacctttttgttgtcaggcttgagaaagagatccaagatcttgaaaaagctgaactgcaaatctcaacgaaggaagaggccattttaaagaaactaaagtcaattgagcggacaacagaagacattataagagtgagcattaaccaattttaaaactgtaattctctctcaaaatgaatccacaaatactatataatttttcaaagcatatccacatttagattctattttttaaactgtattaatcatggagaattcttttttcttacagtctgtgaaagtggaaagagaagaaagagcagaaggtatgtttttgaataacttattttatgttaaactaagtttttttggtaatttgaaattgttcccattgtaaatatattctaaatgtattttgaattcatattaattttacagagtcaattgaggacatctatgctaatatccctgaccttccaaagtcctacataccttctaggttaaggaaggagataaatgaagaaaaagaagatgatgaacaaaataggaaaggtatatgagaaatctgtgttgaagggcatgttcttaatttcagattttacagtgtcaaatattcacaacttgctatgacatattattcttccaggttaagcaatggttcactttacaaagttctgtgagttatgtgagtcaccgcataggtgaggataatgagggtataataatagcatt

SEQ ID NO: 2048 - DNA, 2300 bp, Homo sapien
cctctgcttttttattctatttagggcctcagaggattagatgatacctacccactttggtgaggtgatctttttactcagtttcctgactgggatgctaacctcttttagaaatacattcatagacacttccagaaataatattttatcagctatcagaacatccctcagcccagtcaagttgacatataaattaaccatcatatatacctagatgtagttttttatttattatttatttatttatcctacttggtattgtgtgtctgataatagtttgggggaaattctcagtcataattttttcaaataattcttctgtttccttccctcttctccttctggaattccgattccacatttgttgtaccttttgtagttccacagttcttggatctgttctctttttcagtctttttttttttcttttcagtttgatatttttctattgagatatcttcgggctaagagattcttatctcagatatgtccagtctacccacaagcccatacttcacttcttttaaagtgtttttgatctctagcatttctttttggttctgagaatttccatctctgtgcatttgttcttgcatgccatctactttatccattggagcatttagcatcttaatcataatgttttaaattcctggtctaataattccaacatctccatcatacctaagtctggttctgaggcttgctctatttcttcaaattgtgttctctgcctttcagtatgccttgtaatttgttcttaataactggacatgatgcagtgggtaaaaggaactgctgtaaataggcctttaataatgtggtggtaaggagagggaggaggagaactgttctgtagtcctgtgagtagacctcagtattttagtgagcttatgcccctggagtgtgaacttcacaaccgcttcaaggttcttcccccacttaagtgaaacaggatggctaatgtgggcaggaattgggtatttcccatcctccaggtcatgtaggctctgataaaaccccagcaggttaggctgcggttaaatagttgctcctgattgacataactaaaaaacaataattttttctagtgattctaaggctgctattgtctatgaccagatatatgatatagaaaactccttttctataaataataaactgcctcttaggtgtttcccatctgcaacctgtccatggtgttaactttatttactgccatgtatcatgtcactgctcatcacctccagccttgttgagtcctgtgatttgcaggttttgaatatatgcatgaagcaaagtggttgatctgggctacaagagtgtgggactgaggtaaagtagctggttttctattatccagatgctaagaggaagattggagctgtgggagggaagaagattgtgtgggctgacaattgtgtttcttaattcagaagtatctgggctacatgtagtagaattattatctctaccaattggttctctgttatcctcagttttcagtattgcaaattaaataatccacccagtcatcatgatcagtttaataggaagttgggaaaagtcttatcatagatttattcaggtgatgatatttaaatccagaagaaacatttcttctttgttctttaagctttctaggatgacgtggagtaaaaccttttgcttttattgactagtttattatttccaattgataataaagaaagctattatttattatcttccttgtcagattttgagctatattttcatttttatttaaacaacattgggccaggcacagtggctcatgcctgtaatcccagaactttgggaggccaaggtgggcggatcacctaaggtcaggagttcgagaccagcctggtgtaactccgtctctaccaaaatacaaaaattagccaggtgtggtggcgcatgcctgtattctcagctactggggaagctgaggcaagagaatcacttgaacccgggaggcggaggttgcagtgagccgagattgtgccactgcactccagctcgggcaacagagcgagatctatgtctcgagaaaaaaaaaacagcattgaaaagagatctttgtttccttatttttcaggtaaggaagtggaggattaaatgatttgcccaaagtctcacagtaatttgtagagctgagattgaaattcgggtgaaacttcacatatcacattctttttatcaggtatgttgagaatatggtttgctgaacacagaaagcaagtagttatctagaattatggtccagttgtgtaaaagcttttatattttaattatat

SEQ ID NO: 2049 - DNA, 2300 bp, Homo sapien
tgccacacagaccggtaattgggctcacccagttctgccatcccacccaggaacagaagacagcaagaaaacctcacgtcgaccccccatgattccatctccaatctgaccaattagcactcccacttcccaagcccctacccgccaaattatctttaaaaattctgatctccgaatcctggggagactgtgttgagtaataatagaactccgggctgggcgcggtggcttatgcctgtaatctcagcactttgggaggctgaggcaggtggaatcacttgaggtcaggagttccaaactagcctggccaacatggtgaaaccctgtctctgctaaaatacaaaaattagccgggcgtggtggcgggcgcctgtagtcccagctactggggaggctgaggcaggagaatcgcttgaacctaggacggggaggctgcagtgagccgagatcatgccaccgcactccagcctgggccacagacagagactccgtctcaaaacaaaacaaaacaaaacaaacaaacaaacaaaacaaaaaactccggtctcctgcacagccagctctgcgtgaattactctttctccattgcgattcccctgtcttgataaatcggctctgtctagacagcgggcaaggtgaacccactgggcaattacaatgtcactcaaggtctgaaatggaatgtttaatattttcaattacattaaagagaagaaaaaaagtaaaaaacaggaaaacaaaaaacaaaataaaaacaaagattgttaaaaattcaattacattgtcttttcctagccctaaaatttttcttttgcaaaagagtcttgtgaaacagattaaaggcttaaaaagaaacaaaactcctaaatttcaggggtaatttgcaaaataaaagatttcttttgcattatatcattcacactgcagaaaggtttcggttctatgcaatctgatctttttccactttttaaaagttaatttgcttttacttagcactattatagaacaggtattttcaaatagttttgcaattaaacacaaaaactataatttttgtggcgaagtaggtactagttggcaaacactgttccttagtgtaaaacagaattctaagttttcagaaatggagtcctaaaactagcactggtcttgcaaatcaagttctgcagcttagtttgggaaaggttcccttttggctcaaggcttaactggctccacccagctgctgaaatgtgatacaagttgtaacaaaaccggaagttggttaggctgccttcgcttctcaaggtaagtgtcacgtctttttccttaatgtcaaagctctttgtaaagcgttaaaaatcaaatccagcttagcgacagactggagagcgagtgcctgtgctgaccagggcagtcggccaggcagaacgggtgctgtattccgaaactatgttctggagcttgaattgagctaatgagtgttcactaacgagttaggttaatatgtcctgtgactttgactaacaagctttaattccaagatatgggtggttataagtagagacgtgtttgggatcctgaaaatcattgactttattcttgcaggagttttttttttgtttttaattttaaatttaaaactgtaggaactctttttttatatttaaagctagtggcatggttacctatatcagggtcacttagaaccttatttggtttttaaagtggctttttatctagaacttttagtccccttaccctcccactccctagccctggtgtgtcgttaaaatttcagaaagactccagggtggcaaggtgttatcactgcacttatttttgtgtgtgcttgtcatactgccctaaagggtaaaggggatttttcaaattgtaaatgtgttattaggaatatttcttaacatagctaaacttttcagttcagatattttcatttgcttctgtatttttattttttatttttatttatttatttattcatttatttttgagacggagtctcgctctgtccgccaggctggagtgcagtggcgcgatctcggctcactgcaagctccgcctcccgggttcaagcgattcttctgcttcagcctcctgagtatactgctgggattacaggcgcccgccaccacgcccggctaattttttgtatttttagtagagacggggtttcactgtgttggcaaggatggtctctatctcctgacctcgtgatatgcccgcctccgcctcccaaagtgctgggattacaggcttgagccaccgcgtctggcctatttatttattattttcgagacgga

SEQ ID NO: 2050 - DNA, 2300 bp, Homo sapien
gttgaaatgatgccttggatatattaagtaaattatattgctaaaattaatattacctttttcaaaactttcttttcttttcttttttttttttttttttttttgagacagtctcgctctgtcacccaggctgaagtgcagtgacatgatctgggttcactgcaacttccacctcccaggttgaagcgattctcctgcctcagcctccacagtagttgggactacaggcatgtgccaccatgcctggctaatttttgtatttaaaaaagtttttttaatgtggctacttgaaaattttaaatgacctatgtggcacttaatatttctattggacagtgctttctgctcattcaggccaaaaaccttggagtcatccttgactcctttctccaccaatcctgtaggttctatcttcaaaatagtccagaattcagcaactacaccacctgctataccacctcccccccatcacccccaaccccccgacacagagaaaacacacacaagtcactttctcttgcttgaataactaaaatagctttctaactggtctccttgcttccttccttgctacactctacagtttattcaactatttcccataaagttgcggagcgatccttttaaaaggtcaatcagattatgtcactcctctgttcaaaatctccatggctttttttccaaagtttaaaagcccaagtccttgcaatggcctacaaagccttaaaagatctggtcacccgtctgtgctcctgatcccttctcctgccccatctgtctgtcctaatctcttaccactctcttcttcactcagctatggtgatcttcttcggttcaccaagtatgctcctgcctcatggcctttgtacttcctatacctctacatgtaaccctctaccttagacttcttctttctcgcagtttggcatcactttactgaacgttatatttagaaatgcaaacctctctctgcttactcttccacacttcccccttcctattatatataggatataacatatccttcttattatataggatatattatatcctgtataatttatttaatttatctgtctcccaccaataaaatgtaggagttccttgagggcagtgactgttttattgctgcattcccagcaccttatgtgcctggcaaatagtaggggccagaaaatgagctgtgggttcccaaagtcagttacggaccatttgcaactagccattctcagaaatctacagaaataaacaaatacttcagtatggggtttttttttttaacttatatcctctttggacctacagtcattccacaataaagaatgcaagaatcttctccacacgccacaagtcttagttaaccaaatcttctgtccattttctcataaccattaggagccctccaaaagccctggaagatgggttttcctttaccctcaggcattaaatctccttaagcatctgcaaaaagttctgagttactggcctaacataagtgcagcttaatctcagacgatctccgggtctatctagtgtacatgaggtacacccggacaccgttaagtatcagtggtgtttgcactctcgatggtttgcagactggccacaccttacctactgggtctgcattcaggaacatgtgtcctgtctgttagcactagaagtgatggacacgtgttggctggaatgtcaaggctgtagccaggccccttattttagacacttagaaatcaggactctgagaacttaggccaagtaaaaattatcaaaacaaagaaacaaaacacgtggtggcacaaaagacaccagaagccaggtcgtttgcccctcaccattcagcccttcccagcaaaagatcctactgtgcagctcaacctagctcgcagccggtaccgcgggattttaatgtgcaactgtgagctcgcaggctgttaaaggaaggccgcgccttggccggtgcaccttccccagggcaaggagaaagcgccgctcccggcctcagccgcagcaggctccaggtcccccggcccggagccgactgagacggtgcggtgcccacgctctcgcgagactagcggtcggggcgggcgggtcgagcctcccggaagtgggccagaggtacggtccgctcccacctggggcgagtgcgcgcacggccaggttgggtaccgggtgcgcccaggaacccgcgcgaggcgaagtcgctgagactctgcctgcttctcacccagctgcctcggcgctgccccggtcgctcgccgcccctccctttgcccttcacggcgcccggccctccttgg

SEQ ID NO: 2051 - DNA, 2300 bp, Homo sapien
ttctatcttcaaaatagtccagaattcagcaactacaccacctgctataccacctcccccccatcacccccaaccccccgacacagagaaaacacacacaagtcactttctcttgcttgaataactaaaatagctttctaactggtctccttgcttccttccttgctacactctacagtttattcaactatttcccataaagttgcggagcgatccttttaaaaggtcaatcagattatgtcactcctctgttcaaaatctccatggctttttttccaaagtttaaaagcccaagtccttgcaatggcctacaaagccttaaaagatctggtcacccgtctgtgctcctgatcccttctcctgccccatctgtctgtcctaatctcttaccactctcttcttcactcagctatggtgatcttcttcggttcaccaagtatgctcctgcctcatggcctttgtacttcctatacctctacatgtaaccctctaccttagacttcttctttctcgcagtttggcatcactttactgaacgttatatttagaaatgcaaacctctctctgcttactcttccacacttcccccttcctattatatataggatataacatatccttcttattatataggatatattatatcctgtataatttatttaatttatctgtctcccaccaataaaatgtaggagttccttgagggcagtgactgttttattgctgcattcccagcaccttatgtgcctggcaaatagtaggggccagaaaatgagctgtgggttcccaaagtcagttacggaccatttgcaactagccattctcagaaatctacagaaataaacaaatacttcagtatggggtttttttttttaacttatatcctctttggacctacagtcattccacaataaagaatgcaagaatcttctccacacgccacaagtcttagttaaccaaatcttctgtccattttctcataaccattaggagccctccaaaagccctggaagatgggttttcctttaccctcaggcattaaatctccttaagcatctgcaaaaagttctgagttactggcctaacataagtgcagcttaatctcagacgatctccgggtctatctagtgtacatgaggtacacccggacaccgttaagtatcagtggtgtttgcactctcgatggtttgcagactggccacaccttacctactgggtctgcattcaggaacatgtgtcctgtctgttagcactagaagtgatggacacgtgttggctggaatgtcaaggctgtagccaggccccttattttagacacttagaaatcaggactctgagaacttaggccaagtaaaaattatcaaaacaaagaaacaaaacacgtggtggcacaaaagacaccagaagccaggtcgtttgcccctcaccattcagcccttcccagcaaaagatcctactgtgcagctcaacctagctcgcagccggtaccgcgggattttaatgtgcaactgtgagctcgcaggctgttaaaggaaggccgcgccttggccggtgcaccttccccagggcaaggagaaagcgccgctcccggcctcagccgcagcaggctccaggtcccccggcccggagccgactgagacggtgcggtgcccacgctctcgcgagactagcggtcggggcgggcgggtcgagcctcccggaagtgggccagaggtacggtccgctcccacctggggcgagtgcgcgcacggccaggttgggtaccgggtgcgcccaggaacccgcgcgaggcgaagtcgctgagactctgcctgcttctcacccagctgcctcggcgctgccccggtcgctcgccgcccctccctttgcccttcacggcgcccggccctccttgggctgcggcttctgtgcgaggctgggcagccagcccttccccttctgtttctccccgtcccctccccccgaccgtagcaccagagtcgcgggtcctgcagtgccccagaagccgcacgtataactccctcggcgtaagtgctaggaatgccgctggcctcgcggggaaacgcattctttctatctatagctcgctctgtacatcttctgtctacggcagctattccagaggcaacaactgcttccctctgttctcatctccccattggtggctggcgacccgaatttgggaatggggagattgcccacctgttatctttgagcagactaatctcttgtaagcagaagtgccattcggagtctccagagccctgtggcttggggctgggaatgtccccctgacttca

SEQ ID NO: 2052 - DNA, 2300 bp, Homo sapien
acccagacagctaatctctgctgtttgtacttgttcaaaatgacactatttctcctaaagataaatttagtcattcttgtgagatgtaaatgtttatgcttctcagtcactaagtattttacttcatgttttaattctttctgtaattatttcttagtctatcccttcataattgtagctctaattttaaaatgttttccctaattataaaattatgcaaatgtataaaaagcattttttctgtgttttttttttaattaggattatactatctaaacaattttgtaacctgcctttttcccgtttgtagtagtattatggtgtatgtactctacctccctgcctactgccatgtttcagccatacttttttccagaagatattttaaaagctctacataaatgtgtacaatgtaacaaaatagaataaattaaaagtggttattacattttttttttaatggagtcttgctctgtcacccatgctggagtgcagtggtgcgatcctagctcactgcaacctctgcctcctgggttgaagcaattctgccccagcctcctgagtagttgggattacaggtgcacaccaccacacccagctatttttgcgtttagtagagatggggtttcaccatgttggtcaggctggtctcaaacttctgacctcaggtgatcctctcgcctcggcctcccagagtgttgagattacaggcgtgagctactgtgcctggccaaatgtcttttgataacatgatttataatggctttacaatatgccagcttgtagatttaccataatttatttaatcactgccaatcattagatatttaggttgttgtcagtttatttcatttcaataaatgaggctgtgataaatatccttatacataatctctgtttacatcactgatacttttctcaaaaaatctatataaaattcctagatcaaaaaatataaacattcttaatatattaatgccaaattgtattatagaaaaagtacatttagttgcttagagaagaaattcttagtttcactatagagcattctcttagtgtcttttactgaaatcttttgttcacagaaaatatccctgttagtatatcctcttttattactttgttggatgtttaataagtcaaggattataaattataaataatatatattaaataggtaaatattagtttttttcctctcaaagaaattccttagatattaaagattttactcagtggaactaaactttcctgcctcatcagttattattgcccattattaattgaaagttatattcgtgtttaaaatttatatgtattatatttctaatagacttgaccatagtcagtatttttgtattctaataattataaagaaggtttaaagtctgctttaaaccaaccaaaatgtttctttcacagtacagttttaactgtaatgtgcttatttgttttcgcttatggcaaaatatttgtaacacattgcacaagtctaaggtatgtttttttaaaaataacctaacttgggcaaaagtagaaatgcattggctctcaggattacaagacagctttagtaactaaaccatgaagcatagggatataggcagtagtgtgttggaggtgcttttgctggctcacaagagctgattgtgcacatcccttcccacttccacgttcaatgttgtcgtgttggtagcttaagattgcccatgtcgggattatttccaccagaaagtcagcaaacactccaagtcagaggttcccaccaccctagtcagttgctaaatctttattagcacatcactggacttgagcagatatcagtcgggttcagttgccttcagaactcctgttagaatcctgaattctgcctctatagaggttgacttctgtcagtgaagactagctttctcagtatggtgagataatagtcccatggtagctcccaagttttacagactatcacatactttctgacaccatagagaaactagctttctctgttgcagttagaaaaatactagagaaggtctctcctcagatgcctgccattgggtacttaattcaggggtgaggatgggggatcatggtaaatggggttgtataagaatttgcacatcccaagttgctatgtgaataggaatgcgtttccaggggaaggagaaagagacattacagagcagacagctctatgatgtttactatacttgctaaaatgtgaaattcagctaaattggaatacaaagtagtgccaaaacagcattaggtttgcggagttattttaaacataattgaaaaat

SEQ ID NO: 2053 - DNA, 2300 bp, Homo sapien
cctcatgagtagctaggactaaaggcatgtaccattatgactggtacatgtttaaatttttattttttgtagtgatgggatctcaatatgttgctcaggctggtcgcgatctcctgggctcaagcaatccgctggcctcagcctcccaaagtcttgggattacaagcgtgagccaccacatctggcctgcaaaggctacttctgattgcaggccctctaaacagtcatctcaaaatatgtcaaagtagtatattttggggtaaaatattttgatttccttcaaagccattgtagggttaataattggcctaatttcaatattgctgtttattgggaaatagggaggcccaagggggagaagtgtggggaaatgggcagttggtggagtagtcagaacacacataacatttattaattaagtttgcctttctatatgagtgcagtacatggcacctgtattagtccattttcatggtgctgataaagacatacccgagactgggaagaaaaagaagtttaattggacctacagttccacatggcgggggaggcctcagaatcatggcgggaggtgaaaggtacttgcttacatggctgcagcaagagaaaaatgaggaagaagcaaaatcagaaaccccagataaacccatcggatttcatgagacttattcactatcatgagaatagcacaggaaagactggcccccatgattcaattatctccccctaggtctctccctcaacacgtgggaattctgggagatacagttcaagttgagatttgggtggggacacagccaaaccatatcagcaccccaaaacaattaccatagtaacatcaaagatcattgatcacaaagcactataccagatataataatgatgaacaaatttaaatattgcaaaaattattgaatattatgtgacacagagacacaaagtgagcacatgctgttggaaaaatggcaccaatagatgtgcttgaggcaaggttgccacaaaccttcaatttgtaaaaaaaaaaaacaaaaaaacaaaagcaatgtctgtgaagagcaataaagcaaatcacaataaaacgaggcatgctgttatcatcatctaacaggcacattttggtttcaaaaaaaactgggcatgtattaagatctaatatgtattttaccatccaggaattttctcaagactgtattgcagaaaattttaaaaccagttattctactctaatacagttacttatttttcttcaatatcactttttttctaagtatgtctctcttggacatggttttaatcatttgcaatataaagagacataggcttaatttatagcagccctgagttaacaaaaagagataatcctattcgcttatttgataatccagctgaacctgaagtactgatttcagcctgttcatcacctgaatgggctgccgtggttagagggtttccaacacagctactggaacacttttaaaaggtaatgctgtgatccatgcagccaggaaggggttggtccctcataactctgcaatcctctgggcccagttttctttttcctctcccggttgatgacactaggcccattggtggtacggctttgggtttccttcagtctcaagatctcagtcagggtgggtgaagtggaagaacaagccttcttgcagaccactggttggttggcagcctttgccatagctaatctggttgttttcaggtcagtgacagtcacttttaggagagggttcgtttgctttcaaaatccatctccccgttcctctcagggttctttgccccaaaggactttgcccttccttacgcagtggacaccttggcaccctctgcaaacagacagtcccgcagaggccctcgacgagtgtcactccatctgtttcgcgctcctaggagaggtgtagcagaaagcagtgccccaggcctccacgcgacggtgaagcaggaaccaggggctgccagcagagcagcccaggtgcgtcgccttagggacagagctgccaagtgccgagctggggctgccagagccgagccgggaacggcatttgccagagccgaggcggaagccggagcatttgggggacgggaccgcgggaacccggaaacgcctgggctgcaccgagctggcggtggctacggcgacgggagccggcggcgctgcgggtcagcggtcgcgtaggacccagcggactcggcagcctggggcgcccggcggagctgaaccgcggcccccggtggtgggctcagccggtcgagctgcgcgggaggtgagtcctcagcgcacctgg

SEQ ID NO: 2054 - DNA, 2300 bp, Homo sapien
cctgtattagtccattttcatggtgctgataaagacatacccgagactgggaagaaaaagaagtttaattggacctacagttccacatggcgggggaggcctcagaatcatggcgggaggtgaaaggtacttgcttacatggctgcagcaagagaaaaatgaggaagaagcaaaatcagaaaccccagataaacccatcggatttcatgagacttattcactatcatgagaatagcacaggaaagactggcccccatgattcaattatctccccctaggtctctccctcaacacgtgggaattctgggagatacagttcaagttgagatttgggtggggacacagccaaaccatatcagcaccccaaaacaattaccatagtaacatcaaagatcattgatcacaaagcactataccagatataataatgatgaacaaatttaaatattgcaaaaattattgaatattatgtgacacagagacacaaagtgagcacatgctgttggaaaaatggcaccaatagatgtgcttgaggcaaggttgccacaaaccttcaatttgtaaaaaaaaaaaacaaaaaaacaaaagcaatgtctgtgaagagcaataaagcaaatcacaataaaacgaggcatgctgttatcatcatctaacaggcacattttggtttcaaaaaaaactgggcatgtattaagatctaatatgtattttaccatccaggaattttctcaagactgtattgcagaaaattttaaaaccagttattctactctaatacagttacttatttttcttcaatatcactttttttctaagtatgtctctcttggacatggttttaatcatttgcaatataaagagacataggcttaatttatagcagccctgagttaacaaaaagagataatcctattcgcttatttgataatccagctgaacctgaagtactgatttcagcctgttcatcacctgaatgggctgccgtggttagagggtttccaacacagctactggaacacttttaaaaggtaatgctgtgatccatgcagccaggaaggggttggtccctcataactctgcaatcctctgggcccagttttctttttcctctcccggttgatgacactaggcccattggtggtacggctttgggtttccttcagtctcaagatctcagtcagggtgggtgaagtggaagaacaagccttcttgcagaccactggttggttggcagcctttgccatagctaatctggttgttttcaggtcagtgacagtcacttttaggagagggttcgtttgctttcaaaatccatctccccgttcctctcagggttctttgccccaaaggactttgcccttccttacgcagtggacaccttggcaccctctgcaaacagacagtcccgcagaggccctcgacgagtgtcactccatctgtttcgcgctcctaggagaggtgtagcagaaagcagtgccccaggcctccacgcgacggtgaagcaggaaccaggggctgccagcagagcagcccaggtgcgtcgccttagggacagagctgccaagtgccgagctggggctgccagagccgagccgggaacggcatttgccagagccgaggcggaagccggagcatttgggggacgggaccgcgggaacccggaaacgcctgggctgcaccgagctggcggtggctacggcgacgggagccggcggcgctgcgggtcagcggtcgcgtaggacccagcggactcggcagcctggggcgcccggcggagctgaaccgcggcccccggtggtgggctcagccggtcgagctgcgcgggaggtgagtcctcagcgcacctggggaggggcgggaaccaggaggctagcggctgcggggcggcccgggaagctcctggaggaggaggaagaggaggcatgcgagggggctgatgtgaagtctgtaggggtgaaggggacggtatcgaagacctgaaatacagtgctagctaagtaggggtgggagcagatgaggtgacacgttgtaactccgacggacgacgtgcggaatgtactgggtggaggaggaaaaaaggcccgaggagaggggtgtgtcaagcgaatgaagacggcagtgtgtgcctcagcgcctggtgcgtgcggagctagtgacgggtgggcccggctggggcccgtcattccttcagtgaacatcccatgagctctcgctcggtgttgagccctgtggtaggcacagatgcacccgaccagcacctggagctcaagaagccgcaggaacttaaagaaatggaaagg

SEQ ID NO: 2055 - DNA, 2300 bp, Homo sapien
aaaaaaattggctgggtgtggtggcgggcacctgtaatcccagctacttcaggaggctgaggcaggagaatcgcttgaacccgggagacggaggttgcagtgagccgagatcgcaacattgaactccagcctgggcaacaagagcaaaactctctcaaaaaaagagaaaaagaaaaagaaaaaaagaatgaactggatttatggcagatttcagaaagctgcataagaaagagatggcatttaaggaattgaagaataagtagaatttctacaaagacagcaaggaaggccttccttgtttcttctttgtaggaagaaatgataaaagcaaacaccaaggctgacaggcatatagcatgttcagaaactggacgtctaattaacgactagtttggctaaaaaataggatatgtggaaaaaagtaatacttgtttaataaaaggaaaaaagaaagaatcatattgggggccgggtgcggtggctcacgcctgtaatcccagcactttgagaggccgaggtgggtggatcacgaggtcaggagatcgagaccatcctggctaacatggtgaaaccccgtctctattaaaaatacaaaaaaattagccgggcgtggcggcgggcgcctgtagtcccagctactcaggaggctgaggcaggagaacggcatgaacccgggaggcggagcttgcagtgagctgagattgcgccactgcactccagcctgggcgacagagcgagactccgtctaaaaaaaaaaaaaaagaatcatattgattttactggagccaccgtcagactcaaattctgaaggaaaaatctgaagcctccctaaataatataaaatttattaaatgcctccctaaataatttacattttattctgaagccgatcgagagtcactgcgtatttctgaggaaggaataaccaaaaaaagaaagtcataagatctttggctttaaaagtaatatggaggcaagtgactggaagggtgccaggctgaggacaagtccagtttggaagttattgctatagtgcaagtaagaagaggaaagacgagcatatttagcagacaggtagtgggaatgaaaaaggggagaactaaatttgagatgctgaagagatagaatcaacagttgggaggaaagttagcctcagaaatataagtttacaagtcattcccttgaaacaccctgagtttaccagtgaaagtgaataagaacaccaagtaagaaactgcaccaaatttcatctttaactactaaagtcgaatgttgatttcaaaaacgaaaagacttaattttcaaatactgcatttaagagaacataataaaagatcgtcttttactataaagcaatgcacccacacacctgttctgatgagaatctcaccccacttcaaacagtccttgtgttcttactagccttaccaagggcagcctttccatttctttaagttcctgcggcttcttgagctccaggtgctggtcgggtgcatctgtgcctaccacagggctcaacaccgagcgagagctcatgggatgttcactgaaggaatgacgggccccagccgggcccacccgtcactagctccgcacgcaccaggcgctgaggcacacactgccgtcttcattcgcttgacacacccctctcctcgggccttttttcctcctccacccagtacattccgcacgtcgtccgtcggagttacaacgtgtcacctcatctgctcccacccctacttagctagcactgtatttcaggtcttcgataccgtccccttcacccctacagacttcacatcagccccctcgcatgcctcctcttcctcctcctccaggagcttcccgggccgccccgcagccgctagcctcctggttcccgcccctccccaggtgcgctgaggactcacctcccgcgcagctcgaccggctgagcccaccaccgggggccgcggttcagctccgccgggcgccccaggctgccgagtccgctgggtcctacgcgaccgctgacccgcagcgccgccggctcccgtcgccgtagccaccgccagctcggtgcagcccaggcgtttccgggttcccgcggtcccgtcccccaaatgctccggcttccgcctcggctctggcaaatgccgttcccggctcggctctggcagccccagctcggcacttggcagctctgtccctaaggcgacgcacctgggctgctctgctggcagcccctggttcctgcttcaccgtcgcgtggaggcctggggcactgctttctgctacacctctcctaggagcgcgaaaca

SEQ ID NO: 2056 - DNA, 2300 bp, Homo sapien
tcaattttgtttttctttttcaaaatcgttttgatggtctaggtcctttgtatttccatatgattttaaaataagcttgcttggtttttgtttgtttgtttaccaaaaaagcctacagcgattttgttcagaattgaattgcatcttcagttaaatctatgacaaaggatgtgatcatcactaggaaagcagtcaggtattagacactgcattaagtccttccttgaatccttgaattcaagtaagatctgatagatctttttttggagacgtagtcttgctctgccgccaggctagagtgcagtggcatgatctcggctcactgcaaccttcacctcccgagttcaagctattctcctgcctcagcctcacgagcagatgggactacaggtgcgtgccaccacacccagctaatttttgtatttttagtagagacgaggtttcaccatgttggccgggctggtctcaatctcttgacctcatgatctacctgcctcagcctcccaaagtgctgggattacaggcatgagccactgcacccagccaggtagatcatttttttgtctaccatggtaatggtggttgatagtgttcagattttctatattcttactgggttttcttttttgttgttattttactaattactgagaaaggtagggtaaaaatctttaattatgactgcatttacctgttttcccctttagttatgttagtttttgctttatgtattttgaaggtatgttattaggcacatatgtgttttaaaatggttatatttttctaatgtattgacccttttatcatgatgaaatgtccttctttgattccagaaataaatcttatgtaacccattttggctgatattactaaagtttctttaatttttttagttatttttttcatgatatatctttttttgtccttttactttttaacctatatatgtcttcatatttaaagtaagtctcctggagtaatactgaattgctttagggaaaatatagggattttgaattagtttcattgggggaagctgggtgaagggtacatatgaactcttgtactattttttaaactatgtgagtctaaaattattttaagtcttcataattgcttgttgctgcatttttaagatagcttgcttgaaattcttttctgactattgcaacaactgtgtcatctctgcattgttgtctgttggttgtccttactcatccaagttgagaccttttttctgtttgttggtataataaatatacttactttggattgtttcctgaactttttgcatattatgagactctgtttcctatttaaatcttctatgttaatagacagccactggggagggaggaagagtactgcctccttgcaaacatttgccttctataggacaggaatggtcagcagggctctgtgccacagtttctgtggctgtaacccctagtgggagggggaagggccaccacctctgctctcattggttcaagacgaggatggtcagtaaagttctttcttgctgattacacagtaaccagttgaaaagattttattctgaaagactcttgccttctcaggcctttggttagagaaagtatgtttttcttggggcttttgttgttgtttttgttctatgcctttgagcagtttcaggttttgggctgctgtagcacccaaagtagattacatctgtagcaaaaaaaatctctagggaactcactgctgagtcatccgtcaagatctgatgtctctatccaatttaccttattttcttcacctttcagagtcttctggtagttgctttttgtttccaattcaaggtttttggttgtaattagcagaaagaataaggtggagtgtgcttatttcatcttgagtctcttggtttctgtttttttttcttttttctttttggtggcaggtggaggagagacctgcaggccctctcccttctccctctcggtgtttttaaatatactagttttcatatgttgtaatcttatttatttgccctgtttattttgtttttcaggcaaatgaagataaaacaatgttcgccaacctaaaatacgtttccctgggaattttggtctttcagactaccagtttggttctaacaatgcgttattccagaactttaaaagaagaaggacctcgttatctatcttctacagcagtggttgttgctgaacttttgaagataatggcctgcattttattggtctacaaagacagcagtaggtatctaggttttttgtttttaatcaatgcaatttatttagtttgcatatatatat

SEQ ID NO: 2057 - DNA, 2300 bp, Homo sapien
tagccaggcatggtggtgtgcatttgtagtcccagatacttgagacgctgaggcagaaggatcgtttcggaagaggctgcaggaggccatgatggcaccactgcactccagcctgggtgacagagtgagaccctgcctcagaaaataataataggccacgcatggtggctcacacctgtaatcccagcactttgggaggctggggcgggaacatcacctcaggtaaggagttcaagcctggccaacacggtgaaattccatctctactaaaaatacaaaaaaaattagccaggcatggtagtggggacctgtaatcccagctactcgggaggctgaggcaggagaatcacttgaacctgggagctggaagttgcagtgagccaagttggcactattgcactgcagcctgggcaacaagagcaaaactctgtctcaaaaaataaataataaaaaaagtttcaaaatgagaatatatgtttcaaaacaagtataatgaatatacttattgattggaaaatataattagaagtatctatcaggctataaattgcttttcttctcccttccatggaaattagtttttttttccatttttagtcagtatgaaaatacaaggaaaaggaaattcaatcaaatttactttttaacattttatttggaaataatttcaaacttacagaaaagttgcaaaaacagtacaaagaactcatacattcatttactgtttttccttttaccctatatattagttatttatagctgtgtaacaaataaccccaaagcttagtggcttacaccaagtacttttcatcttacactgtttctgagtcaggattccaggagtggctaagctaggtggtcctacctctgggtctctcatgaagttgtagtcagccaaaggcttgaccaaggttggaggatctacttccaaagtgactcactccgtggcatttggtaggaggctacaaacagttcctggacaactggatctctccataggctgcttgagtgtcctgaaaacacggaagcaggcttccccaggctccaagccccaaaatgaatgaaaaagagacccgcaaaggaagatgcagtgccttttatgacctagcctctgaagtcaatactgtcacttctgttttgatctatcaagagtcactaagcctagtctacactcaaggggaggggaattagagtccacctcttccagggaggaatatcattgaatctgtgaacatatcttagaactaccatacctagtttcagtacttttaaacattcgccattttgctttgtccctctcttttccccacctacatatacatacacatacatgttactccctaaccatctgagagtagggagcatgcggtgtatccctatccctcgtgtttttctcttaaggaaaaggatattctattatacaacacggtagttatcaatatctaattttaacattgtgatactttaaagtccacttccacttgtgtaaattgccctttctagcaatgttcccatcaaatttatttttaaacaatacagtaaaaacgtagagggccacaaagggtgacatcggtcaggtaaggtattttttttggcagggaataaaaaaggtcctgggtctagggaggtaaacaagcgtgagccagctgagttctagcgggggtccctgaacaccaaaaggacaagactgtttctgaaacactacattatctcttaagttacccattacttacggaaaatgattttttactgttcccttcggttcctgtcttggttagaacacagctggagattgtgttaatagcttaggacgtctgtttccgtgagcaggtaacaactttttgaaacaaattccctcatctgctgaagaagggggacaaaaacggcccctatcgcccagaaccgttgcgaggatttagctagctggtgacgccggagcacgaagttgtacaggtagccagcagcacccacgcgagcccgcggttaccctggccgcgcggctactgtagagtgggctggcggcgagcgggcggggcggtatcacgcgggaggggcggggcccgctcgtcggctgatcgcacgattgtgacgcgccgccggaggcaggccgggccctcaagatggcggcgggcgcccagagcggctcggcccggcagtagtggtgggacggcactagctgctggggcctgccgccccgggagtggctgcagcagcgccaggaatcgaggatggtaaaatgacccaggggaagaagaagaaacgggccgcgaaccgcagtatcatgctggccaagaagatca

SEQ ID NO: 2058 - DNA, 2300 bp, Homo sapien
gcattggataatagaagcattagtttctaagtcaaacaggaactcagttgcctcatatgtaaagtgataatattatctaattcacagtgttgggattaaacaggagtacatataggctgtaaaaatggtagctgctgtttatttttccagttgcctggaattgccttttcatttgatgcattccagcggttctcttgctgcccactgcaaaaaattgataccacatgatttgagaacaagccttggaaaggatagaataacttgttatacattttcataggttgggattttttttctttatagaatctttctagatctacttcgtggcaattaaaaattacttattaattttcccaatctcctatcctagataatatatccatctgaaagagaattataagtcagttattttggggaagcagcatagcatagtgagtaaaaacataggctttcaagtctgatctcttaggttcagcttcagctttgccatttacttactgactgtaatcttagacaagatgtttaacctctgcatatcagttttctgatagggctgttatgagggattaaatgagataatatatgtaaagtgcccaatgtagtgccctgtgacatattaagtaccatataaatatttggttattaatggtcatatgcatgtcatacaaatctgaatatgtaaaataaatcagattgtagtatgaatggatgttcaaaaaggtaaatgtagaaattttattaagactgaaatatagcatgtgatttttattttggtttttattctttaggtattacatgaaacctttcctaaacatacatttctgatgaacggcttaattcaaggagtaaaggtaggatcagtcatacatatatatgtgtatatatacatacatacacatacacgcacacggatgaacatacataaatacatatatataactatgcgaatatatgtttgtttactgattaataacttaatttttataattagatggagtatattttgagagataacttaatactttctagacttgagttttaaatatgatctaactacaatatagccaatcatgcataataataaaccacatcataacagattccctgtttttatgttggcattttaattccagagatctcaatgattttgtaagactacagattgaagaggaaaaaactatactaaaaaacccccatcaatataaaactgtatcagtagggtaaagagttggttattatatgaattctttgctctttctttttcgtgtttttttttttttttttttttttttttgagacagagtcttgcactgtcacccaggctggagtgcaagtggcatgatctcagctcactgctgagaacctctgcctcccaggttcaagcgattcttctgcctcagcctcctaagtagctgggaccacagacatgtgccaccacacccggctaattttttgtatttttagtagagacagggttttgccatgttggccaggctggtctcgaactcctgacctaagtgatctgccctcgacctcccaaagtgttgagattattggtgcaagtactgtgcccagctcaaattctttactcttgattcagtttgacaaacaagttttcgaaataggtaattagcctgttttatatatatataaatatatgttttatgttttatatatatatatacacacacacatacatatacacacacatacacaaacaggtaattagcatatggaattgctattgtggatttattgtgattgagaatttattagagcagttcatatttaatacctacctggagccccacagatgattctaaactatcttgggaaattttaaatttatatatagataagcaattgtttatttaaaagtttgtgatatatttactttagaaacaaagttgttgaaaatttttctataggagtaaaatgatttatttttggttcatgctcatagatgtgtggtattcatttttttcatttaatttttttagggtttgttgtcattccttagtgccccgcttattggtgctctttctgatgtttggggccgaaaatccttcttgctgctaacggtgtttttcacatgtgccccaattcctttaatgaagatcagcccatggtatgtgcacatttagattatagcaactaaatatcactttcagctattgttttcttaatgttcctttatttctttcacttgtgccatcttggttatgaggttttaattttatttttctaatacatttattctttcacacagataagaaggcctctaaaaatacagtaggtaa

SEQ ID NO: 2059 - DNA, 2300 bp, Homo sapien
gtccaacccatggtccacaggctgcacacatggcccaacagaaattcataaagtttcttaaaacattatgcagtttttttttctttaagctcatcagctattgttagtgtattttatgtgtggcccaagaccgttcttccagcgtggcccagggaagccaaaagattagacacccctcccctaaggaccagcatgactggcagtcaaggaggggtgtttgtacagtgcccaggctctcaacccttcctcaactaaaagagttaaaaaatttaaataggccgggcatggtggctcacgcctgtaatcccagcactttgggaggccgaggcgggcggatcacgaggtcaggagatcgagaccatcttggctaacacggtgaaaccccatctctactaaaaatacaaaaaattagccgggcgaggtggcgggcgcctgtagtcccagctattcgggaggctgaggcaggagaatggcgtaaaccccgggggcggagcctgcagtgagccgagatcgcgccactgcactccagcctgggcgacagagcgagactccgtctcaaaaaaaaaaaaaaaaaaaaaaaaatttaaatagaggcagggtcttgctgtgttgcccaggctggtcacaaacttctggcttcacgcagtcctcccaccttggcctccccaagtgctgagattacaggcatgaaccatcacacccagtcttcttaaaaaaatctcttttacctatgaatttgccagtaggatttattggaacagagggctccaaggcttagaaagtttgaagacagtgtcctgagaggctatcatttattttattttatttttgagatgcggtctcactctgtcaccctggctggagtgcagtggtgctgtcatggctcactgcaacctccgcctttctggctcaaaggaattctgccacctcagcctctgaagtagctgagactacaggtgcacaccagcatgcccagctaatttttcttttttcttttttgatacagacagggtttctccatgttgtccaggctgtttttaaggcaagaatctaattctttacttttcctgccaaaggagagagtataagaaaagtggggccaggcttggtgtctcatacctgtactcccagcccttcgggaggctgaggtgggaggatcgcttgagctcaggagttcgagactagcctaggcaacatagcgtgacttccacctctataaaaaataaacaaaattagctgggcgtggtggtgtgtgcctgtagccccatcaggagatcttcaggcaggaagatctcttgagcctgagaggtcaagactacagtgagccgtgatggcaccactgcactccagcctgggcgacagagcaagacccagttcccccactctcgcccccacaagaaaaaaagataaatggcacaggtaggaagagaaaagggagggtgtgcaacagaaggcctgacataaatcaagattatgaaaggagttatgtggtgttgaggaaaaaagtagcctgactaatctctgtctatccttaatttattgcaggtttcagcaacatttgctgcaagtttagtcaccagtcctgcaattggagcttatcttggacgagtatatggggacagcttggtggtggtcttagctacagcaatagctttgctagatatttgttttatccttgttgctgtgccagagtcgttgcctgagaaaatgcggccagcatcctggggagcacccatttcctgggaacaagctgacccttttgcggtaagtttatactttttccttctccttgataaaaaagtgcatgattcagtgcagcattaatattttgttgtggatatttctttagggaaaacatcttgggtttttcttttaacattttgaaatacttttcagaatagtttggggaatatgaaataaataaaaaggacaactagttgtccatgagtacactgccaaaaggaatctctgcgtattcttaagaatagttcagtggttttgatagaaaaccttatatcaatcagtctttttcttgttctagtccttaaaaaaagtcggccaagattccatagtgctgctgatctgcattacagtgtttctctcctacctaccggaggcaggccaatattccagcttttttttatacctcagacaggtaaaatcctcttccactaaggtggacttttctttcattgtctagtgctttaataaaaatatttaatcttgagagaactgtaatagaagtggcctttaaaaatgaatatcattggacttggtatagtggctcacgcctgtaatct

SEQ ID NO: 2060 - DNA, 2300 bp, Homo sapien
taagcaagaagtcctctctttgcgaagagagaattctacactagatgttgaatgccacgagaaagaaaagcacgttaatcagctacaaacaaaagtggcagttttagaacaggaaatcaaggataaggaccagcttgttttaagaacaaaagaggcatttgatacaatccaggaacaaaaggtctacttttaaatttttctcagaaattgataatcatatttataagtaaacacaaatgccctaattattcatgtttttaaaaaatatatcaggtggttttagaagaaaatggtgagaaaaatcaagtacaactaggaaagcttgaagctacaataaaatcattatctgcagaacttctgaaggtttgttttaaaaattttatagactagtatttcattaaattacatagaaatatacatatgaagctcttttataggcaaatgaaattatcaagaagttacaaggggatctgaaaactttaatgggtaagttgaaattgaagaatacagttactattcagcaagaaaaactcttggctgagaaggaggaaaaattacaaaaggaacaaaaggaattacaagatgttggacagtctcttcgaattaaagagcaagaggtagttaatattttaaatttttatgttgtaactaaattttttcctcgttttaaaaatttatgctttgttacattaacaaatggctttggtcttgtttttttttttaacaaaagaacatgactagattgagtagatggtaataacctgtttcagtttggaaagttagttatcatgattcagataccttgattgctcatgtatgtctatgtttgtatacacatgtaaatattttattacataattgagctaattcctttattctcatttaataatagtagtagtaaccatttatgtaattatttagttaataataatacattcttcagtttttatttaacctttattttgcttgacttattgtgatgattgatatatttcaggtatgcaaattacaagaacaattagaagctacagttaaaaaacttgaagaaagcaaacaacttctaaaaaataatgaaaagtgtaagtatgttacgtgttaatgtaaatgaggtttgtagttttattcttttatttttttgagacacggtctcactctgtcaccgaggctggagtgcagtggcatgatctcagctcactgcagcctccaccactttggttcaagttatcctcccgcctcagccccccaagtagctgggactaaggtgtgcaccaccacactcagctaattttgtgggttttttttgtagagacgagattttatcatgttgcccaggctggtcttgaactcctgagctcaagtgatccacccgccttggcctcccagattgctgcgtttaggtttacaggtgttagccatcgtgctcggctgtagttttattcttaacctgaaaattttattcgaattcataaaagtagacattggccaatatataagtaatttctgctttaaatatactgtcttaatgccttttctataataaatttatatcatctgcccagtaaaagagttatcatctttataaagaaaaccatatcccataggtcagtaacccacaattaaaactgttgaaaatgttgactgtaatttattgtttaaattcttcattattcctttttttaatagctgtgtttacctaataataacaatatgaattgtttgaaaacaaaacataaaaataagattttaactaacattttctcagtttatactactgggtatcatacataagattgtgaattttaagtaaactgtaagatattctagaagtgaaatctttcaaagagttgcttgactagcagaaatatgtgcttcggaaagtaatacaataaggagtcctatgtggcagcttctaaaataagaaactttaatgacaaaaatttaggtgaacctatattgctctcctgtgatgtcaggtagttgtaaaaacttataatttaaaaatcttaatataatttttaaatgtttaagatgattagaaaaataaacagtcaatattctttaccttgcttcttgttcttttatttaagtaatcacgtggttaaataaagaactaaatgaaaatcagctagtgagaaagcaagatgtattgggaccttctactactccgcctgcacattccagcagcaacacaatcagaagtggaatttctcctaacctgaatgtggtaagatttaaaacaagatgtgagtgatcttagtgaatttcctgaaacaaaagtatttccagattgttaggaagtt

SEQ ID NO: 2061 - DNA, 2300 bp, Homo sapien
catctaggagtttccatattgaaaccaaagtcatggcctcctttatctttctataatcattctaaaacagtgttgtccaatggagatacaatgtaagccacaaatgtgagccaggtatgtaattttaatttttttctttttcttttttttttttcagagacaggatctcgctctatcacccaggctggagtacagtggcacaaatagtagctcactgtaacctcaagcttaggctcaagcaatcctcctgtcttggcctcctaaagtgctgggactacgggtgtgagccaccatacctagcctacttttaaattttctagaagtcacattttaaaaagacttttaaaagcaggtgaaattaattttaataatacattgtatttaacccaatatacccaaaaatattgccatttaacacataatataaaaattgacatattttacattcttttttcatagtaagtcttaaaaatccaacgtgcattttcatatgtaaagcacaacaattcagataagccccatttcaaatgtctaataaccacatgtggctagtggctaccatactggacagcattaaaagaatgatcaactaaacctacagatctccatatgcagctgctggttttgggaccatctccttgaccggcttgccattgatttttgaccgaattctgaactatatatactacagtttgacattactggcaactcaataaggcaatgtcttcattttttatgttacatttgtacaccacttagttttcacatacgatttcacacctgatcctcattacaaacacgtgaatacgcaaaagatttcacacctgatcctcattacaaacacgtgaatacgcatgttatatcagttttacaaatgaggaaagaacgttcagagaaaaaaagagacaaccattgagtgttagaactgagaaaaaaaaagtaagtctcctgacctctggtcaaatctatttacgccccaataataccacctccttaatcaaagttgcacttctctgtgcgactggtctttatttcctccagtgattgtaaactccatgaagaaaaggactgtttttcctgaccactgtattcccagtgcccagtaaggtgttttacaaggaggcaatatttattgaatgaattaatgacgtttctgcttttctcatttttagtcggttaaatgtaatttacttttttaaagcaactgatgtgaagagccaaagtacgccaccaaattggtaggtttttaaaagttgaactttactgccaacatacttcaaaagagaacgagggggaaaggctcggagccaaggcctgagttctagtcctgaccctgccatgaactggctgtgagccctcacgtaaatttttttaacttctctgggccagagttcttatctgtcaaaagggaagagtagggctataatcttcacgattccgtgcacaggtagggtttttgacattaacttgatgtgagccggcttcctaactcctcacacccttcctccagtcccctctgcaacggccgacttggtgagagaggtaaccaccgggccctctgggttccctatccgcttcctaggggggccgactcgacacctaggtgcaaggtggatcccacgggccagaaccgccatctttccccattggcctgaccccaaccgccacccgcgggcactggatgacgcggaccttacctctcctcacagtctttgcatttcacctgcaacgggactagttggtggaacagcacttggctcatgttggctcgctgcctcggctggtgtgcagaaaagcccaacaggcccggccctcgggattagcctgagaggtccgggtcctgataaagtttgagtttggcgctcggcttctgcggaggaggcggggagggagaaacgaggggaaggcgtaagagacttggccctcgccagccaccatcggattcttccggttctgcggaggataaagggaagacggttgtggtagttccgggtattaacctgtgtggcgcgggggctgaggcagccatgtttgttaagggaaggagacccgaaggaagcttctaacttttcttctggttgccggatgctggacaccggaagcgagccctagaattatggcgacctccgcgacgtcgccgcacgcgcctggttttccagctgagggtagatgcggttactatgtggaaaagaagaaacggttctgcaggatggtggtggccgcagggaaaagattttgtggtgaacacgctggagccgcggaggtgtggtatcgccctactctctcaagagtcggaaata

SEQ ID NO: 2062 - DNA, 2300 bp, Homo sapien
gtcttcattttgccaagtgttcactggaggcaaaatcagtcccagtcgagaaccactgggtaaaaatgagtggtgtcatcacagctatatatgacacttagaaaaaaagatggaaacacaacatccagttacatcataaattacagattcaggaggatagccacaatttaaaacgagatagtagtcaataaaagtgtttccacttgatgttttgcggtctctcttcaagtgtctaatgacaatatgtcgttcctctataggaatactaatcagcttgtaaggatttattcatattctactatcatcactatttgttttcaccttccatatatctggataaggtggagtctaaatccttctcctatcataactctcattcttcaacaagggatgtttgccagtcccctcaaaaccagtcaatagactatgggcataattcagagttcccacaacaaatcacgtctcccatattccaaaacaagaatgtccttgtttcagtatgcttcacttttggtaaatgccagtcaaaacaaaataggaagtagactacaactatgatggagagtggcagatgaagggggtcaggggactgatctgcactggatattgtctagaagaataaattccttaagaaataaaataatgcaaataatactgaacattcagaagcatgaaatctgatgctgatcgctttggtttattctttatagttctgtggaactataaggacatgctctcttcctatgagcattttgctcctctggtttttattttcccatctcatatatatcctaaagtaatatacatatatacaaatataaagtgtttgatagtacatttatatgcataattatcaaacaaaattgtatgctttgttctcaattgtaaaaggtcaattcgtatatatttaaaaatctttccttcccattccagcaaagttgcattcttaaaaactgtaagtcgaaaaaaatttttttttcttttttgagattcagtctggctgtcacccaggctggaatgcagtggtgtgatcttggattattgccacctccacctcctgggttcaagcgattctcctgcctcagcctcccgagtagctggggttacaggctcgcaccaccacgattttcttaattttagtagctcgcgccacggctgattttcttatttttagtagagagagggtttcatcatgttggccaggctggtctcgagctcctgacctcaagtgatccgcccgcctcggcctcccaaagtgctgggattacaggcgtgagccaccgcgccgggcctcaagtctaaatttttaaaagaaagtttcttccaaccgcattcacgagaagtgcttctctttcatgaaataacaattagaacacaactagtgaaacctttgggacttcaatcactactttttctaaactaccactttccagcaggaagacggagcggtagcttggggtaaaaattaaaacctagcattaccatgagttaagatcgagataaatagatcaaaataaatgggtcactgctggcgctttacttagaaaaataaaaaatttctcatcactagaactcataatcgctccgcaaggagggcaaaactgggtttattaaagtgaaagctggagaatccaggggacacaagcagaaagctgtcaaagaggggaggggccgggttccagcaccgacaggaccaggatacttatttccgactcttgagagagtagggcgataccacacctccgcggctccagcgtgttcaccacaaaatcttttccctgcggccaccaccatcctgcagaaccgtttcttcttttccacatagtaaccgcatctaccctcagctggaaaaccaggcgcgtgcggcgacgtcgcggaggtcgccataattctagggctcgcttccggtgtccagcatccggcaaccagaagaaaagttagaagcttccttcgggtctccttcccttaacaaacatggctgcctcagcccccgcgccacacaggttaatacccggaactaccacaaccgtcttccctttatcctccgcagaaccggaagaatccgatggtggctggcgagggccaagtctcttacgccttcccctcgtttctccctccccgcctcctccgcagaagccgagcgccaaactcaaactttatcaggacccggacctctcaggctaatcccgagggccgggcctgttgggcttttctgcacaccagccgaggcagcgagccaacatgagccaagtgctgttccaccaactagtcccgttgcaggtgaaatgcaaagactgtga

SEQ ID NO: 2063 - DNA, 2300 bp, Homo sapien
ctacccatgccagcaaaaatggacaccagcgacacaagtcacccaacagagccctttgttggtgtatataattagtggaaccttagtagtgtataaaattagtcacataccccattccagtagcaggggaggctgggatttcttttccccctcaaattctaccttggaaaggtaggattcatgatgtgggggattataaaaatgtggatggtgttcaaaatattttggacagtcgtaaatgacagatagatattcattatatagtgcctgtctctttgcattcactttctacatccctccaaagtcaccaaaattctggctaatttgtgtcataaatagctcaggcatctattcactttccctatcctcccgggcatttctttagtgtaagtcactccatggggatgggaaataaaaggtagataagggaaggagaagagagatgccttgaaatttgtgggttctctataaatactgtcaaattaaaatttaattgtacgtagtgccaaaggcagaaagaaatcttaattttctccaaggtaacaatatactgttctttttaactgaaacaaaactccctggatctctctctctctctctctctttttttttttttttcttcagacaaggaaggctctgttgcccaggctggagtgcagtggcaccatcacagcttgacctccctggctcaaggtatcctcccacctcagtctcccaagtagctgagactacatatacacaccactacacctggctagttttattttattttatttatttttatttttatggagacagggccaccatgcctggctactttaattttttttttttttttttttttttggtagatacagggtctcactctgttgctcaggctggtctccagctcctgggctcaagtgatcctaccatcttggcctctcaaagtgctgggattacaggtgtgagatcttgatttttacttatgaacacatgcaagcactctgtatgtgttgggtggtgtacactctcgggacagggaagttagagtttcaattgtggccatggcttctttactctttctgtgatcttgagcagtcccacaactcttagaacttaattcattatagaagtgttggagaatttctgtgagataatcaggcataaatttttaaagcattaatattgctgagatgtccaaatgactacataaattatgatccacctacacgctaaactgctatgtagccattaaaaagaatgacgctgctctaaatatactaatatgaaacagtttccaagatatcctgagtgaagaaaagacagtatagaacaatgtatatagtatgctaccatttttgtatgtgtgcatgccttcacatatgtgtgcttttaagggatataggcatatttaagctcgtaaattcatagaccatctttgtaaaggtacacaaagaactggcaatagtggttgccttcagagaagagaacttgaagagaacctccctactggaggcagggatggtggaaggggtgggggatggagagagtggagattgagcttttgaattctgttccatgtgcatatattataaattcaaaaaaagatatagtttattttttaagaacctggaattaagtcctatctatgaaagctgaagagatcaaagtgagaggtaatttaatttgaagcccaggtacagcagaagtttggggcttctgtgttactcatgcttatccacacctttattttttctttttctaaagcatctgggtctttagttcaaatatttgcagatccatggtttactgggtagaatttttgttgtggcatacatcaacatattccaagtttctctgcttggatggaatagatgcatgaaattctgtgaaatgattaagctgtgaaaagtagaaggactttgaataggcattatttttcaagatcttagaaatagttatgcctgatagttttataatgtctgtagcgtattttgcagtccacagaacgcactcacatacattatcagctgatccgtcgcaaagaagcctcatgtgattctttctattctcagctttgtccatgaactaaaattagaactaggctgacattacatttcacttggttacagctgactggggattttaatcatttggagccacactgaaaaaaaaatttccccctgcaatctactcttaactgatagtcgctaactttggttatgtgtggtaagtatttgacaatggtaagtatttttcaaaaacatttttcctttcttcttcacatgtaaatagattgctgctgatacctatactgt

SEQ ID NO: 2064 - DNA, 2300 bp, Homo sapien
aactaatataactaaaactaatctgtttttcatctctataaatcaacattttctggacatttaatttaaatggaataatgtaatatgtgatcttttgtgcttgtattcttttacttagcataatatttttttgacattcatccatgtcatagcaattatcgctaattcagtcatttttaaggatgaataatatttcagaatatggatgtaccacattttgtttattcacctgttaatggacatctgggctgtttctagattttggctgttatgctgttatgattattcctattcaagtctttgtgtgaacactgttgtcatttctcttatgtagctatccaggagtggaattggtgggtcataactggccatttttaaatctaaaaaaagagaagaaatggggtctttgtttctttcaaactcgaataaaagaattaactagggaatagatggtgtatttctttccagatgctggaatgaaagataaggacacatattatactgaatatagaagcaagaatccattgacataagaagacggtaaaggaaaataaactagttatcttctgaggagcaggtacagttaaaaacgaaattaggacaaagaaagttgtatagcagcagcttggaagggagatgattcacttcaaaggtacaactgccactgctttttatacaaacacatgcttgtgggattatcaaatatattaataatgtctataaacatttttaaggaaatgtaaaaacttgaaattcttttgactactctagattttctgagaaagatagctatttaggccggacccagtggctcatgcctgtaatcctaggactttgggaggctgaaatgggaagatcgcagtttgagaccaggactttgagaccagcctgggcaacatagagagatcccatcttgaacttctgagctcaagccatttgcctgcctcagcctcccaaagtgctggaattatgggcaggagccaccacgcctggcccaagagaccctatctctaccaaacaaacaaacaaacaaaaaagataataagatttattgtttgcattgattttttgtgtgtagatgtgtaatacataaaatggcaaatgagggggaaaagtgtttgggtcatattaaacaatgaagttgtgaaatacctgagattttgtttcataaccactaatcttcaatgttgagcatttaaaatgtatttgttccagttttttttctctgtaattccttagacatctgtgcagattttcattcccacgtaagaagcaataacagactaatgtcatcctggacatttccaggaattggtttcctagttgctctgaggaagattgccttttaaaagaaagctctgatctgttctttaccagttccacttgacctgaatttgacatttctttaagagacaactaaatcaagatcatgtgtctgtgacatgtattgcatatgctagttagctgcatctgatagcagtctgtaaaaagaaagatgataacatgtttattttagacattaggtaatgttcatctttcatgaaaaaaattgattagccaattttggtaatcaaaaacataaatgggagtaaaaaaggcagtcattgggaagtactgctgtatggacttgtgaaacaactagttgtccagagccttgctacaacgtatagaaatattctattttctgtatttggggcggctacactacaagatgaagacggggaaatgttttccaactcatcgctcaggtcctactgcaacataactttcttgaggtaagtacctttctttgtgtttccttaacactctctattttccccatcacatacactaaaaagattatctttggtgcatctgtatttacacagcagtgttaaatttgggctgccctctgccccgcctccgtcccccaggctcttttcactccccgctgggtcccagatcctagggtttagctcaggctccgccctactccttggttggctgttgggtgggaggctcgtttcttccctccctattggtcgcccagggggaggcgcgtttcccatctcctgataggccgcgccgaggagagtctctccagtttgcggcactgttgtcatttccggggtaagatggctgcagtccgtatgctgagaacctggagcaggaatgcggggaagctggtaagcacgtttgggcagatctgaggccgggaaggagtgatttgtccggagtcatccaggagtggtgttttactttctcctccggtgccaggcgtccagggcacgcgtgatggagaggtgaagggatgcatgcaa

SEQ ID NO: 2065 - DNA, 2300 bp, Homo sapien
ttgggcaaaaacagccatatttttcttcttgcagagagcctataaatggatgtgcaagtaggagagatattgctaaattcttttactagcaaggaatataaatattaataccctgggaaaggaatgcattcctgtggggaggtctataaacagccgctctgggaatgtctgtcttacgcggttgagataaggactgagatacgccctggtctcctgcagtaccctcaggcttactagggtggggaaaaactccgccctggtaaatttgtggtcacaccagttctctgctcttgaaccctgttttctgttatttaagatgtttattaagacaatatgtgcactgctgaacatagacccttatcagtagctctgcttttgccctttgccttgtgatctttgttggactcttataagtagttctgcttttgccctttgtcctgttccctcagaagcatgtgatctttgttagacccttactagtagtaaggtctttttgccttttgaagcatgtgatctttgtacttttgtacctactccctgttcttacaccccctccccttttgaaacccttaataaaaacttgctggtctgagactcaggcgggcatcatggtcctaccgatatgtgatgtcacccccggtggctcagctgtaaaattcctctctttatactgtctctctttatttctcagctggccaacacttatggaaaatagaaagaacctacgttgaaatattgggggcgggttcccccaataaagatgtcagataggggtacagcttttttatattccatccctaccatcattgccttacttcaacttctgattatttcttgctggataattgtatcattggcatttctcccttcaggctcttaagcctcttattcacccttctcctactgccaaagccttcattttaaaatgcaagtatcattacttctctgattaatatcttacggcaaattccagatttggttaagtacatagtctgtgtgttccctaaaacattctctgtcgcaaagcagcagagcgttgggattaccagacagtggtgttcacatcagaccacccaggttcacatctcagtcttctagttaaaattgtgtgaccttgtagcaaattgtttaacacaggaagctgtaaaacagtaaaaacagtaagtactttatcatgttatgaatgcatgcagtgcacaacacctaagtgctcaataagtgttgcctgttattgttacagtatattattaatatattgtaattgtccccataataaactctaaatacagtacatgttaattattattgaggatgacattgtaattgattacgtctcagtctctccattatacctccaataacttcgggggtagaagctgaattactcttttttgcttccctagaggtttacatattatttggtactcaattatgtaggaactgagccacaggcagaaccaagaagctggctattgcttctgccctcgcctgaggtgaattgttagctgcactgttcctgggagtcaagagcttgcactcactctcaagcaaaatggcataactttggcttttcagaatattaaactagtgattctgcctttcccgcctctcaaataaatggtgtgtcaccctagaaagaaagataacacactccgcatacacaaacacgcacaccgcaaggaaccaaaggccaagagtatcaatgtaccagggcgcacacacttcgagagacaggttcggtgcatcgcaggatcccaatctttcttgcatcttcagctctaaaagtcggcacctcggggtatgccaggatcctcgagaaaacagatataaacacatatttacccacaaaacagagataaagcacaagcctgcgggataactggaggagttatcttacagttgagactttctgcaacctgcagattttgccgtgcccagggcacaagtttttcagggctcctgggcacccccgcgaccgtcatctcacttccccggcagcttcctcgccccgaccgcagtgttcccagcgcggctcctttaagccgagctacgcgcatgcgcactgactgcggaactgggcgaacccgggggttcgtttctgctgactccagtgtcccgagaggcgccgcttcttccgctttctcgtcaggctcctgcgccccaggcatgaaccaaggtttctgaactactgggcgggagccaacgtctcttctttctcccgctctggcggaggctttgtcgctgcgggctgggccccagggtgtcccccatggcggggccgcgggtggaggtcgatggca

SEQ ID NO: 2066 - DNA, 2300 bp, Homo sapien
ggaggcagaggttgcagtgagccaagatcacaccacagcaccccagcctgggtgacagaacgagactgtctcaaaaaaaaaaaaaaaaaaggaaaatgttattgttgtcacaacaagtacatttgcataaagttgcctcattatacttgagatgtgatttcagcaaagattagaattatacccaaattacagatcaaatctatatccctgatttaattaattacataaaaaagaaaaatgtatttacttcaggtgtaaagaatattttatttcaatacttcaatattgaaatcagctatcacacatatccaccaactgatatttcattgtccatctctcaggagatattcaaagtgagattaatttaatgaagccttctcagcaaacctagaacactgtacttcatcttcaaatttaagtcatagcctttaataagttacttcctagtcattattttatagtatttatgaaatagtgcaatatatcaatgaggtatcatttaagaggcaaatactctatagatttggatttgtcatcccaattccttggcattcaataatataagtatctttagcggcgtcttcttcatcttctgatttcttcacaataaatttagcctgaaatcagaagaggagtatataagtaatacgaagagagatggaggaaagagcccacaactccaacttatgtaggcagagagttaatgtcaagcccattttattgaaaaacctacagagacacaaagatcaaatgattgatgagaaagaaacttaatagcctcaagataacacatttcattgtacaaccatggttcttcttcagaggtatacatacctgtgagttttgtccaaatatatatgcctgggccccttccacgcacactgaatcagaaagctcagatgtacagcttaggcaaataacaattttgaaacctcaaatggtaattttaatgcaactgtattccctatgccctaaaatttttctgaaacatttctacttttatcttgtcaagtcacaaattaccctttaatttctttacattttttcttgctaatttagttccctatatatatcgttcaaaagatccagttcagagaaggtatgtggggaggaggggtggtggtggtgattaacatcttccttcatctttaatgtactgggcttaacatcacatttttcacttagtaactaaagttggctttgaaatattttacctgtatcattgtattttgcttttgtttttgttctgtttttgagacagagtcttgctctgtcacccaggctgcagtgcagtggcatgaacacggctcactgcagcctcaacttcctgggttcaagggatcctcctgcctcagcctccagtgtagctgggaccacaggcacatgccaccatgcctggctaatttttaattctgttgtataggcagggtctcactttgttgcccaggctcaaactcctaggctgaagtgatcctcctgcgtcagcttcctaaagcgctgggattacaggcatgagtcattgtgcctggcctatatcactgtattttgaaaacatcattatttttaaagcaaatgtgattcattttaacaaaactaaatttagaatcaaaacaactagccaggtgcagtggtgcacacctataatcccagctattctgaggtggaaggatcatttgagttcagttcaggaggctggcctgggcaacacaggaagactcctcacaactcccatcaacgtcttaaaaaaaaaaatcaaaacaattaaataggttaagtttgtggcaaaaggatttcaaatatgcctaaaatcttaggattcttggaagcacaatttgaaaaccatcacttgggggccttactgaatgaatagtaatgtttaaaaattctttcactttcagcattacatggtaatgtactgacacagagtggacacttgaaattactgttgaatgaataaatgctgaattctgagctaggtaaccatattaattaattagtaatatatgcatgcgtttatatatttttcaaattacaagcattatgtaaatatgaaacacacgtagcagctatgaaaatcatttctagcctatacataaacctacttaaaactacaaatatgtagacctgaaaggagcatagcaggcctatctagcttaagtctgattttacagataactatttgcattgagacaaagaaagataagaaacttgccccaagtcacccagttatacacaacaaagctgaccaagatacaagctatacacaggttcatagcactttccgttatgtatacatttca

SEQ ID NO: 2067 - DNA, 2300 bp, Homo sapien
cttatgtaaaaaggaagaatggcaattgtgaaaaagatgctaaaaagaaccttcaaacacctaccttgactttaagcaactcaattttaggagaaagtacacatttaagtagcaaaacttggaaactaattctctaaaaaccactgacatctgcaaaacctgaatctcatggaaaagcgttgtaaaactcaagtggtaggaatacccctgtttgaaggccactggtttaaagaatattcttaaaagactgttctacagtgtcaaatcaacagaactacttgcatttggtagtttaaaacaaacaaacaaacatactgaaatggaattttagataaagaacagacataagaatagaagttttttggaaaatagaaattcaagtcacttgtaggacttaccgctgagactcaataacagtgacacatctaagccaagattaatcgtaaactccccgtgtatactgttgaatttaaatctctcactcccagaggcaaaatctctgcactccagcctacacctttaacactgctggcacacctcatcagaagtacagaaatcatttcagtctgaagacccccaaatttatcacaatccctcgaacaacaagtgtagtattactctaaaaaagttttactctaaaatagaaagatatatctcaactattacagaaatgaataacttacaaaacttacccactatgtgaaaacataaacagcaagtaacactattatcaactttaaagcaaattgaacccaactgtccaaggtcatagatatcacagacaaggataagaataatgactatgtacatggcaacttttttcattttactgttccatacagactaattcaggactttctaaatgtatcatagagcatcctctggatctacattttggactatgttttaatcatcatgagaaaaggtccaagatagacccaagttttaatgaattacacactctattgtagtacaacacattaagctgacataccaaactgatttcctttgagtcacaacctcaactgctaccgggaacaggaaaacatctaaatgtggaagcatgttgggtgtaagataacagagaataatgaaagcacattccatttgaaagacactcatttatttgttaataacacaagccaaacaaaaacatatctggggatgaatctgcgaaacctactagggttaaaattttacttctcttaattgtttggcttccaaaacatatttggcttccaaaacagattcaaattcaaaaaatatttacgaccagctgtggtggctcatgcctgtaatcccagcactttgggaggccaaggtgggcggatcacgaggtcaggagatggagaccatcctagccaacatggtgaaaccccgtctctactaaaaatgcaaaaattatctgggtatggtggtacgtgcctggagtcccagctactcgggaggctgaggctggagaatcacttcaacctggaaggcggaggttgcagtgagctgagattgtgccactgcactccaacttggtgacagagtgagactctgtctcaaaaaaaatgaataaataaaataaaaaataaatatgtacaaagtgcccactaggtagaaggtatatatcattagaatgagacaatgcctattaaatgttattgttgccgggtgcactggctcacgcctgtaatcccaccactttgggaggccgaggcgggcagatcacgaggtcaggagttcgaaaccagcctgaccaatatggtgaaaccctgtctctactaaaaatacaaaaattagctgggcatggtggtgtaataccaactactcaggaagctgaggcagtagaattgcttgaacccgggaggcagaggttgcagtgagccaagatcacaccacagcaccccagcctgggtgacagaacgagactgtctcaaaaaaaaaaaaaaaaaaggaaaatgttattgttgtcacaacaagtacatttgcataaagttgcctcattatacttgagatgtgatttcagcaaagattagaattatacccaaattacagatcaaatctatatccctgatttaattaattacataaaaaagaaaaatgtatttacttcaggtgtaaagaatattttatttcaatacttcaatattgaaatcagctatcacacatatccaccaactgatatttcattgtccatctctcaggagatattcaaagtgagattaatttaatgaagccttctcagcaaacctagaacactgtacttcatcttcaaatttaagtcatagcctttaataagttacttcctagtc

SEQ ID NO: 2068 - DNA, 2300 bp, Homo sapien
ccccatgcaatattttaaaaaacattaattacttacagagttttattatctttgtaaaaatgctaaggaaaaataaacattttcatttgaatttaaggacttgtatttgttaggtcataattcattcctcatgatcacaattttaagcaggagagttatataaaagatttttgtaaattcattttggaaaataacaagaaggtgttcaactatatctggcttctctgaaagtgtagattggagttcattagactatttactttgtgcaattaaaagtttatgaactgaatgagaactctgacttctatttctaacgcactttttaatgaaaaattgttggggaatttgaatttagattatgcaagaattttaaatcagcatcttcggaaatacaacaacatctttggatttatttagccttttaaacaaagtgggcaagtttatcgagagattcatatactttgtttttccctatctttcatataagaaatactagattttttttcaataaaataatttgaggcctggcgcggtggctcagcctgtaatcccagcgctgtggcaggccaaggcagggcggattgcttgtgctcaggaactggagacgagcctggccaacatggcaaaacccggtctctacaaaaaatacaaaaattagccgggtgtggtggcgcacgcctgtagatccaactatttgggagaatgaggcacgagaatcgcttgtactcgggaggtggagattgcagtgagcagagattgagccaccgcactccggcctgggtgacagagcgagaccctgtctaaaacaaaacacacattaaaaaaaaaaaaaccacaaacaaaacctgcaattggccctcgaagggctggttccctcagtcagctctgcacgggtgcgccccctttctccctagaggtcaacaagcgactgcgaaggaaaacgccgccacaagtttcttgctgtttctggagagacctctcagagcgcatgctcttcggatagtcggtctgtagcgccattttcgtatggaagggactgcactctgattaggtacagccttaggacgcccagcgttcaagttgttcaaacagtacgtagagcctcgcagagacaagtcaatggcctcttttagcgggactcctgcctggagcgcttcagctgagactatgtaaagaaattcctttgtgttaaccttcctccttggaccagtggactctcctctctctcctgttccctccgcgcccgcccaggctggctcagcggtctcgccccgcccctccgggaccggagcactgtaaagattaggcatctgtgatgcttttgcgctcacattggcggcccagatgagagggcgtggagaaccagatgggaaactttttgtcccgtgagaacaaagtacaagttatatcagagtctggtatgtgtagaggaaaccaatacatgtactgtgagctaggagctggtgcttctttttcaattgtattttttataaagatgcagaccccctcagtgttgggcgtggggggtggctgaaatgttagctagaggcgaggcagggcacggagatctgaggtttttacgagtgtgtgtgtgtgtgtgtgtgtgtgtgtgtgcgcgcgcgcgcgccctacaagagtttagaagagcatgggtgagtgggcgagaaagaaagagaatgagagagagagagaaaagaaatctggagtgggacaagacttagagggtgcagaaaagaaagggggcgccagcacatcctagcctccgaggccgcgacagcgcctttggcgatgtccactctcaaccccgccgtttcattcataagtttctggcctacaggccccgcccgctcccctgggccgagggccccgtttcctgaacagcaattggtggacggcaacaaagccttagcaaccggctcctagtgacccgcggggcgcctggtaactggggctgctgcggagaaaggagcggggctgtccctttaagggatggccgcggagtcgtgaaagtggagggggctgagggagggcggggaggaaggtctgggggcggacccagggggaggaggaggaggaagagtaactgctgaaaggaggtggcgaaggaggatccggagcagctgctgccagcccgcgggcactgaagtcctcccggctgccgctcgagtagccacgggcgcgatcgggaccagaagtctcctcctccatgatcactttggaagccgggggaagactttgccctgccctgagagctggtctgcgtttcccaggcgcggcggcggcggagcagcagctgcagc

SEQ ID NO: 2069 - DNA, 2300 bp, Homo sapien
gattaggagagtctcctttctcctgaaacattgctcttagggacagagtggaaaagactcctggacatatgggccagaactacaatgcatgttacagagaagaggtatacgccatgtgtcataactagaaaggagaaatgcaggcttgctgtgcttaatgcactcaaaacctcaataaggacaaatggcaataggcaaaaagatgatgacaaatactcatctcatttacatcagtaaacttgatatcgaaaccttcaaccctctgaatagcaagtcactggttcttttctttcacttccccctccggcccctgcccctgccccaaccaatttcattcagatatagcttagctggaccaaatctatcaagtcatgcttatccttaatcctcatcagagttcttgaagtcatcaactaaccatattgattttgaaatagaaaaagaaaagcagagaagctgtgttttgacctctctcctgaaacattgctcttagggacatatgacccagaactacaactgcaatgcatgttagatagaagaggtatatgccatgtgtcataattagagagaagaaatgctaaattcatgaatagggattcacagaaagttttaacagaaagggcctttgaagtgactgactgtgaacttatttgacaagatgaaaataatccatcgcaaggctacatgatggatgctcggcttagtatctgggtgtgctgcaaccccacctaacatttttttctattatgccatgttaccatattcccatattgagttacattttcaaatacatgacttttccagtgaataattgagagaactccttttctgaaaaaattcccacatggaatggataaatgaacacttgcaccaaagaagatgccaacatcagactgcaaatctccaagacagacaagacaaaaagttctgaagtgaaaagtcatctttgttcacactgtggattattcaggtttcttgctttccccctgacacacatttttttaaaattgactttatttttttagagcaattttagattcatggcaaatttgagtgaaagatacagagatttcccatgtactccctgcccctcgcatacatagcctctcccattatcaaaatcccccaccagagtggttcgtctgttacaattgaatgtacgttgacacatcattccccaaagtccatggcttacactgatgtttcacattctgccactttgggcaaatttataagtacacagatccactattatggtatcatacagagtagttccactgtcctaagaatcttccgtgatcatctattcattcctcctttccccctaactcgggcaaccactggtctttttaactgtctccatagttttgccttctcaagaatgtcatagttggtagcatacagtatgtagtcctttccagttggcttctgtcacttagtgatacacacttaaggttccttcatgtcttttcatggctggacagctcatttctttttagcactgaataatattccattgtctagatgtaccactgacatctgctttaaatcttttgcccatttcatttttaccctctaaccatttcattactaaaacacaaaacaaactccggaaaggagtttgttgatgagaaaacactgaaagtacgatttaaattgaggaatggagattttctgtggataattgtctatgttccactttaccaaagaaaaatgaatttcaagtagtgcataaagtaattctcgttaaaaaatgtgggaataaagagatcagtcctgggtactgggaatatatttatctcacagaaaaatcttgcccacaaaatgcatcagactgagatgaaatactctagggtatattaaattttattctaatattgaagggagggaaaaaaaggacggaaagaaaaatgaaacaggatgaaaaataaggtgattgggagagagaaaagacagagaaacttgttaacgacaggactttctgagcaagatatttttcttccttttacaagttggaagctattgaataattcatgccaagcgtggaaaggctgtcttttccctggatgatgtataactaagcaggagagagcttcgagtgggttcaccacatcagccaccactcctgcttctgagcacagggtgctctcctcttgagctcagcttctgcttttgcagccaagcattcttgctgctgctgcctgcctgcccacccgcctgggcttgcagcccgccactttactttctccagccctgataccagctgagaagtctccctgcagctgctagttcctgcccag

SEQ ID NO: 2070 - DNA, 2300 bp, Homo sapien
ttaaaccgaacaagttcaaagacaaaactcagtagtactttattcagacaggttagtctaaatctgttaaccttatacttgcaactctgatcattcattaattctgcaaattttaataaatgctttattttaagctaaatgctgagatgaaaaaatgaaaccatatgagttagcaaagtagaaaatataggcatattaatcagtaaatgcagaatgataaatgctccatcaatatgcacttgttgtagtgaggccaccgaggagggtgcaatcctctcaacctgggaggagcaggtaggacttcagatgtcatccaactcaaagatatagtgagggacttgatcaaacatttgccaagaccactatgagttaaatgaatagattaggcatttctccaatgttgcaagcttcgaatcatatccaaactcagaacaacatagcttggtcataatgatcccaaggatcctattggccattgtctttgagcctcaaaggaacatattaaaactccataatacccttttgatctattctgaagttaagtagtgaatttacatgatgatgacacaaacactgtaaaggacctctgggttacttgtttataagctagtatttcctgaatcaatttttctgatccctagatatttggtaggtgaagtcatacctatatatccccacaccctagaacagcatctccaacttatttttccctccttgtcttttagtgggagccacatcagtatccaagaggagatccagaagcctctccaaccaggtagggacagttatagattccagacctcagctatggcctttgttacagagtacaaatgttatatagtacaagtttattgtacacatcccattgagtctctgagctttagaattttcttgtagaatttaacagttttttcatgccgtatttacatattattgctagtatttagaattttcttctccaaatgtataacgtttattattgcattttttgtatccactaagtggaaaatcatgcattagatattgtagaagtagatacaacaatgaacaagaactggtcctgaccatgagaggaactgatgatccaatgggggagatagacctgcacgtgtttaataaaaggaagtggctattccggtttctttttgatgggcaagcattttgcaaggccttgggctatgtgtgtgcaaggctaagccagttagttaattgggatttttttaaaaaggcacttcactggggggaaaaggaacatagagttggttattgtccccttgcctataataaaaacctattatttttaattttttaactgggtttgcggttaaatctcacagcccaagagatttgccacttcagatggattccatacacttgcatttaagtatgcaaaaaaattccaattatccagcaatttaaccaaattattggtaacttttctaaaacaaaaaaaaattgtttcccttgttttggcagcaatttcagttacagtcctttactttctactcaagaaaatagtttcaaaaagttgatgtttgttgctaaaagaactatttttatgaataaatataaaactaagaagttatggtgtcccttttttaaaaaatgactcatcaaaagaaataactttttcctttctcttgtaagagaaaaaaattaatctcttttagaattgcaaacatatttccttgatggagaaaatcaattcacatggcatagtcgttatttatccagttcaaaaaccagagtagaatttactactctgtctccattttttctctccccacccccttaacccacattggattcagaaagcttcattctgcaatcagcattgtcctttatctttccagtaaagatagccttttggagtcgaagatgaggaaaagcctgtattttatagtcttggaagtgtcttcttttgccaggacagagagaggagcttcagcagtgagagcaactgaaggggttaatagtggaacttggctgggtgtctgttaaacttttttccctggctctgccctgggtttccccttgaagggatttccctccgcctctgcaacaagaccctttataaagcacagactttctatttcactccgcggtatctgcatcgggcctcactggcttcaggagctgaataccctcccaggcacacacaggtgggacacaaataagggttttggaaccactattttctcatcacgacagcaacttaaaatgcctgggaagatggtcgtgatccttggagcctcaaatatactttggataatgtttgcagcttgtaagttatttccctt

SEQ ID NO: 2071 - DNA, 2300 bp, Homo sapien
aggtaatgtaggtttctccataaaccacttaagcgatttctgatttgtagcaatacagtataaaatataggacttattttcaaaggcagaatacaaaaaagttcaaaatgcagctgaccttgatgagttaggattatgctggaaatcagttgctgaaatttaattatttctattacttctcccgccttctcccaagttaaatcatattgaataagggcgttttggagaaaaatccaattaccatagaattatttatctttaaactatctagtttgcacccaattaatttttcctcagcagtgcagtagagtaaaattcaaggtctactgctaatacaaaaacttccttccaaaaaaagagtaaatgctactaattttaaatatttctacacttaaattaaaagaatgaaatatacgctaacaaaggcaaatacaaaatactcttcccagaacttacttctgaaacctagctgtttttacacagcagttttaattaacatttttcaaaattgtagaataagtacatattttcaaaaataaaaccaccgaatactccatacacacacacaaagttctcagaacgagagcaaaacatgcatatatcctcactacaaaaagaaaaatactaatactggagcattttgctgtgtctccttacctcgagtgcagtagattgcagtagggccagccgatttatttccctgcagcttagttatcataaaacggaaggggcgtctcgtttgctcatttttgtttttttttctaaaccaagtagcgtgcatctatccttctccattagctggattaacaacctggaaaaagtgccgcccgcaaagtgagcgcctggagcaagggacagtccccgagtggccgcccctccctttcggtgacgctccacttcctgtcggcctaaaaggcattcccaggaagctcggttttgtagtttccagcccacctccgaaagccaatcctttcctccatttcttctccaaggtaacaacttttaaacattcacgtgacggaccaccttccctcagccaaacaacttccctgaaaggcgcccgaaggagccttcccatccaccgcgggtgcccaggaaaggcctgtggggctctcctccccgcgctccacacgccctcgcatcccaccgaggggccagcttctgcctgcacgttgctgaaactggcctggaggttctgacaagaattagagcggcggccgttgccccggggatgacctggaagcgaaagagaccggcacgaattctagagtttcggggtttccgcgggttgagattgtacgggaaacaatgcattaaccaaacctaaaaatcaaacaaacacgtctggtagaacctaccattaaaaagcttctttcctatactacgtttaacagcctttattttgaaagacattgattgatgccaggcatggtggcgcacgcctgaggtctcagctactccggaggctgaggaggatcacttgcgtccgggagttccaggctgtagtgagcctcattgtgctccagcctaggtgacagggcgagaccttgtctcttaaaaaaataaagaaagaaaaacattgatcgcctcctgcgtggcagtccagaagggtcaagcgctgttttcggggtggcgtggaatggattcctaagatttgggcgcccatagagttaacgcagcaaaacgatcacttgcgtttcctgcggactggcggcaatagaacacgtggctgcctagactcttaatcactgatatctaccacaccaggatttaatgccagttgggaggaaatggcgaaagggcaggcgctggagcccatgcatccgggaacactggtggtaggcggtcgggtgggcgtgagcgggctctccatctcccagcccagtctgcaggtcgccacctcaggattttcttcctgagtccgggtggcaggattccatcccaggtcagcccctcacaccccctggtagttgccacctcctggcgtccctccaacagctccagcacctttctcatcccgcccccgccgcaagccacgccctccgccgcgcaggccccgcccgcgaccggcctccctcctttcctgtcccaggacgcgttgcgcggcccgggccggaagtaagcgaattcccgggtgtgtgtctgtgtctgtctgtgtctcgcagcggcgcgcggccccggacaagcgctggggattcccgtttgaggcgtcactactgtcactgccatcaccccacggagccacttctagaggggagtagacccggcccttcgccgggcagagaagatgttgcccctgt

SEQ ID NO: 2072 - DNA, 2300 bp, Homo sapien
gggcttgtcagtcttgtctgatggaactggaggggagcgtgacaagagaggttgcacaggataggcccagatcttactcaagaactgtagccctaccagattggtgtgggtatgagaaagcaactcagcagcagaggtaggtaacaaaggtaggacctgaacctcctagtgaggagctacgtggcattaagcaaacagtgcttcgtctccctcacacccagcttccgcccaaaccattttcccctttggttaccagttgctccagatgccgtagagtagttccacaaaagcgaaagagaggttcaggcacaggaagaaaaacaggttccgggaagtcttgtcggacagtatagacctgggaatgatacacgtggaaaagagccgggagagttaaggaggtgccgggaccccgaggctgggtaccctcttcaagaccctcccagttcacatgctcctttcttcacagctaggggttgacggggagtttttgactctccctcactggacctcgggccatcctgaggtctgggccttctccctttctgccggacaccccctccccgcaaacacagcaccccgcacctaaaccagcccgagatcttgccgaacaaattgaacttgggtggtttgtattcatcgtctttgatggacaggggcaacatcttctctgcccggcgaagggccgggtctactcccctctagaagtggctccgtggggtgatggcagtgacagtagtgacgcctcaaacgggaatccccagcgcttgtccggggccgcgcgccgctgcgagacacagacagacacagacacacacccgggaattcgcttacttccggcccgggccgcgcaacgcgtcctgggacaggaaaggagggaggccggtcgcgggcggggcctgcgcggcggagggcgtggcttgcggcgggggcgggatgagaaaggtgctggagctgttggagggacgccaggaggtggcaactaccagggggtgtgaggggctgacctgggatggaatcctgccacccggactcaggaagaaaatcctgaggtggcgacctgcagactgggctgggagatggagagcccgctcacgcccacccgaccgcctaccaccagtgttcccggatgcatgggctccagcgcctgccctttcgccatttcctcccaactggcattaaatcctggtgtggtagatatcagtgattaagagtctaggcagccacgtgttctattgccgccagtccgcaggaaacgcaagtgatcgttttgctgcgttaactctatgggcgcccaaatcttaggaatccattccacgccaccccgaaaacagcgcttgacccttctggactgccacgcaggaggcgatcaatgtttttctttctttatttttttaagagacaaggtctcgccctgtcacctaggctggagcacaatgaggctcactacagcctggaactcccggacgcaagtgatcctcctcagcctccggagtagctgagacctcaggcgtgcgccaccatgcctggcatcaatcaatgtctttcaaaataaaggctgttaaacgtagtataggaaagaagctttttaatggtaggttctaccagacgtgtttgtttgatttttaggtttggttaatgcattgtttcccgtacaatctcaacccgcggaaaccccgaaactctagaattcgtgccggtctctttcgcttccaggtcatccccggggcaacggccgccgctctaattcttgtcagaacctccaggccagtttcagcaacgtgcaggcagaagctggcccctcggtgggatgcgagggcgtgtggagcgcggggaggagagccccacaggcctttcctgggcacccgcggtggatgggaaggctccttcgggcgcctttcagggaagttgtttggctgagggaaggtggtccgtcacgtgaatgtttaaaagttgttaccttggagaagaaatggaggaaaggattggctttcggaggtgggctggaaactacaaaaccgagcttcctgggaatgccttttaggccgacaggaagtggagcgtcaccgaaagggaggggcggccactcggggactgtcccttgctccaggcgctcactttgcgggcggcactttttccaggttgttaatccagctaatggagaaggatagatgcacgctacttggtttagaaaaaaaaacaaaaatgagcaaacgagacgccccttccgttttatgataactaagctgcagggaaataaatcggctggccctactgcaatctactgcactcgaggtaaggag

SEQ ID NO: 2073 - DNA, 2300 bp, Homo sapien
atatgcatatataagctatgatacactcctgatacaatcagcacatatcccaaaattaatttggcataatttaggaagagaaaaatgtaaaatatactgtaaatattatatatttatgataaagtatgattattcaagtacaagtgctttcaacatctacagtatattaaagtgtgttaatactatgggattaaaaaattaatctatgatggggtatccttcaaattaacacatctgattcccaaaggattcaaaatggttattacatatattaagatttcattgtgccaatatgcctttatacccaactgttgactaaaccaataaccttcataatctgctggttattgagtattttttatagaactgaattgacggttgaattgaaagaagcccaagcattatataaaagtatacatgtcacaaaacctggtgatattacctgtcaatgtttgatctcaacagaagatcaaggacagcgattttctctgaaaatgggtcttaaacaacagagactaagtctatttaataaatagaaaacaggttcttaatctagagtccaagatttagtacagggaacccaacaacatcctgaagctttatgtacaattctgagtattggctttcatcagatttttgaaggagtatgggatctaaagacagaattagtacacctaggagtgtgacagtcttgttagcagaacaacttcataagaccttaagttactcaacagcaaatacctgaataatagtaacttcactgccacagagttacacactagattttcctcctcctaaggatgtttcaaaaaaaacaaaaaccctcaaaggtgccaccaaaacccaagaaatgttgtttctagaaactatatgggatttttacatcgcagttaagactacaggaaaatcatgagacagtttcggcattaaagagagaagagaatgacacatattcctcccgatatcactttataaaacctcccattccaagccccaataacaaactaagtagaacatctcagatatactctctcagaatcttaagggtgaaatccaaatgccactcccccccgagagaggcagcaaacaagtttctcccaattccaacaaagtgggtaaacctaaggcctacaattagaaatgaaagattctgcccatctgctaaaataaggaggggcttgtcagtcttgtctgatggaactggaggggagcgtgacaagagaggttgcacaggataggcccagatcttactcaagaactgtagccctaccagattggtgtgggtatgagaaagcaactcagcagcagaggtaggtaacaaaggtaggacctgaacctcctagtgaggagctacgtggcattaagcaaacagtgcttcgtctccctcacacccagcttccgcccaaaccattttcccctttggttaccagttgctccagatgccgtagagtagttccacaaaagcgaaagagaggttcaggcacaggaagaaaaacaggttccgggaagtcttgtcggacagtatagacctgggaatgatacacgtggaaaagagccgggagagttaaggaggtgccgggaccccgaggctgggtaccctcttcaagaccctcccagttcacatgctcctttcttcacagctaggggttgacggggagtttttgactctccctcactggacctcgggccatcctgaggtctgggccttctccctttctgccggacaccccctccccgcaaacacagcaccccgcacctaaaccagcccgagatcttgccgaacaaattgaacttgggtggtttgtattcatcgtctttgatggacaggggcaacatcttctctgcccggcgaagggccgggtctactcccctctagaagtggctccgtggggtgatggcagtgacagtagtgacgcctcaaacgggaatccccagcgcttgtccggggccgcgcgccgctgcgagacacagacagacacagacacacacccgggaattcgcttacttccggcccgggccgcgcaacgcgtcctgggacaggaaaggagggaggccggtcgcgggcggggcctgcgcggcggagggcgtggcttgcggcgggggcgggatgagaaaggtgctggagctgttggagggacgccaggaggtggcaactaccagggggtgtgaggggctgacctgggatggaatcctgccacccggactcaggaagaaaatcctgaggtggcgacctgcagactgggctgggagatggagagcccgctcacgcccacccgaccgcctaccaccagtgttcccgg

SEQ ID NO: 2074 - DNA, 2300 bp, Homo sapien
ttttggaatactaaggaagtgtagacgtgggtcctgctctcaaagctttgaaatctagtttggaactaatgtgttgtgcacgtgaaagtttaaagaacaaaaattctattgtatggagaggcaggaaggacaaactagaaatgtggctcttgagttgtccttctaagagctgccccttttcttagctttcctgggaaaagacaaacaaggttaaacaatgtatcttccttgctccattaacaaaagcaggaaggaacagagtgtgaagtataggatgtcatgatttcaaatcctcaaaccatagttctcatcgttttatcatctggcattctcattatttaaattagtatgtatttattcaatgcctgctgtgggttaagttccatagggattagtgaggataaaccatggcaggaaaacacagagaatttaaaatttacttagaaagacaagaccaatatatatgatataattagaggttaataaaagatagcattaattgtgtagatctttccaagaacaaaaagcatttgaggagaagtcaacaaagactttatgaaggagttaggacttacgttgcccagagagtggatagtttaatatgggctggtgactgagtggtaggagagtcacttgagtaaatttattcagtagacatttatggagtgtcttctgggtacttcacattatgctaggtcctggtactaagatgaatcagagaaccttacattctagcaagtagaaatagagaggaataattatggactgtgtgaagacaagggaaaagtaatgcggggtctggcttgagacgaagtcacgaatgcactccttgattaaaaaggatttgcgtctaaaaattctcctcaaccctcttccttttaaaaatcagattctatagagcatatttgaaaagtaaagacaactgaaaatatgaaaaatctcatcacaacatttcagaagctcagagtgaatgaattaataaacgggttaaaatttttaaaatcttagaaacgtaatttaaaggaaatctgaaagttgactaacaccattgattatagggaggccacattcttaataacaggcattcgtttttttctccataatgtgacagacaagtagaaatattaaataaataatgatatttcaaacctgaaaaaggctttcaatgctggttccaagaacatttaaaaatatgtatttaatattaactctgctataatttccaagcaaactctttgatatcctttataagaaacacttctataatcacttaggaaatctgcataagtctattaaagactcctcagttgcactatgtttatttttgcaaaaacaaactttggctgaaccatttgttttcagcatgtaaagcaggaagcagctgttgctgttgctgttgtatactgagttcctttgaggatgtagagtgattctgcttttttaccttttaccaaatagttcagttgagcatgagtgattaaaaagtataccgaatcaaatatttgtgatgcttggactgtcaagcttctagagagcagagtttatatctggtcaggtccctgtggtatcccagtctctgacgcagcgtctgacacacagtccatgctcaaatccctgttaaaagcatgaatacttagaattaaagtatttattcaaaattatggcatgtgttaacattcgtcagaaagcaaaagacttttttaaatgtggaaaagatttttttctacttacattacatctatcaaagggctttcagatgggtctgtgcagttactagctggtagaaatgaaaacaaagattgtgattagctgttagtagtgtatatgccaatgtttatctaattctttcccttgtcttcttttccaaaaggaaattagatgttagcaggatggtctcagggccaagttcatgtttgttttctaactagtggcacaaccacaagcttccattcttctctatgttactgtaagaaagtggctaattaaaatgtgagggaagagtgtttccccaaaatttaggtgactcttaactgaggtttacacatagggttttggataaagcttttaattaaattaaaagaactatttttacttcctacagacatcaaagtaaaggagcagtctttggaaaatctaatcaagtaagttattattctgagaatgcatacatgtgttttatttccttgaacaattcaatacattctacttaaatgacctgagttctaaagatggttgaaaatgagctctcattaacagtgtgaacattaagcatttttattcttacgaaatgataagcagta

SEQ ID NO: 2075 - DNA, 2300 bp, Homo sapien
aacagttttgtgccatataccatagttaagaacctatgctaagaattatgctgaacacctaaagtagatgttttttaccccatttaaaaaagacactaaagttaaaggacttgtccaaggtcacattaacatgtaacaaagataaaactataaccaaactttcctctatgccatcccctgatatctcattctatcaaactgctgttttgttatttgtctgtcttttcttgaaggtgttaagttccttttacttttccttaatcactgattagagacgcacatttccatcatttcgagcttagatattttggttctatcctaagagtgaaaaaatgagaaaaaaaaatgttttttaaatcaaagctggccttaggctgggtgtggttgcttgtgcctatacaatcccagcactttaggaggccgaggtgggcagatcactagagtccaggaacttgtgaccagcctgggcaatgtggcaaaaccctgtctctacaaaaaatacaaaaaattagctgggcatgatggcacccacctgtagtctcagctactcgagaggttgaggtgggaggatacttgagcccaggaggctgaggctgcagtgagccatgatcataccattgcaccccagcctgggcaacagagcaagacttattttctctctctctccacatatatgtatatatcaaagttggtctttacacacaacttttatttaaatgcatggccaattcaagtagcagttcttaattccttctataagattttaaagtaatctgaggcctaaaaattttaagtctattttttgtttggaagacatgacaataaatctgctccctcctcccataacatatgtattaatcctttgatttacattctacttagagtttgacaatgaacctgaagttgacccttcccccaaatttactgggcccttatgagggccaactataaatgtataatatactaacaaatactttggttacttagtgtatactcatgtaagtgtatactcatacatttttatatattaagtccaggctcactcaatatatacaagtgtatcagtataagccttattgggagatagtctatttaagataagatctctctggataggatacaaaaaggcaatcgccattccctatggacacacttcaaagggggaagctttcagcttggtttttgaatatatataaccaactcattaaggctgtgtcagctcctcattagcactcaactcagaaagggtttcttgactacctcatgaaataaggggttttgataactatcccccaggagtataaaatagctttcctatttactggagaaagccacaaaattagacttgtaaaataggacaaagcaccctttcattttccaagtcacttggttggtgtaaaatttccattcttctgctcctcagatcattaatgaacaagggatgcgtttcaaagggtttaaacaagcagacctgaaaattctgttcagcttagtgtatgaaaatcagatgttagatagctttcttcccaggaggctggggaacgctcagcacctaccaaggcttccttccctacagttaggactgaggtgtaggcttccagatacactcgactgcagcgtctaacaacttccaggcccttgactgtgatgtccttggcatctcccaggcccaacccgatgagataaagcatttcaaacttgaggagaagagagactgcaagacgaagtggacagaaaaaccgtcagtaacaccgaggacatctaaaatctagtgatgaacacgatgacaaccaaagtagcacaagagaagaggcaagtcacaaggaggggtttgggaaccttatgtcacgcttaagaactgggataagaggttttaaacaaccctaccagttttgcctcttgttacacaaacctaggagcagccaattacccgctgagagaatcgtaggtagttctctggcctttacaaattcttaactaccacctttccgcagaagcaactgcaaaagcgccggctccgtgcagagaaaaggcccacgccgccggcctcacctacggtgccgcaaaatgctggtgcctttactgcactttacgactagcgggagggggccgggctagcgggctactgggctgcggagaccagagcccggctccactgaagaaacccgccggctgctggggcagggcggcgaaaggtcagtcggccgagaggagtccgtggagccaccgtttcatagcctcagggaaaggatcgggcgtgctcacgagccctctaacccatggcttaaacacccgcttcc

SEQ ID NO: 2076 - DNA, 2300 bp, Homo sapien
ctaagatgagcatacaaataagatgcagtccctgaattaactaaatcaatagtttggtaaagaagaaatacaaatgaacaaatataaaatctcataaattggttagtaagtatatgtagagtaatactgtaatgaagaggagaaacctaaattagcttaggggggtgagggtctctgggaaggcttcctgaacttggtcttaaagaatgggtattagtgatctaggcaggagagaatgggagacaatattctatgatgaggcagcagcgtagaggaacaaagcagcatgttgtgggcagagaactacaagcaattcagtattgctggagagaaagcgagaaagctcatggtatggagtggagagagatgatgctaaaaaggtaggcagtggccacaccacgaatgatcttgtggggtatgttaacaaacctggactttctcttggcctcagaaggatctagaaggggtgtaatattttcagattgttaactataactctctgacccccttgagtgaaggagacattattatcagctacaagagtgacaaaatgaggacctgagaatcaagatggtgatagacggtatggtttctattgagatatacaggcagacatgacagacgatgtgggggtgactcccaagtgtctggctggggttaatctgttgatgacaatactctcctcacccacccccacccccgacccatccaagtagataatatggaaagaaaagcaaaatggaaagggaaggtgatggattcaaccttggatgtgttgaatatgcttccgggttatctaggtgaagatttccagcagaacgttaacatgaagccaagagggaggaagtctggataggaggctgaaatttgaatctacaaaatattagcgatactaggaattctgagtgaacagccagtttttgtgaggttttgtttgttttacttaagccattctaataggtgggttgtggtagctcattgtgatttaaatgtttattttcctaatgtctaatgatgtttaggatctttttttgtttgtttaagatcttttaaaataattatttgctatttgtgtatcttctttggtgtctattcaaatcttttgcccatttttaaacaacgaactgttttattattgctttctgagtgctccttatatattctccatacaagtccttcatcagatacatgctttgtaaatattttcagtatgtggcttcaagtcttttgaagagcataaatttttactttgttgaagtccaatttatcaatttttttcatcacgcttttggtttaagaaatatttgcctaaataaggtcacgaatatttcctcctatgttttcttctggtataggtttaggttttccatttacatctacgatccattttgagttttttggggtgtgtatgtggtgtgaggaatagatcaacgtaatgagaggggataaaacacagccacgaagagtttatagataggaagtgcaaaaaggtggatggaacctgggaatgaaaaaaagccaaggttcaaggaagcggagttgggcattgtcggggaggcaacaggaaaattctgagtaaccaacactgcctgctaagaaaagcaatgacagctgtcttttttaacttggatgaggtcaccttgggaagagcattttcagtcaaaacaaatcttccctatttctaattacatgtaaccaacagctttataagaattcccccggcagaaacacttgagaggtctgaaatccctgagcactattaaaggtcacttctttaggtacaggaaggtctgggattcctgacactgagggtgactgaaacatccttggggcactccaggcataaggtcttggggacaaacccaaggagtcattgccttgttgggaaatcagaagcacactcactgctgggtttgccaatctcacgcttcaccaggaagacacctagttgaactacaggaggatgagaagactggaattaaaatctgtgcactcggccaaatccggggacaaatcaggaaaatccttcccagccctccctgtttctggagaggaggagtagggcgcagggcccctcccgactctcttccacgtggctcctctcgagcgaagagctactgcacttacccaggcttaggaagcgggtgtttaagccatgggttagagggctcgtgagcacgcccgatcctttccctgaggctatgaaacggtggctccacggactcctctcggccgactgacctttcgccgccctgccccagcagccggcgggtttcttcagtggagccgggctctggtct

SEQ ID NO: 2077 - DNA, 2300 bp, Homo sapien
tttgcagctctgctttgagcaaggaaaaaattctgccaatgaaaacaggaaaaataagaaaacaagaagggttgcaagtgttttgcatgtgttgcagctctccggctgtccactttggggtcttctcaccattgggtagtatactgagaaggaatctgttgttggaaactgaccctaggtgaccagagcttatctaagggacactttttttgtcatcttagaatcaataaatttataaatcatttgtgttaaaagaactgtgaaagtgatattttatgtttactcacccactccatattctgaggtatatatttatcatttggtctggtcagatctatgatattgtcaagttacagttatatatatatatatatatgactatatgatgtatatataatattttagagacagggtctcactctgatgcccaggctggccttgaactcctgggctcaaacgatcctccagcctcagcctcccaagtagctgggactacaggcgcttgccactgtgcccggttataatatttttgattaagacatttgagagggagagaatatggcctttttttttttttaactctccttcattccctacaatacacacaaaaacccccacagggcaggaacttctctaactttctcagagtagtatatgatagatatgcatgtacaatacatgagagtacttcataaatattagttcatggagataatgaagaaaacatcttttctaagtcaaaaaataggaagcaaattcttaatagttgctgttattatgccaatatgcttgagtttgaagtttagtgagatcttttttgagtggctaaaaaagggaagagatgtaagtcttgtcttcgttgataaaacatcaggaggatagattgatggtggtatctaaataatatactcaaaattagagtgtagtttctgccttggcacatctgtcttgtttccacttctttgcttcctcctttttccacagtatccactgcagcaccacaggatagctccccagataaggcagcaatctaatggggcagctgtagatctctgtgttagaattaagaaaggagtatttgtcattacttatgtaacccactctgcatccacactgacatatatagctgaatgaagaaatcgctcaagcaaaatgttgcctccctttgaccttgtctgagtgccattcattgttgttatcagagctgaacagtaaatggcaggaaccacataagagttgtaaacaagtacacatgagaaaaagaagtaactgtatttgctgagtcaagatccatgtaaaggagaggatcacatttccctttcttggaaacacttgaaaatatttacagtctcaagttcaatttaaaatattcttattaagtgtctactctgtgttagactcttcactagtaactgtgaatacagagataatgaagtatcttgctcatggaagaactcacagactagacttatgataacctctcttctccttagaatttggaggactttagatggtttcccctagatttttgttttgttgcacagtgttactcttattctcttaatctctaatgaaaagcctatttggtggtatagtacgagtcctaatgatgaatgagtcctaatgataaataagacatcattaggacttctactttttcagtctgttttacgagtcccactccactagactgggaccttctggagggcaggttccagaaggtcccagtctagtggaggagtgagacttgtaaaatggaagttatagtacaatttttatagaaatgatcaaatcatattctttctgaaacacttaacttctgagattgatagatcttaccatttaaatgagtatacacataaggtgttgtagcattgtatctggcagactgagaggacataaaagatgttaactacctgctttaccattattacctttacctttcctgtttcactgttcttatgccagatattgaatacaaatctagcccttccatatttgacctctttaaatgtctcattaacaaatgtcagtctactttctaggtgacatgagactccttatgtatcagcatatcattatcacttctgttcttccacagttcctgaatatatcacatgtggtgataaacatgaagatgtatgaaaaattgtgttcgttgagagaaaatggaaggcttttcattctacttccacattttcattccagcagcttttctgttttggaagatgagtactgaatcttgcaatgaaatttttttaacttaaacaaggtatattttagcgtgttccgctatggat

SEQ ID NO: 2078 - DNA, 2300 bp, Homo sapien
atccctttgagtcaaaaatttctctttttttccagatcctgttaaacgtcagtgttactatttagcctttgatatctccagtaaaggcaacttctttctggacccagaaataaagctttacattagcagcttccataacaccaataacatgaatgaccatctactgagcaattgcagtgcaccaggattatggcttatgagcactttatgtttattatctcacaactcactgagttagatactctccacaacccagtgaggtaaatactattacttccacagtatatattattatataataaaatgcttagaatatacacacagtaactaaacactacttataaaatatggctctagatatgtttgataaatatttccttcatgaaaacatggaggaattaattagcagtatctctctgcagcctttagccctcgagaatcatgtagaaaagaggagctgtcttctcttttagcagaacatctgtcagagatggtttcccctgacttagacaattgtgtttttttcccttcagaatgattgagtctcagaattgttctttaatcctcagtatttccattaagaagagcttctatcaagtgcttcaaaagtacccaatgtgaaggagtaataatgactccctgctggtgagcgaagtgtggaggacacaggtccctcagccgtccactggatgctgcactgtttggcctgagccaacatgggcagaaatacaggcggcagcataagcagatgccaagaacctgtcttgcttctactgttttcattgggttactatatctcctttgtagtccaacctgcaaattactttgagaaggggagatacacccctggaccaatctaggactatatttgttcccttgctaaagtaggaaaaaaaatacagaacctttaaatattgaactcaagggcaactaatttaaattcctttcctttcatgttgaaagtcttttgactgggttattctgaagccatagcaattaggttacagtttacttctctgttactttaccatctttaaatttggcaccttcaaaaggttgttctgtgcgtttaaaaaaaaaaaggaactaccgttggatattgtattgttgatgaccattatttgattctggattcttttgtgtgtttgtgtttgggtgtttttggttgttgtttgtttgttttctagagacggggggtctcactatgttgtccagactagattcgagcccctgagctcaagggattctccagccccagcctcccgagtagctggaactgcaggcacccgccaccacgcccagggacagttacttgattcttaatagtccagtcataatgagacaggatactgcataagccaaagaccacacaaagtatcaatgttaagtatcaagagggtgtggaggaagtgggttacaaccactttgtctcccaactgttgtatgttttgcctttaaaaatttttttaagtacgttaaattctaatgtactcagatgtggctgaaacaatgacaaaacattagttttctttaaatatgcgtgacttttaagctttttccctttcccagtgacttgcttctccactaagctctttttttcttttttttttttcctcaaatattattgtttcatgtcactgtgacaagtttagtctactggaaattcctatgtcctctgtaatttaggttttaagcaacatatgatttatcttgttattttaaaaaaactatctgccttccctaagtgggcaactctctggcatccttaatattcttctatagaaattgtgatgaaagaacagataagcctaagtaaatctagcgtgtggagctcctttaaaatgtgaagaccttgccaactggttaaaaataaaacttggttttgtcctaaatatccttgctgggcctattatacataaaaaaaggggccacagcccatttgcaaggcttctgaatgaactccattcattctgtacttggaaatgtctcttcagccacaaaaagaaacaatagttataacctaatttctttggtgccaatatcagcagaagaagagccaagagaccattatgaaaactctagtaagttctcttggtgattatataatgctgtattcattgatcatatttctgtatttaaataagtacattttttaaaacatcataaagtggatcagtaatgctgtaatatcacatttcatgtattatacaacatttttgaaatggagtactccaaagtaatttgcttcttatggttaccaaagtttaaagaataccctaacatgcactccaagattttaa

SEQ ID NO: 2079 - DNA, 2300 bp, Homo sapien
atgcttacgtagaaaatgagtggttttaaaaggacattcattagcatacttttatatgcattttgtagacttgtacagtcagaaatgcagcaaatgtaaaactttaaatctagaagtctgtttccctctaggaacatatatttcaattccttaactatttattgactgatagcgtttgagccacaaggcaaggcatttgcaatatttaggttttggaacccagctctgccactcactagctgggaaatctacaagtcaccttagttgtctgaatgacacttctctcaacaataaaatggccagcaatgcttacttacttcacagagcagtaaggttaaattaacctagcacatgcttgatacagactaggtgtgaaatttcactttgattcctttggctttaaagaatgcataaattagtgtgggtggaggcgggagaagggggggaatgccaagtcccccgttttgttgtgctgggtagacacaatatacctcttcccctttaagtgaaataagtcttcaaatccaattaggatctactctggagtcttagaggaccgttatcttggtttccacattatatgcactgtactgttgttgaagctgtgggtatgtattgggtgcgtcgctgtcgatgaatgctttaaaacagctgtgaattaactgtcacttcttttttttttttttttggcaaactcacaaaatcccagaagtcaggggtctgttgtttgttcattctgcctccttctgagtcattcaggtacagggtgtgtctgccaattgaaactgcacagcggaggaagtttttgagttcacatctgccgggatgggaacgcagtgcgaccagggactgggtggaaacttttacaacagtaatgcaagggcagaagcgtcctgtcctgagcttgtcacgcaggcagatctgaccaagtccgcctctcagcctcacgttcttaagtagcatctaagcaaaagaaaagggtgggcaaagtgctagtaatgagatttgaggcctctgagtcgactcccaagcagaatgtgagagaagggtgccggctcctgctgggcagctgcagttgctccgcagctcctggccgagaatctccccctttggaaattcctgagctgcccaggcgttttgaatctctcaggactcagcagcagcccaccccctcaacgacctctccattggccagaatctgggacacacagcctgactttgtgctcagctgagggaaacccctcgcccaacaccaaaaccggcgctggttcatttctctgtgcactctgggaaagccactgcccctcagaccgcagttgcgagtagcacgaggatctggggtggcggggggagtacaggaacctcccggttcattctccctcccgggctgcttgtctcctccgtacctctcgcagccccttcccagcctctcctccccagagcgccgccgacactcgccgggccgcggctcaggttttctgctgctcgcgcgaaagtggctcggggagctcctggccacaagctcagcacaccgatcctcctagggctgcggggggtgtgggaccagggcggtgcgctacgagactccgggccgtcctctgcctcctcagacttttcgagagaaaagttttcaaagtctctccaccttttttttttttcaggggctcgggagaatcctctccacagccagggatcagcgtctatctgggcgagggcagtgatttatacagtagaatccaggggttaccgggctccgccccttctctctctctctttttttctttcatttgttgtttggggaggaggggttcttttttttttttttttttttttttttgcttctgccccagatctttcctggacagtgcgtctcagcagttcagatccgggggcccccagctgacagagggcgtggggggttaaggcattaacccctcccagcctcttcctgaagaaaccacccagccttggcgcggcgctgggtgacttcgcgtagcaggcagggaactggccgcggcgagcgggactggccattggagtgctccgctgcggagggaggggaccccgactcgagtaagtttgcgagagcactacgcagtcagtcgggggcagcagcaagatgcgaagcgagccgtacagatcccgggctctccgaacgcaacttcgccctgcttgagcgaggtagggggcggcgaatggcgggggtcgcgggcgcggggagcccggttgtggtagggcttaggtgtcagaaacgaatttttaagtcgaacgaggcaaacaaaaacttagaaaacatgcat

SEQ ID NO: 2080 - DNA, 2300 bp, Homo sapien
tctgtatatcttctttagtgaggtgtttgtgaaggtctttggcgcatttttaattggattgtttgtggtcttattgttgagtgttaagaattatttgtatattttggatgataatcctttatctgatatgtcttttacaaatattttctctcagcctgtggattgtcttttcattcttttgacagtgtgtttcacaaagcagtgatttttaattttaataaatttttatcaatttttttcataaattgtgcctttggtgttgaaactgaaaaatcattgccaaaccaaaggtcatctagattttctcctatgttatcttctaggaattttacagttttatgttttacatttagatctctgatccattttgagttagtttttgtgaaggatgcccaactattccagcatcattcattgaaaagattatattttcactattgcattaccttgcttccttgtcaaagatcagctgactctctttgtgtgtttcactggcctttttatactgttctctagaatctacccctcatggattctgattgacttggtcttggatggggcccagcagcagtattgcttttagcgtttctgaggagacgttaatgtttctagtaagctatcaatgctgagaacctctactgagtctaatggaaaactagctctccccaagggacataactttctctttcaaagaaggctatttcctctctgactggccctcatacacctgggtctagaggtgagtttgggttctctatgctcttcattgccactcactgtccactcattccaacagcaccattgctcaattttgagtctcttgttgtcaggcttcagcattcattaaatttctttgtagaatcatctgcagaccttcagatctcactcgcttttttccaatattttgcatcctggctcatcattgctgtctccaacactactactgcagatgatcttccaacactggcacttctcaattccttaacctaccgactggtggcctaatcctaaactacctgatcatgtggtcgtacccccagataagagtatgtatacacagattgcttttcttgtggaagctttttctttttagagaattagcatcctccttacttagataacactgtttttttgttttgtttttttgttttgttttgtttttaccaaaaagcaaaagtaatcaattcatcacacaaagaagctggggaattgcatcaaccctatagatggtggtgtagaagaaaccacatttcacgaaaagactataagccaaattccattgctattaccttaaggtattagaatttttatatattgcatgattctcaacataaactcttttgccgcagttatatttttgttgttactaaataaagaattagattatgatacaattaattataaagagatttgacctattatatgccacaaggaagggtttctattaggcaattagtcagttttctaattgaaataaatgtgtttcaatcatcctgttccataaggaaaggaaaaaatgactttaataattgcactttgcatttctatagccactttcatctaagaagctcaaagaactaatttaattaaacctccaaatactcccatgaagtaagtgttattatttccatttgacaaaggtttaaatgaagtcacagaaagattaactaacttgcctgtggttacactgtgaattagtagggaggtcagaataaatgctccaatctcagaaagattgttctctatagtatagattgacaatctctcagtaccattggcttaacttctgcttgcggttggagcagtgcaggattttaattcttcattagttggggaaaactgaagcatagaatttacaaaaatgttttagattttcatttttgtatcttactttctggaatggtattcgtttgcagcaaattctggtaatattttcttcccttttcagtcaaacattttctatcaacatattctctcttttttgtataattaggtagcctaatcccaaaaagcaaagctgtttgcttttaattaaggagtgaattgtgcttcaaagtttcataggaaattttcaaaatctctacctaatcttttcttaatgaaatggatctcatggctgctctgtttgtattagtcacagtacatgctgtacatgaatttaaggaatatattgagcaaataaagttaaaatatagcaggaagtattcattatccaggggatgaatatgcagacattgtcaagggcaaaagtttatcattatattaaatcactatatagaattatcttaattttgtcataa

SEQ ID NO: 2081 - DNA, 2300 bp, Homo sapien
taatgctgttgcctaaccagagacaggagtaggaagactctccttaaaattctaaatacttattattactattacaaacccaagataattttactcaataaatattcactgaacacttactctgtgcctggttccgtgtaaggtcttggaaatggaagatatgagtaagacacagcttctaacctcatggagctcacaaagggaaggctacttccctgcccctactccacacccacataacacaattagttttaagataagccagactgtaatatgtcctaaaaggacaggatccaaaaagggcaagatgatggatcaagacagcagagggaacagaaaagggtgaaaaaaaggcaaagaactgaggcaggccaagacagtattcattgcctttttccaatattatagttctaaggaatgtatcaactatgggaactttacagctggctgatccatttagcattgccactttatctgatgacaaaaatttgtgtctgaacaagtcatccctttgtaaatcacatgttttcaatgaaaataactttttactgattatatgtgtgtgcatgtatttgtatttgatttagaataaacagattggctggacgcagtggctcacacctgtaatcccagcactttgggaggtcaaggtgggtggattacttgaggtgatagtcatcaatgtgatgaaactccgactctaataaaaatacgaaaattagccaggcgtagtggcgtgcacctgtaatcccagctactcaggagactgagacaggagaattttttgaacccaggaggcggaggttgtggtgagctgagatcatgccactgcactccagcctgggtgacagagcgagactccgtctcacaaaaaacagcaacaacaacaaaagcaacaaaaaagatcaaattttatgaagatctttacatttgcttttctcattgaaatctttctatattgagcagtacttctcaaactttaatagacataggaatcacttgggaatcttgataaatgtatattttgattcagtagttctggatgagcatttctgagattttgcatttctgacaaactcctaggtgataccaaaattgttgctttgagtactaacagcatagagatctatcttaatctttataacgggtcattcatattctatttctctatttaacacatcccctgttattagatgctttctctttgttttcagatttttgttgctacaaaaattagaccagtcattttttcctctcatttctgcatgcgttataggttacctcttttttacttccaaatagcccagggttcagcgaacctgggatggtgccattggcttaaaatgtgtttaagtcctgtctaccaagcacttgatgcagttacccttttccaggtccctcaaacactatgctgtccaatttagggagtgttctagtactgctaccacttgtcttagtcaattcagtctcacccctgggagtactttagacccattaagaacttactgagctagaatgaatgcattctaggcctcttcgacacttcactaccatccacaattgctaaacatcctaaatatttaagaagtcagaattagtacttacagaaacaacttattttgacatttaacaggttgggatgttattagcttacaaagccttaaaatgaaaattctatttttaaagcttatttttctaatgtattaagcccatttatattcagtcagttctaatgctagaatgcccgtttttaaatttcctgtctaggtataattttctcttgctgaattctttaaatgtttataatgaagaattgttcttctgaaaatgtgtcatatgggaacccagttatgaatttggcacttctagtttttatgttaacggcatttttgctatttcttagtgattgcacaaacctgcaaacagataataatgtacagacaatattcttgttcaacaggttcagaacatgtcccagtctattgaagtcttaaacttgagaactcagagagatttccaatatgttttaaaaatggaaacccaaatgaaagggctgaaggcaaaatttcggcagattgaagatgatcgaaagacacttatgaccaagcattttcaggtaggtttgacttctgcaatcttgtcaatccaaatcagacatggagtgggatggacagcagtggggcactcagctagaaatgaatgtgcattggcccatatgtgcaaggtaaaagactcatgggggatttcagtcatctctccactgaaactgaccattagctggtaggaagacatggaagtct

SEQ ID NO: 2082 - DNA, 2300 bp, Homo sapien
ttctaaaaacaacacagtttagcttctatgttgttcataaacatcgccgaatcataaacttttaccattgttctacttcaattctttagtgtagtaatttgcatctctggaaaattacaagaagcattccatttgtattgtttttctctatttcttcctttctttataatttgcaaatcagagcactgttttcccctgacattcaatcttatattcttctaaaaatgctactattttgtaggctgatagctcaataataagtataattaccatctgccacctcatttcttaaattatctagtaattatatgtatattttctttcaattttggaaattaagctcttgaaaagacaccccccttctttattaaagtaagatagagttccaggtgtatttttcaacattagatttgtaaatccactttgctttttgtcattaacacattgtaatactaatgtaaaatttcacagggctttctgctaagtttaatacataaaatattgtgcctttattggtttttcatatggcatgatttttgaaagaatagaaaagtaataatatttggttttgtgggcactgtggttaaaaaataagagttgattaaagtcatttggatatattttgaaaaaaaaaaatggcctggattctaagctaatagttgcaaggaagatttgaggagtcttttagcatccaccccagtttaaagctgtttttgaaagtaaaatatacacacactataaatatgtatctctttcagttttattaaggacattttatttatttctcctgccaaaactatttaagaaaaatatatatctttggctgaagattccaaatacaaacaagtccagaattctcctaagaaatcaaaacaatacttttcctttttgtaaccaatttcttttcatttaattttcattcatccatattttgttttgtgtcttctctttatatttttactttaaaacacatatattggataagacaaagacctctgatttctttcatttggaacctgagatttggatgtggaaaatttatagtatttatgaaaacaatataataaagttacccataaaccctggattctatataccacacttgctaatgtaatctaataaacagatcattgaatttgagagctggaagggaccttggagagcatattttccaacatccttatattgtagaaaaaactgaagccaaggaatcttgtcaccggccagtcatatggctaactagaggagaacaaatactagatcccagacttcctgagtccaagtcctgtgccctttatactaaatcacatgttctctcaagatacagactttccatatcagtccgtcattcctcacaaactgaaaatagagttaactgagtttcctgtgtgactgaacacctacgaagcaaagccttcattctcaaaagcaaaactggaaacacatataaaatttctgtaacagaagtttttctgcaaggctgtcttttctcttttctgtctgttcaggtgtaagatgcctaaaggtaatgtttgccacaagcagtagctattaatctttgactatatttttaaagcaatgatgctaattttaggttactttctaaaaaaaaaaattatctcctactctcaatatgatcatctggaaaattatttgcagactttattttcatgttcttcctaaaagcactctgtccttgcccagagaaatctgtagatattaagtttggtgtttgaaatgtgcactttggcagacctccatttaaaggtgtattttttttttttaatgaaagataaagagtagctgattatacttacacaaaccccagaggaaatggattctgttgatggtaactaactaaagtggagctgggaaagctcaagtttccgcctccctccaacctctgctctctgataattaccaaccaagcctatcaagaatattttgtttgatgatccagcaaaatgtctggtaagggaggaaaaagaagggcagggcacttcccacgaggatgggggaaggaggttccgaagctttcctgggtgattagagctggggaagttgatctcttttcatgctgtagatgtggcgcgctgcagtcacgcctcccgctgccagcccggcaccgggatcttaatcagtcactatgaaaactcattagctccacagcaatgagtcctccactgctgaagcttggcgctgtgcttagtaccatggcaatgatctcaaactggatgtcccaaactctcccatccttggtgggactgaacaccacgaggctgtcgactccggatacctta

SEQ ID NO: 2083 - DNA, 2300 bp, Homo sapien
gtgtgagtcaattaaacttcttttctttctaaattacccagtctcgagcagttctttatggcagcatgagaacagactaatacaggtaattatgaaataattgaccagctaaaatgcttagtgtaatgccagaaatatattaatgcactattcaaaaatattagctgttaacaatattaacattcccatcatatttatttgttaaatagtcccaatagatagcatgtagttgatggaaaattgtgaaaatttacttggtaattacaaaataattgcttcaccttccccctataatgtggatatatctctttgtagctgaaaaaaaaatctctgagacatcagtagctcaagggatgttgttcattaccttaaaatttttccataattcatcaataacatcatgctcacctttctccctcataatgttcccagacagttttagctacagtgcatggcaatgacttctggtgtcatatttttccccacagctatcactgggactagtggatataaaagtatccaccttgaattagctaaagacaacacagttgccttgcagtaccagtatttgagattcctaacttttcataacaccttttcaatctttgtctagctttccaactgcttgttctacttcttcctcatacatcccaattgctacgtttctaatgcctctgtacccttagatattacagactgttaatggtctactaacacatccaaattaaactcaaaattcatttcctctcagaaggtttctccaactcctggcctcaagcaaacttaggagataatgggggtctttttttttcacagtggcttcctgtgggggtgtaggcagaaaggtcagaattataatacctagagagcttttttaaaatatccatatgctgagggcttttcttccccacatgctgtgggaatgagtgcaagaatgtataatataaaaattttccaagctacctttaaaatccagtacttccttttcctatgacactacacagaaacattgattcttgactttataactctttttttaaaaagaaaaaaaaagaaaaaaagaaaagatcctgtatttctaattctagtaagaaatttagacagagcagagtaatatgttgactttataactcttgtacatactcagtcactgtgcagttaccttattttttaatagtttagttttatatttatcacccttaccaaactccttgacagcaggaattttatttttttaatcccaagaaagtataatgctaaatacttgacaaaaatcagtaagtgtacttttgtgctgacacaggaatgaatatgttttaagaccattttacttattgtcacttaactataaatctcaagtagaataacaaaatgcgtgttgaaaaaaagtttttttagatcccaacagagaaaacacagtctaaacattaaagttcaaatattttgttttataagaaagcccccaggtcatcattcacttttactgtaaacaaaattataataaggttagttttactttactagttaatttactcatagtaaattgtgtaaaaatattgagtggtttagctgacatcttccacagaaagatgcatcatcagcagtaagaattgatagcttgacagactatcaatagacacaaaccctaaaatagacacaaatcctaaaacagttgagaactttcatgtattttaatttaacaataaacatctccatagataagtcactcaggcacaacaaaatcgaagccaaaccaaacaaatcatatttataatctaaattgtatcaaaagagttaaaatttttgatatttgataccatataaatatgatttataatattattaaatactttgaaaatagaatgcacataaatatgcattgatatactttgaaaatacactgaaactagaatttacattaaaattatttaaaacatatgtattttagctacttatgtgatagaacttaagtaccacagagagaagtggtcacattatgagtgcataatatgatgaacgttgtcatagaaaaatgaattattactgtgtgatcacaaagtcagctactcactttgagttaaagatttatgaaatatgttagagaggtgttaactgagttgagcgttaaagaatgggtggcagttttgcaggagtgaaagcagaagctcagagaacctggtgtgtttgagaggaaggtaagaaggttcatgtccttgaagcataggaaggtgaagattacagataagttcagagatgttgaaaagagatggaaagcctcataggctatatgtgcatcaaca

SEQ ID NO: 2084 - DNA, 2300 bp, Homo sapien
cagtcactaatattgtaaaccatgtatgagatcagaataattctgtttccagaaaaaaaacattattttcattataagaatatctgtttatcttgaagtgataaaattgatattattatattttcatattactgtgtgtgtctgttaaatacagcttcctctactcaaacaagtataatgtactactgtctgctaattgagaggtagagatgtaaaaaagatggtagaagacttcttgggaagagggaaaagcatgtgtaaatacaaataacaaaaaatgtatttagagaatggataataaaaatgtattattataatcattcagccaacacacctctgcaaattcattttcaatctgcacagtcatgtgaaatatttaaaaatggatgcagaattttcaacaatttctatgtgtgattttttaaaaattatgctgattttatcctacatagatagataagtatgtagatgttgataggtagaaaagtttaggttaagaagcaaatgtaaaaagaaaaaaactctgacaaatatgttctaggaagttaccccagagagtggtacaactctatagttttatctattacctcaaaataatggaaacttctaaatatggttatggctgttaagattattaaattaacaccattataagtaatttcactttctttctatgattttgcaatctctattttgtatgatccactccttcaaaaagaattatcagatgtagtgaacttcatgccatttatgtttatagaaaataaagacctcaagtaactatacacacatttataatattaggattaaaacagatgcaatatgatgtaaattcttggggacaataactttcaaatgcatttgagtcctaattgagatttcttatattaaaaaataggatatattttcagtgaaaggttgatggagatttcatactcggtatgtgtctgatatctcaattcattgtcttttaaatgtcgaagtaaaaggaagcaatgtccacagacccagtctatctatatattttaacccttaggaattataatttctagaaaaatcaatagaagatggaaatattacaggcataattgtacgagagggatgtttcagggtggctaccaacttcttcctttttatattattgagaacactttttccatattcaaagaaatgaaattgctccagtaaggttgaatgatgcagggtaagagagtttgccatttaccctttctttgctcttgtgaggcagctattctgccttttcttgagccctagattacagaagtgtttgaaagcttagaaataaacactcttcccatcccgctatccatctatcagtgaattcttcttcaagtaaaaacacaagtcagactgatagaaaaactatatttccaggtatggctgtgcatatgggggggatatttcagctggggggatcactaatggaatataccatttataactaaaagaagaatataagcctctttatttatttatgcatagtgtttttagatgaccaaatccctagatagatagatacacattaatacctaaccaaaacatataactttaataagctattcataaatgactgcacatatctataaattaccacattcatctatcaataacagctgaaaatcgtgtgccttggatgacacacactgatagtctgcactgcaaactttgtttaaagcactaaatacaatatcaagtcctctgtcaatgacagcagaaggttctagtgcactatttgtttcataatcctgtatttagctgactctttacttctctgcagctcaagttgccggcaaatgctgaactggagcacgagagtcaatccttgtttggttaacaaattccccgcaaaatatccccccgaaacccccaggagctgtagtgatgtcatatccgttgtccaggtctccacacctctctcagcagttaatccctttatctattccttgggtcaaaacttttgaggtgggctagctatatagcagcgggggagagggtaaactggggcgcgcgggttggaggcgcttcagcaccgcggccagcgcccactgcagcccaacccactctctagagctcccggactcctagctctgagaatgcctgcggaatgatcgccccccagggcggctgccgccgctgccgctgctgctgttattgctactgctgctgccgccgcctctgcttccactcggctctgactggcaggcagaaagtgcaactgacgagggaaaggtctctgcagtgagtggagagcctacataaaagagagtaaagaggggcaa

SEQ ID NO: 2085 - DNA, 2300 bp, Homo sapien
ccttcatgatgttctttgcctctgacacaaattctttccacattcctcttcagatattcaatgtggagctatctcaaccagggatgagccatcctcaaattattaatgacttcatttgcaaaatatattttctttatgatgccattgtataagatcaaaccagagaggagatcctaaatacaggcgagctttgataaagattttactttgacagcatcttcacttggttcgtgactgccttcgctattctggttgaaagagtgtaagccatcccataatatagcctgttttaccttttttgttatttcaattacttctcatgagatctgactccgtttccacaataactggctgatctgcccaatttctactggatttattaatatatcataatttctgcttttcttttggaaaacaaatttcttctctgatcaatatttcttaatatttatcctcttttgctgcttttgttaaaaatatttgtcctctgttttagggctcaaatgcctacaaggaccaatgaaactggagcaacaaatataagcaaaacaacagcgagtgcaagaggacacagcaaattagagaatgcatgcccctatctaacagatgcggtgggcacttttcattttatcagattctccaaattttcaagagaagccagaaattcaggcttttagaggttagcatctaaataaaaagttaaaaaaataaaaggtgtatgtgaccacacaacataggtctgagtgccagatttggctctttggtcaccaattaaagacttctattacactacaatctctttaatgatttctacaaagggttctaggggttttcatgcaaataattctcccgtggctcatagtaatatcccttagcggctttggaaatcagaacaatttaggccaacttatggtggaatcatgtctcatgtagtttttcagctccatctggcaaacagctccccctggctcaaataatcattgtccaactgactgctggcagtagggcaggactccctcaaagagtaggacatgggatatctgcccaaatcactctgtcttgggaatgagtctgtctatactgaatagtttattatgcctcaagttggtatattgctgtgcagctgcctctgcagtggcagctgaatgcatctgtcacacagaatctgcagccattaatactattgttatattaggcactgggattttatttccctcaatactttatttcattgaacaatattgaattttcttctgccaaagttgagttgtgagactaaatcgtcagcagatgttttaaattgttctgttaatgatagcttgtttctctttctggtattgttttatctctgaagtattgctttgggttttcaattttggtggacagatctgtgcttctcctcactgcagaactttaagcaagtctctaaggcatgtcttactattttatttcttattcttaatgtgtcaggccaggttgggcagcagcctgcaggagctgcagtctgtttaacagaaagtttcagaactacactacagaactttttggtgtggtgagaggaagaggaaaacattctcacagcaatactccaaaaaaaaaaaaaaaaaaaggaaattctactcagacttttggtctgccaagattttttccactagattcatgatgtaatcattatgttccctttcttcatgcactttctctctctcactgccattcagatggaaattttctacataacttgggggtctcaaagatcatttacccacagacaccctcctgggctactaatgaacattagagccactgagataaattacctcatgtccttctgagaggtgacaacgtgctagcagccctccctcgctctcagcgcctcctcggcatgggcgttcactctggccatgctcaaggagctcttcagcccaccactgcgctgaaggggcccctctctgggcaggcctaggtcggaaccggctccctctgcttgaggggaggtgtggcgggagagacgcaggcgggaaccggggctgcgcgcagcgctcgggccagcgccagttccgggtggtcacgggctcagcgggccccgcactcggagcagccggctggcgccaacggccgcgggcagtgaccagcttagcacctgggccagcagctgtagaggttgcgccgggtccctcagcactgccggtccgcccgcgcagcgcttgaattctcgccgggcctcagccaccccgccatggggcagggctcgggacctgcagcccgccatgctcgagcttcccccacccttcatgggctcc

SEQ ID NO: 2086 - DNA, 2300 bp, Homo sapien
acaccatttgtacatgttgctacaagcaccgtaactctctctggctattgaattgatttagaattctggcagcttcacaaatacgtatttctaaacttgcattcatttcactattttacatttgagagaagatgtaaaaagtaatttttaaaatatctgaagagtcgacagaaaaatcagtttgtacacaagtttggaaacagccaatatatacaaattttccatctgtgagacgatgagggataatgaagatggtaaatacatatatttttactgtaagggtcttaatttgtaattgtgcatttcaggttcaaatgcaatatgatattaaattattttaaccaacagtttaaggttgtaatctgaagaactagttgatgatatttctctgcagctgatatgaggcatcccaaacattctgccaacagcattacaaatgtcaagtatttttttacctgtgatctaagagatagcttcttgataaaggagtagttctttgttatggagagtgatatttatattgaaggtattttctagttgctttcttcagtttatatgtctctgttcatgctgttatacccctataagggctcaatctagtctttgatcacctttcttccaattttaaactgcatgaagagatttgatgtaatctgatagatcatgaggcatattttgatgactaatagaaaactgagttcctaaagattagtggcagctgtagaattgaacatatgtacccagtaaacttagttgagggcctttaagcatttaaatgacttaaatactcaaagtaggccctggccaatgcttctagtctttgtcaacagaaaaatgtgttcattcatccaacccatctctattgagtggctaatgtatgctggcaccctgatgggcactgttccagaaaatctttgagagaaacatcttaggaattattaacgaacaaaaaggagtcaatagaatggaatgattttaacgtggaaaaagtgacttgggaatctatattccaggtgtaagaggattactttgaggatgggttaagtagagagggaatttagaaacctgccctcttcattactctcactgtggagtgaccacgtttttggctcccgaggctgagggccagggccaggcccttaatgaggagctgtgggccgagcctcttggagatttctgctagttgctttcctcgccttttctacacactcctcagtaccccctcatccaggatcagaacagaatcagctggaaaattaaattactcaccctcttaatgtcagctcccataaattttttcctccttctccctcagagtacagttcaactcttttaagaggaaagccactgaatgaacctagtgctgaatttaaacgtttaagagataaacctgtcagtttcagatctccaaagaggacttccctacatgctctaggttttgacttctagggtccctccattctatcttcattcctttcttctaattattgggttaaaaaaataaaaataaaaacacttttcagagtaggcagcgcaatgagtccactggttccacgtctgccatacgaagcagatttttgcacaaggataaggttaccgctgccagcccaggactccagcggtgtggccgatcaggcgctggcctcctcccctctcccgccgaccagcgagaggctaacagacgggtgcaagtagacaagtagctgtttttattgaatacagaagctccttgaaaactccgtgtgctccggggctctcctgcaattcctttcattcccaaagtgctggagccaagcacgcgtcccccgtaactccctcccattttttctcggggatttggtaggcgaggagggaggagaggagtggggagatggggggtggttggtgggctgggcctgctcggagtcctcattcttgggctgagggaggcgggggcgggcttggggccgccccagagtcgtgtgattgggtctgaccctcagcctgcttgtcagtttcgccctgggagggggagctgggagcagggaggggagtgggcggaggagggggctgcccggagccactcgtccagcccactgacggcatgaagcctttaggggcacacagtactctcagcttgttggtggaagcccctcatctgccttcattctgaaggcagggcccggcagaggaaggatcagagggtcgcggccggagggtcccggccggtggggccaactcagagggagaggaaagggctagagacacgaagaacgcaaaccatcaaatttagaagaaaaagccctttgactttttccccc

SEQ ID NO: 2087 - DNA, 2300 bp, Homo sapien
ggctgatctggctaactagctgggttccccttccttcctaactgccccatatatgtctcttccaaagctgcccactcggctgaggaggatgacttacccccataaaggaggatgatttttctgtaagggcatacgtgtagcagtgctcccttgctagaagctccaaacaagtcttcaaagaacacacacaaaaaagccgctgaaggatagtgtttaaaatagcatgaccactccaatcggtttataacactaccctattttttccaaagcacttattattctctgaaaagaactttatttacatatttattctgtcttgattttagaaagtaagcattgagagggcaggaattgattgtcttcttcttcttccttgcctcaacttctcaacatctgcatgtcccatgactccattatgggcacaattctatctataccctttgtcattcttcagatataaataccatataggttgatgccatacctcgtggtaacctttcccaagaatgccaaacacacacattcaacttcctacttgaaacagggatactgaatagataccttaaacttaatatatgttcctctattcccaatgtcccactacagtttctaacctagctatacttggtcaatcttctcacattcagtaaatggcatcatcatctacagatggataatatctagcttaagccaaaaatccagaatttatccttgcttactattcttcatctgcaagttcctatcaactacttctaaaacgtatctcaattccagttccttctctacatgtccactttcaccaaactattatggtagtgtttttctccagacttctacagtagtccaactggtctttctgcttctgttttttgcattgcaaccggagaaattttcatacctaaactttgattctctcccctcaacacacacctacttaaagaatttgtcagtttctaaatgttcctcaaataaaaagggctcctaacaaatctacagcgtctacgtggtctggctctacctatctgatattttggtgggtgtgtggggaaggttcttctcatgtttgtcttctagttttcattaatatctgtctctctccttttccccaaccaatgcgggatgacagcagattgctggtatactgcttactgctgtatctctaacatttatttaagtggcaaaaagaactgtaagaggaactctggttctccagactgtagcagctacatctagcataaaacctctctttagaatcctcaaggccctctctgtatggggtgaggggtacattcctgaccctccggggatgatccctgcctcactccattcagaatctaggcagaacagtggattagaatgtagacccccagtcagaacaccaagggtcaaaacttagttcttccactttctagctgtgtgatttaacctctttgtacatcagtgtcctcagctgtaaaatagggagaaaagtacctacacctacacacacacacacatacacacacacacacacacacacccctacacacacacacatacacacacatgcaataatttatttattaggttacctctccctagaggctgccatttctgcgaaatgaaccctggcaggggcctatccgtctgctaaatgcctactgattcaagaaaaaagtctgaactctcaacgttttgccccttaaactgagttctcctccctacaatggtgtctaatgagttgacagaataactggctagctttatattttaccatctaaatactgtaagaacatacccggtatttccacacccaagttctcctccttgctattcaggccaattcactttcccaaggccagggattaagagccgcacggtcagctccagatagcgctcgccgccgtgcgccccgccccgccgtgcgccccgccccgccgtgcgccccgccccgccgtgcgccccgccccgccgtgcgccccgccccgccgtgcgccccgccccgccgtgcgccccgccccgccgtgcgccccgccccgccgtgcgccccgccccgccgtgcgccccgccccgccctgtgacggtcccagcccgcacatgcgcagtcgtgagtcctcttgtccttgagcgtcaaccttctttccctgaagtggctggggttcctgtttccttctttgattgacaacttgtgttaaccctcgcacatctctgggccaatttttgcttgtaagtctttccggagacccctggaatttaaatcattagcaccgcgcccttccccgaagagtcttcgaagggttgccgcttttcggtggcgcagt

SEQ ID NO: 2088 - DNA, 2300 bp, Homo sapien
aggctgacttttcctttaaattcatgcctcaagtatatgtacccaccaccttccagcacaatcctagcaaacattgtaaatgccttggcaagcgtgcctaagttctatgtacaggtaagtagaataaaacttttcctaaaaggacttgttgtatagcttgatactttatttttcatgctgattctcataaaagtaatcagactaattctagacagccagtgatacagtattttaaatgtaattaaatattttctacttccaagtagagacttttataaggtatcgtataagtggatactaataaacagaagctagtttgggaaatgtaatttgtgataattctctattactttagaatacatcattaacatagagattcttaaaagaaaagttatagtagacccctgagcaaatgcttaaaaatattggcagtaataacatatttttttgaagtacaaagtatagatgatgtttattttttaatgtatttctctattttataattttacaataattgggttaaagatataaaatcatttcagtggtttttatattgcaagaacgttacattcttagcgatgggactaattgaacatgtagaattgacattttaggaaggttaatctgagatatactaatgccttgttttaccttatgcagagattttaaaggcaagagatgggcaggtcttcctttacactcaataaatagtgttatagcaaagtttcttagtacataaaatacaagatgtgagttgaatcattttatatgtgaatttaaatgtcttaccactttaaggtccttcatcttatgaataaaatgaatttgcccacaccttttggaccaattactgcgcgacctcccatggtaagaaaactcttagaattttcaagtcaaaatttctcttcctgaatgggattattgaggctgaattatacaggtgttgtagcaacctctgatgtacattgaaaataaggaacgggtataaagtaatatgatgataatagtagaactgagaactgttaagtgagtaaaagccggaatatgaaagaaatgcttttgtcaataaaggctatcatttcatccagtgttgttaagttttttgagccaaaacattgtgccatcctataaggtagttatatttaactaaattacctaaagatttcatagttctggttttgtcacaaatagagctttttttgcaaaagacgaaaaagggagctgatatttttattagacttgactatgcaaatctgtcaataatttagaagtaggctatacctgctcttgaataattttagttattcttttgctgtagtactagtatatttatgaataatagcaatgcaaaattattaatactttgagtgttcatatatgaatagaagagaatgtggtttgggatttgtttcttttctaatgtatgtactattaactttaggatttgttttttttttctttttgtaaccccaacacctactcaatgcttgatatattactggagaattagttaaggttatactagctgctgttaacaaataaattcttagtcatttaatacaataaaagttatttttggttatgtcagatcctttccaaaagtagagcagagggatattttgttctactgagccacgaaaaacacctgaattgtttcgaccatgtgccttcccaggttgatgaagacattgctacacagtctgcagatcaggaaggaagaattgtatgtgggagtttttaatggtctcatttcattggctataactcagttacaaggagaaatataactgcagaggagctttgaaaatttagttcagctgagggtaaaggaagaagagacaaattttgtcatcagctagtgatctgccatacaaggtgttcccttaatatgtgtagaatgtgttaaaaaaaaaaaaagaccatgtgatagaaatgagaatgaagtattcagatggagtttgttctataaatattttggactgccatagtatttttgttttattcttttaattagtatgaagactatatgccattgcatgcacctcttccacccacatctcctcagccacctgaggaacctcctttgccagacgaggatgaggaattatctagtgaagaatcagaatatgaaagcactgatgatgaggaccgacagaggtttgtaacatgaaaaatttgtttagtttccaagaaacatagaatgtaagaaagagactcttgctctccctagattttgtgtgtataatacttaatagtttggggtgattagaatttgtcctcagccccccagcacctcaggc

SEQ ID NO: 2089 - DNA, 2300 bp, Homo sapien
tattagcagtttgctcgatctgctagaccaaaacaagatcctaaggaaggaaaaagaaagtgttaaaaattaataaaggtaagtgtgaataaaacataataaaaagacaagactaattcttgagataaaattaagaataaaagtttgacaaggtagtaattcaggtatctctttttttttttttttgaggaaatacctatctgtgcagttaagtcccattaaacgtcaaaactataactacagattaaaacccatttatatgtgaaaattaagtttggagaatgaatcttataaggggagtgtgcctgttactctttttttaactttttctgcctatagtaaagcaatggttcttaaaccctaatatgtatcatatcacttggagagcctaataaaacacagattcgtaggttccttccttccctgaaagagttgatttggtaggtctgatgtggggacctagggaaactgtttataccagttttccttttaatgaggggatttccaggatgctggacatttagtgctgaaatggggaatgtgtctggtaagccaagacaggtcggtcacccttgttggcacctgaaaatttgcgagattaatgaggtttcaggtaatgatgaggcatcttatccagagaccacagcttgaaaactcctggaataaacacttacagatacattttctaactcttaaaattaacctaaagtaaatgttaaaataaaagttaaaaaaaaaagtcaaactgtcattaaaaataattctggctgagcacggtggctcacccctgtaatctcagcaatttgggaagtggaggtgggcggatcacaaggtccagagatcaagaccatcctggccaacatggtgaaaccgactctctactaaaaatacaaaaattagctgggtgtggtggcgcctacctgtagtcccagctacgtgggcggctgaggcaggagaatcgcctgaacctgcgaggtggaggttgcagtgagccgagatcaagatcacgccactgcactccacactggcaacagagcaagactccatctcaaaaaaaaaaaaaatctacagtgctgagtatataaaattattaacacatttcacaacaatatgtgtttgtggagttaaatattttttgtctttaaaacaggtaattttagtgcatacttaatttgatgattaaatatggtagaattaagcattttaaatgttaatgtttgttacattgttcaagaaataagtagaaatatattcctttgttttttatttaaatttttgttcctctgtaaactaaaagaacacgaagtaattggtcacaattactggtgtttaactgccaaatatgggtaaataagggaaaattttgtttaatatttagtccttctgagatggcttgaatatttgaattttgttgtacgtctatactgggtagtcacaagtcttataaacactttagaggaaagatggatttcagtctgtatttttaaacatcatttattttaaatctggtgctgaaaaataagaaaaaaattaaactgcattctgctgttcttctttagaagcattcctgcgtaaatactgctgtaatactgtcatgcaaagtgtatcctttcttgtcgtatcctttttggggcagtgtttttttgtttttttcctagaaatgtttgtccttcccccacctgttgatccaggttaaggaatacttttttacactttattcaaatgaaatatttctaaaattatttgtatagactgaacagatcttttatgtgtttttagatttgttgttgaattttctgtgctgtcctttatataattttttgagggaaagttagtgaatcaggtcaacttacttagagaatgtgttcatttactttaacccagaatacagtcttgtttcttctatttgtatgtttcctaaacctaattcaataacatatgctttctgttgtgtaatatatctggtttaggtatttataatgtgtttaaaatttgggcaaaggaaatgtttttcttttaaaaagtacttacattgaaaattaagatgtctggattactatgtaaattctagagagtagcagacctctcatctgaagtcttagtgaatctcttttgacatagatagcaatagaagtatctttcttctttcccctttctttttctaaacaagagaagaaaagcgtaatagaggggagaacacataatgcccactaagggtagtgcattaaggaaaaacagtcttggcaggtatataggaatagtggtttccagactggttgatgaccgtaatcaccaagaac

SEQ ID NO: 2090 - DNA, 2300 bp, Homo sapien
aaatacaaaaattagctgggtgtggtggcgcctacctgtagtcccagctacgtgggcggctgaggcaggagaatcgcctgaacctgcgaggtggaggttgcagtgagccgagatcaagatcacgccactgcactccacactggcaacagagcaagactccatctcaaaaaaaaaaaaaatctacagtgctgagtatataaaattattaacacatttcacaacaatatgtgtttgtggagttaaatattttttgtctttaaaacaggtaattttagtgcatacttaatttgatgattaaatatggtagaattaagcattttaaatgttaatgtttgttacattgttcaagaaataagtagaaatatattcctttgttttttatttaaatttttgttcctctgtaaactaaaagaacacgaagtaattggtcacaattactggtgtttaactgccaaatatgggtaaataagggaaaattttgtttaatatttagtccttctgagatggcttgaatatttgaattttgttgtacgtctatactgggtagtcacaagtcttataaacactttagaggaaagatggatttcagtctgtatttttaaacatcatttattttaaatctggtgctgaaaaataagaaaaaaattaaactgcattctgctgttcttctttagaagcattcctgcgtaaatactgctgtaatactgtcatgcaaagtgtatcctttcttgtcgtatcctttttggggcagtgtttttttgtttttttcctagaaatgtttgtccttcccccacctgttgatccaggttaaggaatacttttttacactttattcaaatgaaatatttctaaaattatttgtatagactgaacagatcttttatgtgtttttagatttgttgttgaattttctgtgctgtcctttatataattttttgagggaaagttagtgaatcaggtcaacttacttagagaatgtgttcatttactttaacccagaatacagtcttgtttcttctatttgtatgtttcctaaacctaattcaataacatatgctttctgttgtgtaatatatctggtttaggtatttataatgtgtttaaaatttgggcaaaggaaatgtttttcttttaaaaagtacttacattgaaaattaagatgtctggattactatgtaaattctagagagtagcagacctctcatctgaagtcttagtgaatctcttttgacatagatagcaatagaagtatctttcttctttcccctttctttttctaaacaagagaagaaaagcgtaatagaggggagaacacataatgcccactaagggtagtgcattaaggaaaaacagtcttggcaggtatataggaatagtggtttccagactggttgatgaccgtaatcaccaagaacagtggttctcagtcttggctgcacattgcagtgatctggaacttaaatactaattttaaaagggtgcagtggctcatacctgtaatcccagcactttgcaagtccgagatgggagaatcacttgagcccaggagtttgagaccagcctgggcaatgtagggagaccctgtccctacaaaaaatacaaaaattagccaagtgtggtggcttgcacctctggtctcagctacttgggatgctaaggcaggaggattacttgagccccagaggttgaggttgcagtgaaccatgatcacaccactgcattctagcctgggtgacagagtgagaccctctccctcctaaaaaaatccttaagaaatatattgatgcttggttcctttggtcagaattttgatttaaggtgttgggagtgtagcacagatgttggaataaacctctcaaactgattttaatatacaaacaaggtcgagaaccaccaaggaagagtttttatgcataaagattcctgtactctaccctagaactaatacatctgaatctctgggaatggagtataacaatcagatttgaaaaggtttctttagtaattttaaggactgaccagtttagacactgctttgttagagtaaaatgattaggtacctagtatcaacctagccatccaaccttatattaataactaggaaaataaagggttggagcctctgtgtttctttgttgaaaaatctgctactattattagatctgtgaaaacaattgaaaattcggttattatcaccttaaaagtacaaaacctatagattttgaaaatgtaattatttttctgtaggcatagttaaaaagattttgtaaatgttataaatcagtttctttataagcggt

SEQ ID NO: 2091 - DNA, 2300 bp, Homo sapien
aaagtagatataacaactattttaaatccttatttttgtgtttttgatgccgaagatgctaagaattgtttgtgcagatttttatttcagaagacataaatatactttaattgttttaatgcttctcctatggggtatatagctcttcagattgcttgtttgaggtgaaaattaagatcaaatgagaaaatatatgataatgcctgactcttagtagaagcttattatatgtgtgtctaactctacctttcatgcagtgctaaattccctaaattatatctgcaaattatccctttttttttaccaacattccaaatgcattgtgaaaaatgctgatttgctattacaagaacagagttcattgatctggcattgttgaaaagtatatttcaaaactaccatggatctgccagaaatcctaagcgaataagcaagaagaatactgtgagggaaggaaggaaaaaattgcaggtagaaaatattggtgattctttttcatctctgtccattcctttactggaaatgaaaatacttctgagaagtagaaagtattagaagttaagaagggtagaatgggaagacagaatggccaagtgttagtagagcgaaggcggaaagacagtatgagttgataggatttttaataggaccaggtaaaaatatcaatacaaaaataacattatcaaccatattgagcttttaccatatccatacattgggataacagctttatttgcattattcgtttaatcacaataactctatgaggtaaacattactttttctagttaatagatacatttagagaagttattttccagcatcacacaggttataaatggaaaagtcaggatttatagtttgtcttaactcctaataattgcgttttcacatttggaaccttgagtcaagcatgaagttcaaatggtgcccctcttctctgtcaactctttacaccatcagccctgtatcactatctagtcagtcttctatttaaattctgatactcacccgtatccagttagtttgttgtactccctgcaaattttccttccctatttgcttttaaaaatcatctcgggtaataaaactccctttgctactttgaaggcacctctttattatctccttcctactccctgtaccccatcatttataaagcttggtgacttcatccaatatcttttttggtattttgtcagccctcaagggtacaactctccaggcctgataattcagccagtgtacactgccctctgtatagtagttgcttagggatagcatctgttctgttcagtgtctgtgttaaatcagttaagtattttttgttccatttcttagactgtcattgctttgttgaaaactaccaattctctgcttctttcttcatatctttttttaattgtttttatatacccatttgttttaaaaatggtacctctaattcaatatgtccccatattcatcggtttctctaaaccaaatctgcctttagattgcactatcagtcataaagacattgccattctaatattcacccaaagtttaaatcacagagtccccatttgactctttatattctctattctcttatatctgattaaccaccattttctgtacagtctccaccaagtctgttatatctcccctctctgttttacataaacatttcccctctattccaggggtatatgttccaagacccccagcaggtgcctgaaaccacagatagtaccaagccttttgcagtcatctctccagtatctgtgggggattggttccaggacctcccatggataccaaaatctacagatgctcaagtgccttatataaaatagcatagtatttgcatataaccaatgcacatcctcctgtatactttaaatcatctctatattgctagagatgtaatatctactgtaatataaatgctatgcagatagttacattgtttagggaataatgacagaaaagtctatatgttcagtacagatgcaactatccttctttaaaaatatgttcttccacagttggttgaatctggcgatgtggaacccatggatatggagggctgactatatacaccatgttttttcctggcacatcactcaactactattagctggcgagtcaactcacgttgttggaatgactagggacaactagacttcaagtgatctttcatcccaggtaggctcacaacacaatgtatgatctcagagttccaagagatcaaactcccttctgcaaaccccagtcaaactttgcttgtgtcttgtttgctgatatcccatcggata

SEQ ID NO: 2092 - DNA, 2300 bp, Homo sapien
aagcacttaatcgtaaccctcttaaaactatgttcatatctttcactttattgtttgtttttgtgtatggacatatcccttctctaactgaacataacttctagaacagctctgtctaatacaaatagaatgtaaatcatatatgtaatttaacgtattttactaactgcattaaaagaaaccaaaagacactagggaaattaatattaatggtaaattctgtttagcctaatgtatcacagtatgttatttcaacctgtaaacatcataaaaatatatttttttactttttattttcacactatccgagtgtgttttacacttactactcatctctgttgaaaccacatacatttcaactggttagtagccaattgtttctagtggctaccatattagacatcacaactctagaattctaggagaaacattagtgtagtacagagaatgttgacttgcaatcagacttattatcaaatcctgtctttgtcacttaccatatgagcctggacaatttacccagtctgtctgggccttagttccaacatgtgtacaacacttttgctaggattagagtcaagtttattgcacaatttctaatatagagttcattgatttttagaaaatcaatgaggacataacccatgttatgccaatgttttgcacaatacctggaacctagagttttcatgttatagccatttattgagcacataagacaatgtcaatcattttactaggatttggaaatactagatatgaagtctaacttcaagaagcttggtccagaatgacagacaagtaaattgttaattataatatacttacaaaagaagtcaaatatagcttaatgtcatataaattaagaagctttcatacaacagaggagctaactatgcttgagaatatgagggtaagcttcataaagttgtggtttcaacttaatgtggaaggaaaagtagttgcttccacactaagttggatgtggaaggggatgatatgggaaacaaaaccactaggaaattcatgaaggtatgatatttcatataaaatatgaggaacttctagttttgcaatgaacagagttcacaggattggctggcggaaggaccaaagggcagcatcaggatcgacagtggaatagttaagatccacagctctcctgatacccttcgtcaaagctggtacttcctcattttgtctcatgttaaaaaatggtatcatccccaaatacctatatctttaatatttttcctcatccttcagctctaatctattcataaatctactgcctgtttacctctgaaatataccttgtctatgccctagtccaagccactcacctctttcctggaccactgtaaaagtcttctaacatctacccctttccactcttatcctcctataatctggtttcttcccagaagcagggtgattttcttttaaagtttattagtctttcagttccccatgtcacagccttaacagctctctctttcttcatgttctacaaggttctacatgatctggcctacctctctgatctcatctcattttatcccaccctttatcacatgtgctctagccacactgatttctttttaatgtgtcttatgtactagctttttcctttcttgggacattactcttgctctttcctctatctgttgctctttctctgatctctaaatgactggacacttctaatccttcaaatcacatcataaagtcactcttttaagggatgtcttcccttaccatccagtctataataccctgatggaaaagtcactttctattttatgattttatactagttcttattgctatctgaaattatttttatcatcactgttagtactgttgctattactgttatttactaatatattttcttttctttccactagaatgtaagttctctgagaacagaaacctgtctttttcataattgtctcctgaacatcacctacagtgcttagcaaaaagcagacacacacttaacacttgttgaatggatggatgaagtttttcctacctgtactattactccctttcatagcatttcacttacattacattaagaaggaaaaattacacaaatttatttatttagcattttgtcaggtacaagaaatatttgcctacagggagaaaaccaccaccaccaccaatcctactactatatgcactatattaagcacatgagttgatcaaggggaaaaaagttagtttctccaattcatgggctttgagattttaaacgttttcttaaatcattaatggagaaatttaaataa

SEQ ID NO: 2093 - DNA, 2300 bp, Homo sapien
gccagaggtttaaaaaggttaagattttatcagtaagaaaaaaccagtcacctctgccagcccatgcaccatgttgtcctgccgctccactgtcccactcctccaccagtcgcaatggaagaagagattgccgtactggtgattgacaatggctccagcatgtgcaaagctggctttgctggggacgacaacccccagccatgtttccttccatcatcggtgcccccggcaccagggcatgatggtgggcatgggccagagggactcctatgtgggctacatggctgagagcaagcacagtatcctgaccctgaagtacccccattaagcatggtatcatgaccaactgggatgacatagagaagatctggcatcacaccttctacaagggactgcacatggccttggaggagcacctggtgctgctgaccgaggaccccctgaacctcaaggccaacagagagaagatgactcagatcatgtttgataccttcaacaccctggccatgtacgtggccatccaggctaggctgtccctctacacctgtggttgcacactggcattgtcatgggctttggagatggggtcacccacatggtgcccatctataagggctacgccctccctgacaccattctgcatctggacctggctggccaggacctgaccaactacctcatgaagatccttaccaaggttggctatagcttcagcaccactgccgagcgggagatcagacactacgtcaaggagaaactgtgctatgttgccctggactttgagcagtagatggccactgccacatcctcctcctccctggagaagagatatgagctgcctgatggccatgtcatcaccatcggcaatgaggttgcagtgtcccgagacgctgttccagccttccttcctggacatggaatcttgtggcatccacccagaccatcttcaactccatcatgaagtgtgacgtggacatccgcaaagacctgtaggccaacacggtgctatctggtggcaacatgtacccaggcatcaccgacaggatgcagaaggagatcaccacccgggcacctagcaccatgaagatcaagatgatcgcatccccagagcacaagtactccgtgtggatcagcggctccatcctggcctcactgtcagccttccagcagatgtggattagcaagcaatagtacaatgacttggccccctccatcgtccaccgcaaatgcttctaaatggactgtgagcagatggctagcaattgcttcatgggttaattcagaagtaaaaatttgcccctggcaaatgcatacacctcatgctagcctcaccaaactggaataagccttagaaaataagttgtctttaaagcttgtatctgatatcagcactggattgtagaacttgttcctgattttgacattgtattcaagttaactgttccccttggtatctgtacatatctttgatttcagtctttagtacatgtggcttggtcacttcatggctaaaaacgtacttgtggaagacaagtctggcttggtgagtctgcatggccagcagtctctgatctgtgcagggtattaatgtgtcaggactgagtgttctgggatttgtctacaggctggtaagggctccttaaccagttgtttctgtcctgtcggtctgtcagggttggaaagtccaagccataggacccagtttcctttcttagcttctgttgtctgccagaacaccatgggctgttactcgccttgagttggaagcggtttgcatttatacctataaatgtattcatccttttaatttatgtaaagtttttttgtatgcaattctcgatctttaaagagatgacaacaaattttggttttctactgttacgtgagaacattaggccccagcaatatatcattgtgtatggaaaaataaaagtgctgccagaaccaaaaaaacattaatttctaaaaggtcatttagatgatttccatgagagactttttaatgttcttctcctgttaggattattattgataatccttttcagattatgagtaaacagtttgccctcaagtatttattcatgctaatatttactttgtaaaatgtgcttcttacaggaatataaatagtttctggaaaggacactgacaacttcaaagcaaaatgaagttctttctgttgcttttcaccattgggttctgctgggctcagtattccccaaatacacaacaaggacggacatctattgttcatctgtttgaatggcgatgggttgatattgctcttgaatgtgagcgat

SEQ ID NO: 2094 - DNA, 2300 bp, Homo sapien
agcaaaactagatgggaaaaggaagaagcaaatttcaagagaaaactcaaaaggccaaaaaatgtgaaatgatgttcagccttgctagtaattgggaaaaacacaaatcattttttttttttttttttttgagatggagtctccctctgtcacccacgctggagtgcattggcgtgatctgggctcactgccagctccacctaccaccttcaggccgccattcccctgcctcaggctccagagtagctgggactacaggggcccaccaccatgcctggctagttttttgtgtttttagtagagacagggtttcaccatgttagccaggatggtctccgtctcctgacctcgtgatctgcccgcctcagcttccgaaagtgctgggattacaggagtgagacacgtgcccgacccaaatcatttttaatctattagtcaaaaattagagctatgataatattaatttttggtgggagtgtggcaaaaggtactataatatactgctactagagagtaaaaattgataaattttgtaagggcaattttgcacaatatgaaaatataaaaatatgcttcatgtttaccatacatttatctagcatacagaattacccatgtgtaaacatgtatacagatgttcattataacacttcttataaaaacaaaatatttggaaataaatgttcatattaataaggcgcataccgtatgatcttagtccagttagaatattctgttttatttcaatcctttaaaagactcaacttctgactctatatagacgattaaaaaaagaatgtgttctccctttgtgcatttggtcaggtaaattaaaaaatacaccacatgctagccgcaccaaactggaataagcctttggaaagaagttgtccttgaagcttgtatctgacattgtagcaggacgagcctcagacaaaacctctcagacactgagttgtagaaggaagggctttattcagctgggagcatcggccagctactgtctcaaaatctgagctcccggagtgcacaatttctgtcctttttaagggctcacaacactaaagatttcacatgaaagggtcgtgattgatttgagcaagcaagggatacgtgacaaggactacattcactgctggtcagggagaaacagaacagggcagggagtttcacagagttcttttatacaatgtctggaatctgtgaataatatcagcttctaaatcataagttgatttttagctactgggtttaggccaatcaggcccaggcctggtttcaggcctggcgctgggctgcatgtctttggttgtacttcctggttgtttttactgaatagaaaacaatataaaacaaggagagggtctttgtctcctctcaatatcagcactggattgtagaatgtgttgctgattttgaccttgtattcaagttaactgttgcccttggtatctgtacatatctttgatttcagtctttactacacgtggcttggtcacttcatggctaaaaacatgcttgtggaagaccagtctggctcggtgagtctgtgcggccagcagtctctgatctgtacagggtattaatgtgtcagggctgagtgttctgggatttgtctagaggctggtaagggcttctggaccacttgtttctgtcctgtcagtctgtcagggttggaaagtccaagccataggacccagtttcctttcttagcttacgttatctaccagagcaccgtgggctgttacttaccttgagttggaaggggttcgcatttatacctgtaaaagtattcatccttttaatttatgtaaagtttttttgtatgccattctggatctttaaagagatgacaacaaattttggttttctactgttatgtgagaacattaggccccagcaacaggtcactgtttaaggaaaaataaaagtgctgccagaacctaagaaaaacattaatatctaaaaggtcatttagatgatttccatgagagactttttgatgttctttacctgttaggattattattgataatccttttcagattatgaataaacagtttgccctcaagtatttattcatgctaatatttactttgtaaaatgtgcttcttacaggaatataaatagtttctggaaaggacactgacaacttcaaagcaaaatgaagttctttctgttgcttttcaccattgggttctgctgggctcagtattccccaaatacacaacaaggacggacatctattgttcatctgtttgaatggcgatgggttgatattgctcttgaatgtgagcgat

SEQ ID NO: 2095 - DNA, 2300 bp, Homo sapien
cttggtttgaggtctttggctctgcatcactctgattttctttgagttggggacatttatctttctaatgtcctatttctttacagtaggcacattagtcatgctgcaaatgtgagtgattggacagggcattcctcccagaacccccttttttctgccttttcaggagaattcctctaattgtcacagccagcaaactagcgtttcacctggcctggcgttcgccctccttacggctttcttggccgcttgttgcatctctatttacaaatacttcattagctctttccagtaactgcaaggttttcattcctgcaaacctagcctgtttttgcaattttctctggatatcttctgcactctgaataactaaggccgtattaatcaacggctgattttcaggactctccagatcgaaaggagtgtacatgcaataggcctcacacggtctttgatagaactgggctgggctttcctcctttccttggatgacttcagaaactttatttacattggtacccttttgagccccttttttcaacctttcaattaatgcctctcggtaccctcttagcctttccatatctggtccttcatttggatcctattgagggtccgttcctggcagctgaattcttatgtattcttggggactttgataattggctgggatgtgctcctccagccatttaactgttgcctgcagcacctgttgccttttatgtgttttaaagaggtacatgagtagctggtggcaatcagcctaagtaggattctgagtctggataattctttgaagcaagtcaattagggcttgaggcttttcagtgtaagatggagtgttatttttccagttgagtagttcagcagaggtaaaagggtgatacacaaaagcatgcctttctaccgtatgtctgacctcatctgtcctagtatatcgctgctctctcagggcatttgaattcccgtcttgggccgttaagcgggctgccagggaagtggattttcccgcagtttcacttttgttcttgtctactctgggtggtctaggggctgtgggctcaggagaagggggcctccccactggataaggggttgagggcactgttggtgccatctcctgccttgagtcctcgagctctgggtcaaacagaactttaggtgctggcttctcttggccggtggagcgagaactttcctgaaataaatgtccctttgctactactactgctgctgcctgtccttttaccactgtagaggatctaaaactagctgtaactaggaatctctatatggaaattgatatgggtgcaggcacaccatgagcgatcaggccaagcttccgctcaggtggagtggggcaagttgaaaagacttgtcttactaagtttcagatgtctggactccaagtgccagttccttcctggtgttcagccactgtgttaatcctccgcggggatcactgctctggcgaggcgttcaaccggggccatttcctacctgggagcgctctttggatcccatccctcaggctggccagagtccctggcagcctgagggatgccccggccttactccacaaggcatgcctaatctgcctaaggagctgcctcggccgtccatcagttatcttgcttccaggtcagggaaccaagaaatgtagcaggacaagcggcagacaaaactctcagacaccgagttgtagaaggaagggtgttattcacctgggagcatcggatagctactgtctcaaaatccgagctccccaagtgcacaatttctgtcccttttaagggcacacaacactaaagatgtcacatgaaagggtcgtgattgatttgaacaagccagggatatgcgacaaggactacatgcacccgtggtcagggagaaacagaatatggaagggagtttcacaatgttcttctatacaatgtctggaatctatgaataacatcggcttctaaatcataagttgatttgtaactactgggtttaggccaaccaggcccaggcctggttttgtgcctttgattttgcttccttgttgtttttactgaatagaaaacaatataaaacaagaggacagggtctttctctcttctcaatatcagcactggattgtagaacttgttgctgattttggcctggcattcaagttaactcttccccttggtatctgtacatacctttgatgtcagtgtttagtacacgtggcttggtcacttcatggctaaaaacgtgcttgtggaagacaagtctggcttggtgagtctgtgtggtcagcagtctctgatccg

SEQ ID NO: 2096 - DNA, 2300 bp, Homo sapien
gcttgaggcttttcagtgtaagatggagtgttatttttccagttgagtagttcagcagaggtaaaagggtgatacacaaaagcatgcctttctaccgtatgtctgacctcatctgtcctagtatatcgctgctctctcagggcatttgaattcccgtcttgggccgttaagcgggctgccagggaagtggattttcccgcagtttcacttttgttcttgtctactctgggtggtctaggggctgtgggctcaggagaagggggcctccccactggataaggggttgagggcactgttggtgccatctcctgccttgagtcctcgagctctgggtcaaacagaactttaggtgctggcttctcttggccggtggagcgagaactttcctgaaataaatgtccctttgctactactactgctgctgcctgtccttttaccactgtagaggatctaaaactagctgtaactaggaatctctatatggaaattgatatgggtgcaggcacaccatgagcgatcaggccaagcttccgctcaggtggagtggggcaagttgaaaagacttgtcttactaagtttcagatgtctggactccaagtgccagttccttcctggtgttcagccactgtgttaatcctccgcggggatcactgctctggcgaggcgttcaaccggggccatttcctacctgggagcgctctttggatcccatccctcaggctggccagagtccctggcagcctgagggatgccccggccttactccacaaggcatgcctaatctgcctaaggagctgcctcggccgtccatcagttatcttgcttccaggtcagggaaccaagaaatgtagcaggacaagcggcagacaaaactctcagacaccgagttgtagaaggaagggtgttattcacctgggagcatcggatagctactgtctcaaaatccgagctccccaagtgcacaatttctgtcccttttaagggcacacaacactaaagatgtcacatgaaagggtcgtgattgatttgaacaagccagggatatgcgacaaggactacatgcacccgtggtcagggagaaacagaatatggaagggagtttcacaatgttcttctatacaatgtctggaatctatgaataacatcggcttctaaatcataagttgatttgtaactactgggtttaggccaaccaggcccaggcctggttttgtgcctttgattttgcttccttgttgtttttactgaatagaaaacaatataaaacaagaggacagggtctttctctcttctcaatatcagcactggattgtagaacttgttgctgattttggcctggcattcaagttaactcttccccttggtatctgtacatacctttgatgtcagtgtttagtacacgtggcttggtcacttcatggctaaaaacgtgcttgtggaagacaagtctggcttggtgagtctgtgtggtcagcagtctctgatccgtgcagggtattaatgtgtcagggctgagtgttctgagatttatctagaggctgggaagggctcctgaaccagttgtttccgtcttgtcggtctgtcagggttggaaagtccaagccataggacccagtttcctttcttagcttacgttatctaccagagcaccgtgggctgttacttgccttgagttggaagcggttcgcatttataccggtaaatgtattcatccttttaatttatgtaaagttttttagtatgcaattctcgatcttttaagagttgacaacaaattttggttttctgctgttatgtgagaacattaggccacagcaacatgtcattgtgtaaggaaaaataaaagtgctaccatatgcaaaaaaaaaaaaaaaagaaaagaaaagaaacattaatgtctaagaggtcattgagatgatttccatgagagactttttgatgttcttcaccagttaggattattattgataatccttttcagattatgaataaacagtttgccctcaagtatttattcatgctactatttacattgtaaaatgtgcttcttacaggaatataaatagtttctggaaaggacactgacaacttcaaagcaaaatgaagctcttttggttgcttttcaccattgggttctgctgggctcagtattcctcaaatacacaacaaggacgaacatctattgttcatctgtttgaatggcgatgggttgatattgctcttgaatgtgagcgatatttagctcccaagggatttggaggggttcaggtgggtatgattcatagtatcaattgcagaat

SEQ ID NO: 2097 - DNA, 2300 bp, Homo sapien
gcttgaggcttttcagtgtaagatggagtgttatttttccagttgagtagttcagcagaggtaaaagggtgatacacaaaagcatgcctttctaccgtatgtctgacctcatctgtcctagtatatcgctgctctctcagggcatttgaattcccgtcttgggccgttaagcgggctgccagggaagtggattttcccgcagtttcacttttgttcttgtctactctgggtggtctaggggctgtgggctcaggagaagggggcctccccactggataaggggttgagggcactgttggtgccatctcctgccttgagtcctcgagctctgggtcaaacagaactttaggtgctggcttctcttggccggtggagcaagaactttcctgaaataaatgtccctttgctactactactgctgctgcctgtccttttaccactgtagaggatctaaaactagctgtaactaggaatctctatatggaaattgatatgggtgcaggcacaccatgagcgatcaggccaagcttccgctcaggtggagtggggcaagttgaaaagacttgtcttactaagtttcagatgtctggactccaagtgccagttccttcctggtgttcagccactgtgttaatcctccgcggggatcactgctctggcgaggcgttcaaccagggccatttcctacctgggagcgctctttggatcccatccctcaggctggccagagtccctggcagcctgagggatgccccggccttactccacaaggcatgcctaatctgcctaaggagctgcctcggccgtccatcagttatcttgcttccaggtcagggaaccaagaaatgtagcaggacaagcggcagacaaaactctcagacaccgagttgtagaaggaagggtgttattcacctgggagcatcggatagctactgtctcaaaatccgagctccccaagtgcacaatttctgtcccttttaagggcacacagcactaaagatgtcacatgaaagggtcgtgattgatttgaacaagccagggatatgcgacaaggactacatgcacccgtggtcagggagaaacagaatacggaagggagtttcacaatgttcttctatacaatgtctggaatctatgaataacatcggcttctaaatcataagttgatttgtaactactgggtttaggccaaccaggcccaggcctggttttgtgcctttgattttgcttccttgttgtttttactgaatagaaaacaatataaaacaagaggacagggtctttctctcttctcaatatcagcactggattgtagaacttgttgctgattttggcctggcattcaagttaactcttccccttggtatctgtacatacctttgatgtcagtgtttagtacacgtggcttggtcacttcatggctaaaaacgtgcttgtggaagacaagtctggcttggtgagtctgtgtggtcagcagtctctgatccgtgcagggtattaatgtgtcagggctgagtgttctgagatttatctagaggctgggaagggctcctgaaccagttgtttccgtcttgtcggtctgtcagggttggaaagtccaagccataggacccagtttcctttcttagcttacgttatctaccagagcaccgtgggctgttacttgccttgagttggaagcggttcgcatttataccggtaaatgtattcatccttttaatttatgtaaagttttttagtatgcaattctcgatcttttaagagttgacaacaaattttggttttctgctgttatgtgagaacattaggccacagcaacatgtcattgtgtaaggaaaaataaaagtgctaccatatgcaaaaaaaaaaaaaaaagaaaagaaaagaaacattaatgtctaagaggtcattgagatgatttccatgagagactttttgatgttcttcaccagttaggattattattgataatccttttcagattatgaataaacagtttgccctcaagtatttattcatgctactatttacattgtaaaatgtgcttcttacaggaatataaatagtttctggaaaggacactgacaacttcaaagcaaaatgaagctcttttggttgcttttcaccattgggttctgctgggctcagtattcctcaaatacacaacaaggacgaacatctattgttcatctgtttgaatggcgatgggttgatattgctcttgaatgtgagcgatatttagctcccaagggatttggaggggttcaggtgggtatgattcatagtatcaattgcagaat

SEQ ID NO: 2098 - DNA, 2300 bp, Homo sapien
cttggtttgaggtctttggctctgcatcactctgattttctttgagttggggacatttatctttctaatgtcctatttctttacagtaggcacattagtcatgctgcaaatgtgagtgattggacagggcattcctcccagaacccccttttttctgccttttcaggagaattcctctaattgtcacagccagcaaactagcgtttcacctggcctggcgttcgccctccttacggctttcttggccgcttgttgcatctctatttacaaatacttcattagctctttccagtaactgcaaggttttcattcctgcaaacctagcctgtttttgcaattttctctggatatcttctgcactctgaataactaaggccgtattaatcaacggctgattttcaggactctccagatcgaaaggagtgtacatgcaataggcctcacacggtctttgatagaactgggctgggctttcctcctttccttggatgacttcagaaactttatttacattggtacccttttgagccccttttttcaacctttcaattaatgcctctcggtaccctcttagcctttccatatctggtccttcatttggatcctattgagggtccgttcctggcagctgaattcttatgtattcttggggactttgataattggctgggatgtgctcctccagccatttaactgttgcctgcagcacctgttgccttttatgtgttttaaagaggtacatgagtagctggtggcaatcagcctaagtaggattctgagtctggataattctttgaagcaagtcaattagggcttgaggcttttcagtgtaagatggagtgttatttttccagttgagtagttcagcagaggtaaaagggtgatacacaaaagcatgcctttctaccgtatgtctgacctcatctgtcctagtatatcgctgctctctcagggcatttgaattcccgtcttgggccgttaagcgggctgccagggaagtggattttcccgcagtttcacttttgttcttgtctactctgggtggtctaggggctgtgggctcaggagaagggggcctccccactggataaggggttgagggcactgttggtgccatctcctgccttgagtcctcgagctctgggtcaaacagaactttaggtgctggcttctcttggccggtggagcaagaactttcctgaaataaatgtccctttgctactactactgctgctgcctgtccttttaccactgtagaggatctaaaactagctgtaactaggaatctctatatggaaattgatatgggtgcaggcacaccatgagcgatcaggccaagcttccgctcaggtggagtggggcaagttgaaaagacttgtcttactaagtttcagatgtctggactccaagtgccagttccttcctggtgttcagccactgtgttaatcctccgcggggatcactgctctggcgaggcgttcaaccagggccatttcctacctgggagcgctctttggatcccatccctcaggctggccagagtccctggcagcctgagggatgccccggccttactccacaaggcatgcctaatctgcctaaggagctgcctcggccgtccatcagttatcttgcttccaggtcagggaaccaagaaatgtagcaggacaagcggcagacaaaactctcagacaccgagttgtagaaggaagggtgttattcacctgggagcatcggatagctactgtctcaaaatccgagctccccaagtgcacaatttctgtcccttttaagggcacacagcactaaagatgtcacatgaaagggtcgtgattgatttgaacaagccagggatatgcgacaaggactacatgcacccgtggtcagggagaaacagaatacggaagggagtttcacaatgttcttctatacaatgtctggaatctatgaataacatcggcttctaaatcataagttgatttgtaactactgggtttaggccaaccaggcccaggcctggttttgtgcctttgattttgcttccttgttgtttttactgaatagaaaacaatataaaacaagaggacagggtctttctctcttctcaatatcagcactggattgtagaacttgttgctgattttggcctggcattcaagttaactcttccccttggtatctgtacatacctttgatgtcagtgtttagtacacgtggcttggtcacttcatggctaaaaacgtgcttgtggaagacaagtctggcttggtgagtctgtgtggtcagcagtctctgatccg

SEQ ID NO: 2099 - DNA, 2300 bp, Homo sapien
cttggtttgaggtctttggctctgcatcactctgattttctttgagttggggacatttatctttctaatgtcctatttctttacagtaggcacattagtcatgctgcaaatgtgagtgattggacagggcattcctcccagaacccccttttttctgccttttcaggagaattcctctaattgtcacagccagcaaactagcgtttcacctggcctggcgttcgccctccttacggctttcttggccgcttgttgcatctctatttacaaatacttcattagctctttccagtaactgcaaggttttcattcctgcaaacctagcctgtttttgcaattttctctggatatcttctgcactctgaataactaaggccgtattaatcaacggctgattttcaggactctccagatcgaaaggagtgtacatgcaataggcctcacacggtctttgatagaactgggctgggctttcctcctttccttggatgacttcagaaactttatttacattggtacccttttgagccccttttttcaacctttcaattaatgcctctcggtaccctcttagcctttccatatctggtccttcatttggatcctattgagggtccgttcctggcagctgaattcttatgtattcttggggactttgataattggctgggatgtgctcctccagccatttaactgttgcctgcagcacctgttgccttttatgtgttttaaagaggtacatgagtagctggtggcaatcagcctaagtaggattctgagtctggataattctttgaagcaagtcaattagggcttgaggcttttcagtgtaagatggagtgttatttttccagttgagtagttcagcagaggtaaaagggtgatacacaaaagcatgcctttctaccgtatgtctgacctcatctgtcctagtatatcgctgctctctcagggcatttgaattcccgtcttgggccgttaagcgggctgccagggaagtggattttcccgcagtttcacttttgttcttgtctactctgggtggtctaggggctgtgggctcaggagaagggggcctccccactggataaggggttgagggcactgttggtgccatctcctgccttgagtcctcgagctctgggtcaaacagaactttaggtgctggcttctcttggccggtggagcgagaactttcctgaaataaatgtccctttgctactactactgctgctgcctgtccttttaccactgtagaggatctaaaactagctgtaactaggaatctctatatggaaattgatatgggtgcaggcacaccatgagcgatcaggccaagcttccgctcaggtggagtggggcaagttgaaaagacttgtcttactaagtttcagatgtctggactccaagtgccagttccttcctggtgttcagccactgtgttaatcctccgcggggatcactgctctggcgaggcgttcaaccggggccatttcctacctgggagcgctctttggatcccatccctcaggctggccagagtccctggcagcctgagggatgccccggccttactccacaaggcatgcctaatctgcctaaggagctgcctcggccgtccatcagttatcttgcttccaggtcagggaaccaagaaatgtagcaggacaagcggcagacaaaactctcagacaccgagttgtagaaggaagggtgttattcacctgggagcatcggatagctactgtctcaaaatccgagctccccaagtgcacaatttctgtcccttttaagggcacacagcactaaagatgtcacatgaaagggtcgtgattgatttgaacaagccagggatatgcgacaaggactacatgcacccgtggtcagggagaaacagaatatggaagggagtttcacaatgttcttctatacaatgtctggaatctatgaataacatcggcttctaaatcataagttgatttgtaactactgggtttaggccaaccaggcccaggcctggttttgtgcctttgattttgcttccttgttgtttttactgaatagaaaacaatataaaacaagaggacagggtctttctctcttctcaatatcagcactggattgtagaacttgttgctgattttggcctggcattcaagttaactcttccccttggtatctgtacatacctttgatgtcagtgtttagtacacgtggcttggtcacttcatggctaaaaacgtgcttgtggaagacaagtctggcttggtgagtctgtgtggtcagcagtctctgatccg

SEQ ID NO: 2100 - DNA, 2300 bp, Homo sapien
cttgaggcttttcagtgtaagatggagtgttatttttccagttgagtagttcagcagaggtaaaagggtgatacacaaaagcatgcctttctaccgtatgtctgacctcatctgtcctagtatatcgctgctctctcagggcatttgaattcccgtcttgggccgttaagcgggctgccagggaagtggattttcccgcagtttcacttttgttcttgtctactctgggtggtctaggggctgtgggctcaggagaagggggcctccccactggataaggggttgagggcactgttggtgccatctcctgccttgagtcctcgagctctgggtcaaacagaactttaggtgctggcttctcttggccggtggagcgagaactttcctgaaataaatgtccctttgctactactactgctgctgcctgtccttttaccactgtagaggatctaaaactagctgtaactaggaatctctatatggaaattgatatgggtgcaggcacaccatgagcgatcaggccaagcttccgctcaggtggagtggggcaagttgaaaagacttgtcttactaagtttcagatgtctggactccaagtgccagttccttcctggtgttcagccactgtgttaatcctccgcggggatcactgctctggcgaggcgttcaaccggggccatttcctacctgggagcgctctttggatcccatccctcaggctggccagagtccctggcagcctgagggatgccccggccttactccacaaggcatgcctaatctgcctaaggagctgcctcggccgtccatcagttatcttgcttccaggtcagggaaccaagaaatgtagcaggacaagcggcagacaaaactctcagacaccgagttgtagaaggaagggtgttattcacctgggagcatcggatagctactgtctcaaaatccgagctccccaagtgcacaatttctgtcccttttaagggcacacagcactaaagatgtcacatgaaagggtcgtgattgatttgaacaagccagggatatgcgacaaggactacatgcacccgtggtcagggagaaacagaatatggaagggagtttcacaatgttcttctatacaatgtctggaatctatgaataacatcggcttctaaatcataagttgatttgtaactactgggtttaggccaaccaggcccaggcctggttttgtgcctttgattttgcttccttgttgtttttactgaatagaaaacaatataaaacaagaggacagggtctttctctcttctcaatatcagcactggattgtagaacttgttgctgattttggcctggcattcaagttaactcttccccttggtatctgtacatacctttgatgtcagtgtttagtacacgtggcttggtcacttcatggctaaaaacgtgcttgtggaagacaagtctggcttggtgagtctgtgtggtcagcagtctctgatccgtgcagggtattaatgtgtcagggctgagtgttctgagatttatctagaggctgggaagggctcctgaaccagttgtttccgtcttgtcggtctgtcagggttggaaagtccaagccataggacccagtttcctttcttagcttacgttatctaccagagcaccgtgggctgttacttgccttgagttggaagcggttcgcatttataccggtaaatgtattcatccttttaatttatgtaaagttttttagtatgcaattctcgatcttttaagagttgacaacaaattttggttttctgctgttatgtgagaacattaggccacagcaacatgtcattgtgtaaggaaaaataaaagtgctaccatatgcaaaaaaaaaaaaaaaaagaaaagaaaagaaacattaatgtctaagaggtcattgagatgatttccatgagagactttttgatgttcttcaccagttaggattattattgataatccttttcagattatgaataaacagtttgccctcaagtatttattcatgctactatttacattgtaaaatgtgcttcttacaggaatataaatagtttctggaaaggacactgacaacttcaaagcaaaatgaagctcttttggttgcttttcaccattgggttctgctgggctcagtattcctcaaatacacaacaaggacgaacatctattgttcatctgtttgaatggcgatgggttgatattgctcttgaatgtgagcgatatttagctcccaagggatttggaggggttcaggtgggtatgattcatagtatcaattgcagaat

SEQ ID NO: 2101 - DNA, 2300 bp, Homo sapien
gactacaactgaaaaaaaattagattggttgactttcccctaacatgaattatgttacatttcaacctccagtttaaataaggactatagatagaatttatttttaaaaaatgaagtacataaatttttagaggtttcctttattgttggaattttagtaagtgtatcactattagtaggttttaacacaagatttaataaacatgttccttttaaagccttatttgaccacagttcacatgttaactatttcagagtcaaatataaaaggcctattttagaattagccagctctctaaggatgtggttgattttcataattttaaatgttataataaaacatatttgtcatctgtttcttgagatatgaatataaactattcttttacattcgcttatcttcatgcataaaggctcttcttaatcatctttccccaagtcctgctgtcacagacatggaaaatgacataaaacatttttagtctccacaggtcacttaaaattatcagatgacctagaggtaaatcagtgttgtatcactaaacccaaggagtcactaatttttgttttagcataatgaaataatataatgtactttccttgcttagagtacaataaaattcacttatctgacatattgggaaatgtctcatttatatttttactttctttgttttatgagtacacaattgagttccagaagacaataaatgaccgaaaataattgttttcaaactattcataatgatcctttaagaagtcagaataatgtacaagaaaaagattaaccccagactgcataatgcagcaggccactgtctttctgtttgcctttaccctctatgtacttcctttctcatccttgtctaccagttttataattttttttatttttgtatttatttatttatttattttttgagatggagtcttgctctgttgcccaggctggagtgcaatggggcaatctcagctcattgcaacctccatctcccaggttcaagtgattcttctgcctcagcctcccgagtagttgggattacaagcgcccaccaaaatacctggctaatttttgtattttttagtaaggatagggtttcaccatgttggtcaggctggtctcgaactcctgacctcaggtgatccacccactttggcctcccaaagtgttaggattacaggtgtgacccactgtgcccagccccagttttctagattttaaaagaacttccagactttccactatagcagatcctgaggaatatgccaaggttttgatcttcccctttctcgatttatataacttagtatgtcttcaggatctgctcggaaacagatcgcttttcctaagatcccaatgggtaagaaaatgctgcctttctttgctgagataatgtttgcaattcaagtgttaccttaaaggaatgaattttacagggacctgtggcaaaatactgcaggacaaactttgtaaatacagacctgctttttcattttgtttccattttcaattaaaggatcaaaaagtagtatgtggaatactagcaaataatagtaaaagaatatatagcttgtacttttaccatgacattatttattacagactttttctttcccagtgaatttatgtaccaaatatcctcaaacctagatttattgcttctttaaacatttagagaacaactttgaatccttatgtcaaactatatacttttacaaaacgatcccacaagttgtacatatattatgaattagactaagtaaaatgtcacaagattgaaaagttctattttaaatataagtgttagtgtcttaaaatagtatttgttagtatttactagttgtttgagaaaggcaggcctccataaattaatttactcatgtcttactttttttacaggctttattttttagctacctagccttagaaagataatgctgtatttaaagaaaaaaaaaacactatctgtgataaacctatatatttatatcaaaaaactattttctgtggcttagaagataacaaaataaatacatccggccccgctgccgccatctttgttacgggcagccaggcctggccggagatgccgaagtcgtgcgcggcctggcagtgctgcaaccgctacagcagccgcaggaagcagctcaccttccaccgcaggtgagggagaacacacacactgccagtgagagaggaaatgccagctcttctcagaaagaaaaggtcctccctgaggcgggggccggagaggacagccctgggagaaacatggacactgcgcttgaagagcttcagt

SEQ ID NO: 2102 - DNA, 2300 bp, Homo sapien
aaaattacaaagagacaggaaacaattaatgaaatggcaaaagtaattccttacctatcaataattattttaaatgtatatgtattaaatgggttacacttaatgtgatccatttaatctattataaatcaaatcaatttaataaattttaaatgtaaatgaattaaacttaccaaccaaatgaaacagagtggctgaataaatttttatatataaatattacatatatatgtatgttatctacaatatattttctagatttatgggacacacataggctgaaagagaaaggataaagatatttcataaaaaataatcacaaaaagagaagagggatagttattcttatatcatacaaaatagactttaagtgataacttgtctcaagaaacaaagcaggtcattatatgatgataaattgtcacttgaataggcagatatagcaatgataaatacatgtatactcaatgtcaaatataccacaaattgaatatattcagcttttcatttgtcaatcatacttcaataaatctgggaaaaaataattatataagaaagaaataatttagtctctgtgaggtcttttctatggtgatgtgtcatattcacttaatgtttccttcactgaggtagtattcaactaggtattaataagaatacttaactagtgtaactatgtcctaagattactaatgatagagatttttaattattctactcttttatctttgatctttgctcacacaaacctagaaaataaatatgtatggctatattttttatgattgatgctgtagaatttctccagttatgcactatgaataagttctggagatctaatatacagaatgttgactataggtaatcattctgtgttgtatatttgaaattggttaagtgtagatcttaagtcttctcaccaaaagtttaacatgtgaggtgacaaacatgttaactaggatgattgtggtgactcacaatatatagtgtatcaaaaaatcaaattatacactttaactgtataaaatttatatttatcagtataaccccaataaagctgagaataaaggaatcagcttttgggaaacaaaaatgaatgatgttagtccaagcatttatatatgctcataaatttattttaaattactttatttgggacttagtcctctatgtagaacatttgaaagctggtactggtatatttctttctttatgttcaatcctttttgacttcctctactactccagtctatatatctagcagtctcctctcaaacatctctactctatacaaatatatttgcttaatccattcccaaaatcccaaaattgacttttctcttataaatttatgtacatatttattcatattacattgtttctggcagttactagctcaacaaatgtgtttaacaatgactttcattcagctcaatgttctaaatatgtcacaacaataaagaaggttttaaaatattcataatccttttccagcctatacataattaatttagtccactctagacacaattctacacaataatgaagaaatgcccctttccccatttgcagtatctctcaagggcgataagagataatattgactagactatactctttatgtgaactgaatgaagtcagaaaaagtaaaaagcatatctttaaaacaaaacaatgcacttggcaaacattgtagtaaaaatggaaaatgttttagcatttttcaagttatactctagtagtcaactgcctgcatgaaggtaggccctaggtacatatatatatatgtatatactagttaatgttaatcataaaattgaggactttgcccataaaatatcttaattacaaattttattgtcataatacttcctggttccccacatttagtgctgtgtcataggatttatgtctttttttacccatttataatcttttgaaaaagaaagcagaataagattaaaagatgggctgtttcagacaagagatccagggcaggcatctttgatatagggccattttattattacactgaatgtgacatcataggcattcagaatctggtgaaaaaatcttctaggagcagctaacaagaatcctaatacaggagtgtttatggttgggttgagacacattcagtagctgagtgattgacagcaagaggagcaagacatgaggtagatttgtattatattctcagtgaaacgggatagctttagaagctttttaataaaaaggatatatgatctaaatttcctactgtaagtatcattctctgtatagtagggaatgtaaatagt

SEQ ID NO: 2103 - DNA, 2300 bp, Homo sapien
cagaattttcttaaaagagaccataaggaagtgaattgaaaattgggtgaaggaatgaatgtatttaaaaggaaaaggtgacattttgaggaaagaaagaatggcaaaagtatacactaagtaacaacctattaataaaagtaacatattaaagtggtcacatttacaactctaatctgatgtcctacactgggcctcaattatcttaaaataagatattaaaccaaggcagaaaaagagaagaaatacttcaaggtttttagccttaaatggttgagcccaggccactgaaaaaaatacaatttacccaattaaaataacgaagcaagatttaactaagatcattttagtgagaaacagttgttctcaccctggctgcccattagaattccctggggagcttttaaaaactagaagcccaggttccactggagtgattccgatttaattggtctgaggtagacccaggcatcggtattttttaaaaagctccttagagaattctaataagcagccaggatggagagtcttgagttagaagtagagtacagctaaggatgccatatcaataaacctattctgctaatgaaagattaatagagaaaataggatgaaagaactttgatcccagacaaggaatacaggcctattggttacaaggacataattcaagaccacaagaaaataaaaatccattttactctgagtgacttttttttcaagctggcagaaaatggcattatgcccaccttgttaataacacggacacccatacagatgccacacatatttaaaaacatattttatttccattatggacaacaaaaagagagtaacagctgatggttgactacaagaaaaatataagagaaagaggagagtgtcaatattgcccggacaagaaaacacaggaaaaaatgaattgcattgagaaagtgattaaaagaaattgattccgttatttctgagagaaaaaaacgcatatatatatagaatacacctagcaacgagtttgcttgtatcacatggctcttgagtctgcacttttcaggatttaactcttaagagagccacagaattatcagagcagagccgaaagccaagtaactattcttctaagtagaaccagaaacctagttcttccccaactgcaatgaagattcgctggtgggtgaatgggcaactaaaggccagagaagttctattatttgccctaaatcactcaactaattagtggtcatactggaatcagaaccaagattttgcattgttaggttttaattttgttacatttgcactctaactgcactgaaaacagaaaaaagaaatgcgtagtgcagtttctaaattgccacagctggagcactttaagagctacaattgtccagttaaggcggtagtgggtggatggtgctgccatgttaattcggtggaataaaaccagaggtgagttaggccgggcgcggtggctcacgcttgtaatcccagcactttgggaggccgaggtgggcggatcacctgaggtcgcgagtttgagaccagcctgaccaacagggagaaaccccgtctaccaaaaatacaaaattagccggccctggtggcatgcgcccgtaatcccagcaactcgggaggctgaggcaggagaatcgcttgaacccaggaggcggaggttgcggtgagcggagatcgcgccattgcactccagcctgggaaacaagagcgaaactccctctcaaaaaaaacaaaaaacagaaaaacaaacaaaaaaaacagaggtgagttcagcagaagaaacaaaggtggattattagtcttaagtgtgcgtgcctacttcaggaagggagtgaaagcaaaaaactgaggagctaagggtgggagggggaatgaaaggatctcagaatgtgggcgtcgtgggtgggaaaagggatgccaggacaccagaagagcaatacaaaacagctcccgtgagcaggcacaggagaccttccgcgccgccggccgggcgaccccgcaggaagtaggaaggacgagcgcgcactacaagtcccagaagcccccgtttcctggagcccgcgccgtgccgcgctacgcccgccgggagccgggcagagcggccaagatgtcgcagcccaagaaaagaaagcttgagtcggggggcggcggcgaaggaggggagggaactgaagaggaagatggcgcggagcgggaggcggccctggagcgaccccggaggactaagcgggaacgggaccagctgtactacgagtgctactcggacgtttcggtccacgaggagatga

SEQ ID NO: 2104 - DNA, 2300 bp, Homo sapien
ttttttccaaagaaagttaaatatatatatggctagaaaaagcaaagaatgataagaaaaggtaggtatcccctaaatgatttatcttggaggcaatgaaaactctaaagtcaatttctgatcagtgtatatcatataaacaaatatgcaaaggtatattgaggaaagctggtttaatatatgcacgttagtttggggaagtatatcaaatccacttaaactgcttttttggagaaaaagtccttaccacctgattgctgctggaggagagaacaagatctggaagggaaggggttttaatgttgaaaagtctctgatgattctgatttacttccttgagtttagatccacatgtttagttggtgattcactgagcttctgcaaaggtcagagcacatgttccacagaaaaactcacctctgaaagactctcccactcctgtagtgggaggtgttacctaactggagaggttcccatttacatatcacacttacttgggattgcctcatagtcaaaggaatcctgggaatgagggatgatacaggaagagaggaagggaggtcagttccaagattttgacagatgaaaacaagtatttttccaggttgggagccaaaatcacaaagatcttggtatattccagaagagagttctctaatctctgcatagatttattttatttttactacagaagggccttaaatgaccagataaagcagaggatgagagttcagaaaggctttcttggcttgagagagaagggcaagagagaggaaaggctgagaactgtctgtatttcaggatctaggccaaggggccaacgagaaataagaaggccactcttggtattgtttattatatcctattgcaaagggctcccatagaaagaactgggatctaagggcctgtgaaggaggattaggtggtgagtaacatctccatatagtcagtatgttttaaacctggaggagcatggctagagacagggggaagagccagacttggccactgtctaagaacccttggtaggagtttcagccctgcaggtaactcttttttgcaatgtcagcactacaggacaaaggtgggaaagaggaaagcacatgaatcccagattcctgcactcagagattccgaaggcgacttattgtggcctcttaggtgttagagggaaggctgggggtgcctgaaatccctgcccacttcctggctgcccagggccaaggagggcctggttataggcccaactcaacaaacttctcccccatccatccttttaccacaccacccccagtcatcacagaaaaatgacccaattactcagcctcctgccttaattgtgggacacatagtgactaagtgttcacaattgcccatttcttccaccccccccccacccgccactttgccttgaccaaacatgagtcaggcttctctccagcaggtccctggaatttagcttgccccccaaatctgagcaagaactaaaatgtgaaacattcaccattgttagcttatcttccaaattcttggaccacagagacacatttcttgttcaaccaagagggtcttgaagtgagttgtttcccccatccacttggctttgcctattgcttgctcccccttatatatatagaaaaaaaaggccgatttctgtttggttttgagaggtttgcagatttctgagatcagagcgttttccctgttgcaatagtctttctttctaatggaagtctccctatcttatctaaattcggatttgtttctgtttgacgttaatgtgtagctaagagtgatcccaggtgagtctgagcccgccttggtggggaatgaagcctggagcatcggagcatttgtctttctcttagaaaaggcaaggaagcctgaaatgcgcagctctcccttgaacttcaactttttaaaggggaatgaatttctaaaggaggagtttccagtctagggctgtaggggcctccgggcaaaggaagtgcttgttgaaaaacaacattgtgatcacttccagcggcgaagggtgtgcttgggaacggtttggggaggggacagaagagagaggggtgggatggacggcggcagaagtgggaggtacacgaggagttactggaaacggcgcttctgtggaggagccgggggggatggggagtagagggagggggccctgttgcctcagcgccccgaggtcgtggagcggcagcagctgcagccggagcagcaccagcaacagcaacagcgagcgggacggagttaggaccgctcggagcgcacaggtctcgaggtagtat

SEQ ID NO: 2105 - DNA, 2300 bp, Homo sapien
aggtggtgagtaacatctccatatagtcagtatgttttaaacctggaggagcatggctagagacagggggaagagccagacttggccactgtctaagaacccttggtaggagtttcagccctgcaggtaactcttttttgcaatgtcagcactacaggacaaaggtgggaaagaggaaagcacatgaatcccagattcctgcactcagagattccgaaggcgacttattgtggcctcttaggtgttagagggaaggctgggggtgcctgaaatccctgcccacttcctggctgcccagggccaaggagggcctggttataggcccaactcaacaaacttctcccccatccatccttttaccacaccacccccagtcatcacagaaaaatgacccaattactcagcctcctgccttaattgtgggacacatagtgactaagtgttcacaattgcccatttcttccaccccccccccacccgccactttgccttgaccaaacatgagtcaggcttctctccagcaggtccctggaatttagcttgccccccaaatctgagcaagaactaaaatgtgaaacattcaccattgttagcttatcttccaaattcttggaccacagagacacatttcttgttcaaccaagagggtcttgaagtgagttgtttcccccatccacttggctttgcctattgcttgctcccccttatatatatagaaaaaaaaggccgatttctgtttggttttgagaggtttgcagatttctgagatcagagcgttttccctgttgcaatagtctttctttctaatggaagtctccctatcttatctaaattcggatttgtttctgtttgacgttaatgtgtagctaagagtgatcccaggtgagtctgagcccgccttggtggggaatgaagcctggagcatcggagcatttgtctttctcttagaaaaggcaaggaagcctgaaatgcgcagctctcccttgaacttcaactttttaaaggggaatgaatttctaaaggaggagtttccagtctagggctgtaggggcctccgggcaaaggaagtgcttgttgaaaaacaacattgtgatcacttccagcggcgaagggtgtgcttgggaacggtttggggaggggacagaagagagaggggtgggatggacggcggcagaagtgggaggtacacgaggagttactggaaacggcgcttctgtggaggagccgggggggatggggagtagagggagggggccctgttgcctcagcgccccgaggtcgtggagcggcagcagctgcagccggagcagcaccagcaacagcaacagcgagcgggacggagttaggaccgctcggagcgcacaggtctcgaggtagtataaggtttgctatccttccacttgctggcagttgcagaagaagatctgctttttaagtgaaacgtacatgccacccctccgagggctgcggcttccccgggcttgcttctttgccgctcctctttccggctctcgcgctcactctttaattggcactggcccctaagtttgccaggagctcgctgcccgctcggagcagggtcccggccgggagccgctggtgggggcggggagtccgggagccgcaatccagaagcgtcgtgggccatgtatatttcatcaaacggactttgggtgcgtcgcgtctcactgccatcagtgctatgtgcagtgacatttctgacttgagtggaggaatgcgcgaaggaaacccgggcgaaattggtattagaggatcttcttggcgccaatgctaattgtcctgatttatgccccttctgactaagctcaacgtcttcatctgaaataaaatgaaagcggtgccaagcggcatagaaccgcctggccgctggttctgatccccgggaaccagaaaatcgtcctgcggcttgaaaaaaaaaaaaagaggaaaaaaaaaagaaatagaaatagaaaaaagaaaaaatatccctcagtaaaagtttaaggcgagaagtgtcagaggcagcggagcgaggaggcgcggaggagagccggcgagcaggggactgggctggcacgacctccgaaggctgagatctcattattaatatcactatatttttggagggagaggcacctttctcatcctctcttcctctccgcccacccttactccctccccctcatctacctgtcaaagtcactgatcttttgcatttcggaagaggacgtcaacgggaaggaattccccctctgggtgcgggctccgagagggggcgacttgcaggaggctccccccgg

SEQ ID NO: 2106 - DNA, 2300 bp, Homo sapien
atatcattcagaaaatggcaaccacaaaaagcttctcagagaataaggtgcaagtgaatctacttagaatacacaagtattctcactggagtacgatgtgatgatgagaggggtgggccagagactggtcattcttgcccatcaaacctgtatcaacctgaagaaagagagtctggcaaatgtccaggtgcccatcaagatgcagactaggatcacctcttttaaagatgcctttgaacccctctagctccctctgcccacgaaggggtgcaactggccttgctgtctcccctgggcttcagatgttgcttgtcatactagtctgtgttttccctcagtacccttcattgttatggtctttcctaatagactgttggttttttgagagcaggaagcattgtatcctcattttgctccctgaagcttttggagtgtgtgtctggtgtatctagcacagaatgaagtgttcagtaaatacaagaaacttatagaaagggtagtgaagtggaaagagcaataaccaggacagaagaaaagggacctggtactaaccctgctactattagttgtttaacctggagcaagccagtttttctgggccatggtattctgataggcaaaggaagagatttagtgagaatctggaaagtccataaatggtccttcagaggtccctggatttcttgatattagatgcagactttatatgtgtttttgtgtgtgtatgtgtgtatgtgtgtgtgtagataggtgggtttaattttttgagtaaatgagtgatagctttcatcatactctcaaagggatctataacaaaataataaccactgaataaaacatgatatctctagaatttgtaagatagagttgtggggcctgggtataggcattcagctaaaggacttgtctggaaattgctatgaacaaacacaccctagttacacagatttttgtgtttatttggagtagagaggtgtggcttctctgagcccatcctgtgtactatcctttcttagaactctttcagttctatgtgaggtcacactcacattttgttttctgaagtactttacaaagaccaaatctgactttaccgatgatgatgaggatgatgacaatgacaacaaaggtgatgatgacgttagaaatagcagcagaagtataggacattcttctatgtgcatatatctgtctgtctgtcacctctttaacgctgaaagtaaacttgtttgataagtgatgttttaattgtaatttcgtaggtaagggaactaaggcacagagccttgatcatcttgactcccgtccttaccttgctagtaagagatggagctggtctttgaacccagaaaatctgacttctgagcctgcacttctaatcagcccagtatatggctttttttttaaaggaagttcttgttctctgtagtttcacttttgaagattcaaaaaatagtaagtatagaatacttcttaaatttatgattgttaccaaggacagcacaaactataatttggatccatttaacctatatagatactctactctcttgaacaatggaaatgtatttcccatagtttacagtcttcctgacatagaaatgttttgttgatcttatctggctgtactgctttgctttgcccatagaggaggtgctaaggacatttttcaacagcatcccacagatcaaagcaacaagcaggtgcttcaggaaatccctaagatgtgttgctggaagtgacactaagctgtagtgtatcctaatgggggtaatttactgtgtgaaattagagtttcgaagaaaattatgataatgagttctgttgatttcctgggagagttaaggtgaaacatgttgttagtctgaaatttaccatctggtctggtttagaattagacctaattgtcagataacctggtgtctgggatgcctggatagtatcaggtctctggggtgcctctagcttgcagttgacctggtctacagactatgcttctgtctgaatttctccacccagcactcatgcccacactcccagttccctcttctggggcccaagtttttctccacaaccccacagggcacttgctctgatccttcagaaaccaggatgcaacatctgtgccttgagcctctgctgctagatagcaacctaatgttgtaggggtgtgatgccgtggaccccttcttgaacccccaagctcgtcttgcatttggggctctagcatgcagctgcctgattgcccttgcagagcccacctccctgtaagtaccctttccctcggaattccttttgaa

SEQ ID NO: 2107 - DNA, 2300 bp, Homo sapien
ctctcactcactttgagggtgccaaaacaccactaggggcaactaggaggaataggctgaggaatcagctatagagaatggaggggatagagctgcaaggggcgagggggcgacgatctctaaaactttcagcgccgtgctctactgatgctctaggcacttttttcattgctctggggagtctgggtgccccaattaatccgtcgctcctttgagcatttgttgtttagggggtcctgggggaccccatcgtattacagtattcagccacactccccgcaaagccgggaagccgccccgagagaagaccccaggacgccgggggctgcgtgagccccgcaaggctgcaggcgggggcgcgggatcccctttctggccgccgcccccctccgccggcccctcccccgcgccccgccctcggccacagaccccagccccggccgccggcgcgctcccacccgcgcgtctggggacttgcggaccgcagcgagaccggccggcgtgctgggcatgctcagtggcgggccgggcgctggagtcggaagcctgtgcgcggcagccgccgccgagccggccggggcgcacggagagcgcgcgggactcgctgcagcggcggccgggtcgcggcgcacccgggccgggaccggagccgagcctagcgcggcgcccgcgacccgtcagccgcggctcctgctccctcgatcccgcgcggggaaagggccggcggctgttggcgtcggcggggcgcggaggaaccgcggcggcggcggcggcggccgcatccttgccgcccgccccggcccagccgcgtcccggagccgtcgggcatggagccgtggaagcagtgcgcgcagtggctcatccattgcaaggtgctgcccaccaaccaccgggtgacctgggactcggctcaggtgttcgaccttgcgcagaccctccgcgatggagtcctgctctgccagctgcttaacaacctccgggcgcactccatcaacctgaaggagatcaacctgaggccgcagatgtcccaggtgaggaggccggcacgggcgccccgcctccagccggcagctcccattaatcatgcggctaatttctttgtgtaaatgcaaacgtctaggtgcgctgagcttgccctgcttcccagccttctgctttgggaccacttcggcaccactttggcgtttcctaccttggcttgaaatggtttagctcctcaagctgaatgcgaaagctttgcgtccggagatggtgtgaggatttcgtaaaggctttctgtgaggcgggaaagaaataagttgtcttagggtgcccttcacctactctgcgtgtgtgtggcgcgacaaagggaatttgatcaagctcttctataataacgaaggggagggacgaaacgaggtgatggggtaatttgcctttagtctcttcttttgctttgcgtcttgtactcatgttttcctaaaagaggaaccatgacatacatgaggactcgaggaagtgaagggcgtttggtcccgttatctgtccaggagtgacattggtcaaagggaagaacagggagcagaacccggaggccgcccccagggcccctgagctggtggccagccggcaagctcccgtttacagctcttcctaagccatgtgagaaggagcgagtccagcctctctcagcagcgacaggaaatgagaagtttcactagagattccgctttccttcctgcagtgccctgctcaggtgctgtggtgccggtcggctcctggggctggagctgcctctttgagggttaagccagacacctctggaaggttgggtgcaccctagagtcagctcaaaagtcacagttcagtggaagagtagtttatttgtcctgtcggaaaatttttgtacagaaggatgttaaactcggttcagagcctctttctctttcagaatgttaaaacaaaacaaaaaaccaaactgctttcaacttaaaagggagaggacagagccctctccctgacacatttcagcactaatcctctatgacgcagagcctcagctacttagcaaccagagcagcgccttttaagaaggaacggactttatatgatttaataagtatgtatttaaagttagagcacacacagtcatctgtgattcttggtgtcagtgtttcatcagggtcccctgcacttcagattctgcattccttgcctgtttgccttcaacctgctggtgggcagtccctaagaaagaacaggcatggaagtggggagagccatacgtatttaaaagtgaggtaaattattttataccccca

SEQ ID NO: 2108 - DNA, 2300 bp, Homo sapien
ttggaaatattctccaacatccaaaggtgatctgatgctacctgaaaaaaattcatagttttagtttaaattttgacccgtttaatgaaatttctttttaatttctctttatgaaagactgtgttaaatggtgattcaaatgtgttggattttgcttctaaaggtatgtagagattagtatgatttatttgccaaaattatggcctagaaaatgtcgtgctattgatggaatccgcattgaacacaagaggaaattgctagggaaggatgcgtgtgaggaaaggaaatcctcaggctgatttattgttcagcgctgagtgtaaacagtgtgctatccttgtcacagccaaacgaaaaaggacgcaatcactatcctgaacagatcattcttttaaaaataatattttggcctgcttataaagcatggttcgtaataaaaaatttgggctacagaaatataatacaattaaattatccaaactcccatctttttgtttgtttgtttgtttgttttttgagacagagtctggctctgtcgtccaggctggagtgcagtggctggatctcagctcaccgcaacctccgcctcatgggttcaagcgattctcctacctcagcctcccgagcagctgggactacaggtgcgtgccaccacgcccggccaattttttgtatttttagtagagacgggttttcaccgtgttagccaggatggtctcgatctcctgacctcgtgatccgcccgcctcggcctcccaaagtgctgggattacaggcgtgagccaccgcgcccggcctattttctaattttaagtgaatgcatctcaaaagggtgacgaaggaccacattcctatcgaacagcaataattcactgtggcaatatcttgccacaaataatttaaacattaattgtggttttgaggggcagtgtgcagtgggagtaaaaggggtagggtttagagtctccaaaagatttacttaagaaacacgaatgcactgcttgtgcactgcgcaaaagttctggggtcaagttccaactttcactaaggatcccagaacagcccggcaggagctgcccagggctaacgcgctttgctctcaaacccggccgccagtcgccgacgcatgcgcagtctagcaccgtggcacaggcctttctcaagcaggtttttgtggggtcagcaaaagggccagaacagcaacggcaaacagttccgagcctgacagtgcaggggcaaaccagctccaagtgaaaatcacctcgcgaggaaataggctcagggatcggggcggtttccgcaggcgtctccacacacgcactctcactcactttgagggtgccaaaacaccactaggggcaactaggaggaataggctgaggaatcagctatagagaatggaggggatagagctgcaaggggcgagggggcgacgatctctaaaactttcagcgccgtgctctactgatgctctaggcacttttttcattgctctggggagtctgggtgccccaattaatccgtcgctcctttgagcatttgttgtttagggggtcctgggggaccccatcgtattacagtattcagccacactccccgcaaagccgggaagccgccccgagagaagaccccaggacgccgggggctgcgtgagccccgcaaggctgcaggcgggggcgcgggatcccctttctggccgccgcccccctccgccggcccctcccccgcgccccgccctcggccacagaccccagccccggccgccggcgcgctcccacccgcgcgtctggggacttgcggaccgcagcgagaccggccggcgtgctgggcatgctcagtggcgggccgggcgctggagtcggaagcctgtgcgcggcagccgccgccgagccggccggggcgcacggagagcgcgcgggactcgctgcagcggcggccgggtcgcggcgcacccgggccgggaccggagccgagcctagcgcggcgcccgcgacccgtcagccgcggctcctgctccctcgatcccgcgcggggaaagggccggcggctgttggcgtcggcggggcgcggaggaaccgcggcggcggcggcggcggccgcatccttgccgcccgccccggcccagccgcgtcccggagccgtcgggcatggagccgtggaagcagtgcgcgcagtggctcatccattgcaaggtgctgcccaccaaccaccgggtgacctgggactcggctcaggtgttcgaccttgcgcagaccctccgcgatggagtcctgctctgccagctgcttaacaacctccgg

SEQ ID NO: 2109 - DNA, 2300 bp, Homo sapien
taagacctacccagtaacttagcataaatagtaaattcattcatttaatgttttcaaacagtgccagacattgtttaatgaactggggatatagtggtgaacaacactgacagcgttcttcattgtattctcaaaaccctccctatagtaagtaggtctgtgtgtgtgtgtaggtgcatggggaataaaaaataataagcaaataatgaacagggtaatttcaaaaagcagaaagagctattcaacaaaactacctgccttttattagatgaaactctcaactctatggtttgttctctcctgtcaattctgttaaatgctgtcagcctgttttccttatcaccctggccacgacttctgtcttttctgcttggtcctgtagactctaacccaaggctcattctctgcctggctatctgccttctgtggctctttgccactacctacattttctgtgttgcacagggaaggaccattccctgtggaccataaaattctctttttgaaagaattcattcttgattgggccacagcacatcttgtgaaacagcattagacatttgccactgctcagcagctctgggggaaaatgtttactgagaagcgtacagtagtttttttgactaaccatggtgcaacctcctcccagagggaaacctatgagtatttcaaggacatgtgatggtctgtttttgtccccagtatctgacatgatgggtagtgtagagcaagagcttacagataatggctaaattaaattttctttttgaattttaatattcaactttttagggtacccaatctccatatttaggaaaataaattacataaaaagtggagagtttttattgtgaaactgcacctccatattcccagtggtgcaggatgagggagcacaggtgttggtctggggaagccagggccctctgtggttctggagggtgaggattaagaggaagccttagatagtatttatgagtatctgctgacttctctctgggacccaagatcactgaacttttgcctattttgagatcatctttccaatccagccactaacagctgaaggataggcttgccctggagccattgtagtggttggatgaagataaaagataaaaaactgtgaggggaggtgtcacagaagaaagggcccatgtgggcagattttcattcaattcctagtctttattacagcaattctccagtgctgcaaccttagaaaaggattcctacaacacaatgtaggtacccatcagcagcagattggataaagaaaatgtggtacatacacaccatggaatactatgcagccataaaaaaggagcaaaatcatgtcctttgcagcaatatgaatgcagctggaagccaataacttaaacgaattattgtagaaacagaaaaacaaatactgtgttctcatttacagggggagctaaaccttgggtaaatggggcataaagatgggaacaatagacactagggactccaaaaggggggagggagggaggagggcaagggctggaaagcttcctactgggtactttgttcacaacctgggtgatggcacgattaggagctcaaaccccagtatcacacagtatacccttgtaacaagctgatggtgtaacccctgaatctacaataaaattattttattttaaaaaatcattataaggatttttaaaaagaaggattcctagacaggtgcagccaaacaattttttttaaatgttggcaggccgccaccgccagtcacttatgctgcaatagcccatgtcccaacattcccaacctacttctctccaaaagagaagctatactttcagatggccctgtgctgggttctccctggaagtttctggggaaaggggcttgagttgccccgactggactcttcctggagtgggagccggggcttctgatcagacgtgagtgaggcaggaactccgcggtctcccagcgcagcccagagtgcggtcccacgcaggtcccgggtcctgcgcgctcgcgcctttgcgctgaagccgttaggatgagccctctccttccagagctttaaccgatgaaggtgcattgtgtttggcgcccctgaggaggatgctgtcttaggcctcttcccactggacgtgtgtggtgggcagagatcccgttcgtcggtcgcacttccaccccgctggggctcactcaggccgcggagctgcgagggagacatcctcgatggactccctctacggagatctcttttggtacctggactataacaaggatgggaccttggacatttttgagcttcagga

SEQ ID NO: 2110 - DNA, 2300 bp, Homo sapien
ttgaagtctgatccctgatgtggccgtgttgggaggagggacctagcaggaggtgtcagggttacggaggcagatccctcatgaatggcttggtgtcattcttgcagtagtgagtgagttctctctctcatgagactgaattagttccctcagtaatggatcagttccctcgaggctgggttgctataaagccaggacacccctcggattttgcttcttcacacatgtccacttccactttgactttccaccatgttgtgacacagcaggaaagccctccccaggagtccagcagatgccagcaccacgcttcttaaacttcccagcctgcggaactgtgagctaaataaatgtcttttctttataaattaccctgtctcagatattccactatagcaacactaaatggactaagacaggaaatgaaaaggaatttcacctgcagaataggagactttacaaagactgataccctgaatgagcgaggatgtggagaagcaagcactgtcagtcaaaagagtgaaaatgggtctaaggtttccgaaaggcaatacgtatcccagtttaaaatgtgtgttaccttcagactcagcaatgtccactcctcaaaatttatcttacgaaagtaactggaccagaatgagaaaatgaatacaaaggacatccattgcaatttcacttacaatcgtttttaaactatcaataaagtaaaaggtgatttaaaaagaattggtaacatatactatgacacaaacatataacagaatatgatgcagttacgtaaaaatggtgatacagcagcaattctcaagctttttgatctcaggatccctttacaatcttaaaaatcattgagcactccaaagagcttttgtatattgtagggaccatggagttgtaccactgagatctcccttcaaaggcacctactgtgaggaacacagttgacttccactctctagcctctaaccctggcatctgctgatgcactgcagcaaggtcgtccctttcctgggctgcttccagccaatgattggacatggtggggaactccaactgggccatttctgggacaatcagcacaaagtaccaaaagttggttccttcaaagtatgaataaaatacacaaaactttggcaagattgaaggggagaaaaggatagatatgaggaatgaaatagagaacctacctacagattcagtcagaagtgttataaaatcatcggtgagtattatgaaccttggacagaacaggcagtttcaaaaaaaattgtaacttactaaatctgactctagaagaaacagtaaactgaagaggcctataactaccaaagacattaaaagagaagtgaaatataactatataacagttgttggccctcatagtaacctaatcactttccctctttggataagagaatgccagtgtcagggaacgcttcaacagggttggagaagttccacatatctccaccctactaaaggggcagaagttcaggggcacagttaagatgactcagagaaaatgaaattgctcagtcgcaggtcaagtcaacccttcagatcaatttatgtacctagggcattaacctaggaatgtcttaaacaatggaatgccgccattccttctcaacaggaagtgggggaaacacgcgattggttttcaaacagttttcaaacagtagacaatacacatagctgctgtaacaaagcagcttcgaaagagatcgaatgtgtgcgcctttatacaaaacttgggacccactgaagtctgacagctaaaacggattacatgtctgcaaggtattaaaacagaaaacaaagaacctgggatggattcaggacaaaagtgtcttaaaaatttaacagtgcccgtgggccagagtgtccacaacactcattttatctggacaaataccagtagactttcgtattatgacccacttctgttaccggggtcgccggtcgcggccccacgcccgagtttctgaagccaccggagcgctgggcgccacagttcctccttcctctcctggcaacgcctcaagccgccgccctcctcggtcctcgcagtgtccccagcgcccgcagccctccctacgctcaggcggcgccccggcggcgacccacctcctcggcgtcctggcccagagggatgcccaggttcctgagcccctcctgcagctcgccgatgtccaccactccgtccccattgcggtccagtgcctggaagagggtctcgtagcgcgtcggctgctccgcgtcctggcaggccgcggtgggcagcacgaagtcccgca

SEQ ID NO: 2111 - DNA, 2300 bp, Homo sapien
tattcataaactgttttgatgttcacactgatcttttgagaatttttattccattttactcatgcttaagtcagatttattgatatcccagagtaaattaacccatgttagtgtgcagttctgctggcacacacatgcagttgtgtaaccactaccaccaaaagcaagatgtaaaatagctccatcacccccacaagccttctgatgctcttttgtcatcaattcccttcccgctagtcacaactggtaactactgatttgttttctgtccctatagttttgccttttccagaatgtcattgttgacaggtatcagtaattcattcctttttattgctaattactatctcactgtatgaatgcaacacaggttgtttaccagttcacccgttaaagaacattttgtttctgcgcttgacagttatgaatagaactgctataaaccctcaagtaaaagttttggtgtgaagataattttctcagcaaaaacgctgacaggtaatttttctaagtattacttttttaaaaaagtaaaatagcctgtagccccagctactcaggaggctgaggcaggagaatagcttgaacccaggaggcggaggttgcagtgagttgagattgtgccactgcattccagcctgggcgacagagctagactgtctcaaagaaaaaaaaaaaaaaaaaagaaataaataaaaagtaaaatgaaagcatgtaagtgtaagatgactagttcaagcaacctctcttcaagtacagagtattcagagtagagattaaaagaggttttcaaggacagagaaaatttgaagtttgaaggcagttccaaaggaaggcaatgattcttaataagactggaagttggaagtaatataaaaagataaatcagtttcaagatgattttactaagcaggcagcccttaatttacaaattctagattcatacatatcttaaacatacaaaatgatatgaggagaggtaagttcagggtctgagttcctggctgttgttggaactgatttctgtgtagtgattcagaagatgtgagacaccctaatttacaagtacagaggtatcttcttttctgcaaacagcagtacaacaatagttcctcttacgcagctgtgaatgaacaggattattacaattaatgatatctcatttgattggcgccttagagaattaagacctttcacacctaatatacaactttgttgtgaaggcagatatttatattctcattttactgatgagagactacccggagacgctatgtcacacctgaaggattaggtactttctctgttaagtccaatgttccttccgttattccatgctaggcagtaataagttctgtcttgcctgagtaataagctccaaacctcggaactgcacccatcttgagaaggaggagggcgctgtggttttttctgataagtgcagctggcagacactctatacgcttaatcacgggcaaatcctagctaagctgcctaccaaactagtccttcttttccccgttgcccacgcagatggctgttgatcttttctgcaacaaatccaggagtttctcctttttgttttataattgctccaatagatgctttaggatttaactctctgctttttaaagcagaatcgccatcccaggtgtgcaaccacgaaaaaattagacatccgtgagagacaatgccctccatggcccagtttccaggcagagagaagcagctctgggctgaccgccaaggctccggcccgagagggtctttaagtggagtaaccagtcttcaagaccccgctcccaagccaccgacgcgctgacgctgcagccctggacctgctgggggcctcttcctcggacccgcatgctgacagcgggactggcaactgggcagaggtcgaccccgggtccgcacagcacctcccgagacccagctcccagctccctcacttccggctctctggaggcgggcccggccagtgccgccgaggccagcgcggcgagctcctccccagcagcggcgggacggccacaccctgcgctccgcgcgggctcgggtggggtctccgctcctgcgccctgcgccctgcgcgccgcagccgcaaccccgacggcgccccaaacgctgttgcgccgcgcgccccgcccagcccggcctcgcgctggtcccggtctcgccccgcagccctcgatctcccgtgacttcctcggccaggccgcctgcgcctctgggaccatgttgcgctggctgcgggacttcgtgctgcccaccgcggcctgccaggacgcggagcagcc

SEQ ID NO: 2112 - DNA, 2300 bp, Homo sapien
taggaaccactggtctttgggaattgccagtagaattaagcaggggtgccttctttcgtccagatgtgtaaatgtccatgtaaaggtttcttctcttatgcaggaagttgctagtgttaattacaccttttatcttcatggtgttatctcgattccttgcagacatagtgtcgtaaaatacagtaaaaatgcaatactagaaaattgaaattaaaaagacaagctctgagttttattattagatataacaaaattactttatcaaattgctataaagtttctaaatccttcctctcaatgtctgactcattgcagacaggtaacaggttgcacttcgagtggtttgcttcatactagctgtgcttttcaaactttatgaaatgctcatccagggttcttgtataagtgcaattcttacttagtgggcttgggcaggcctgagattatttctgacaagctcccaagtgacactgatgctgctggtctgtggcccacacttcataaacgctttgattttcacagtaacactgatgtgacaccaatgctgctggtgtgtggcccatacttcataactattcataaactgttttgatgttcacactgatcttttgagaatttttattccattttactcatgcttaagtcagatttattgatatcccagagtaaattaacccatgttagtgtgcagttctgctggcacacacatgcagttgtgtaaccactaccaccaaaagcaagatgtaaaatagctccatcacccccacaagccttctgatgctcttttgtcatcaattcccttcccgctagtcacaactggtaactactgatttgttttctgtccctatagttttgccttttccagaatgtcattgttgacaggtatcagtaattcattcctttttattgctaattactatctcactgtatgaatgcaacacaggttgtttaccagttcacccgttaaagaacattttgtttctgcgcttgacagttatgaatagaactgctataaaccctcaagtaaaagttttggtgtgaagataattttctcagcaaaaacgctgacaggtaatttttctaagtattacttttttaaaaaagtaaaatagcctgtagccccagctactcaggaggctgaggcaggagaatagcttgaacccaggaggcggaggttgcagtgagttgagattgtgccactgcattccagcctgggcgacagagctagactgtctcaaagaaaaaaaaaaaaaaaaaagaaataaataaaaagtaaaatgaaagcatgtaagtgtaagatgactagttcaagcaacctctcttcaagtacagagtattcagagtagagattaaaagaggttttcaaggacagagaaaatttgaagtttgaaggcagttccaaaggaaggcaatgattcttaataagactggaagttggaagtaatataaaaagataaatcagtttcaagatgattttactaagcaggcagcccttaatttacaaattctagattcatacatatcttaaacatacaaaatgatatgaggagaggtaagttcagggtctgagttcctggctgttgttggaactgatttctgtgtagtgattcagaagatgtgagacaccctaatttacaagtacagaggtatcttcttttctgcaaacagcagtacaacaatagttcctcttacgcagctgtgaatgaacaggattattacaattaatgatatctcatttgattggcgccttagagaattaagacctttcacacctaatatacaactttgttgtgaaggcagatatttatattctcattttactgatgagagactacccggagacgctatgtcacacctgaaggattaggtactttctctgttaagtccaatgttccttccgttattccatgctaggcagtaataagttctgtcttgcctgagtaataagctccaaacctcggaactgcacccatcttgagaaggaggagggcgctgtggttttttctgataagtgcagctggcagacactctatacgcttaatcacgggcaaatcctagctaagctgcctaccaaactagtccttcttttccccgttgcccacgcagatggctgttgatcttttctgcaacaaatccaggagtttctcctttttgttttataattgctccaatagatgctttaggatttaactctctgctttttaaagcagaatcgccatcccaggtgtgcaaccacgaaaaaattagacatccgtgagagacaatgccctccatggcccagtttccaggcagagagaagc

SEQ ID NO: 2113 - DNA, 2300 bp, Homo sapien
tttgagatgtagcaaaggctgtaaatttatctattctctggtgtctcagagacctgacattctgtgtcagaaagaaaagttataaaaaggcaaaagtcttaatgagaatcattggtactcaatagaatagtgaattaaatacagccaggggaagacccaagtctcatatttctctgtatattccaaagttccagtgaaattccaggtaatagaggttatttcccacactgttaaagcaaggttgcagacacttctgaatttcggtcccaatgctgaaggagggcacacctctgtcctggaaaatgacacaggaatgaatgctattcccatgactcattctggtcattcttccagcatcacagaaaccaaaaaatagaaatatagccaaatacatgatttgctatccctcttcttcaggtttcttacctgtttcttatggataataacattgccttaaggattatgatgaaaatatgatatccaagtatgtgtacagttttgaacaaaatgcctagtatgaattggtcaataaataattatttttatttattgaattacatggattctataaataattactgaataattattgtgattccttttattggcagtgctcaaaatgcatccctgtgtgacctcaagtaaaccagtaactttgtgaacctgcagttttatcatttttaaagtgaagaaactagacagattttcattctgacacagaatgtcaggtctttgagacaccagagaatagataaatttatagcctttgctacatctcaaagcactgtcactacacagtgtaggtggaggatggtgcgggctgctgagaggtgcgctttccactgggattgatccagtcctcctccttcacttccacatgaatgctgcgtagcccgtggtcacactcatcacaccctcaactcaggcaagtccagcagccacacttaggagacctgggctacaggacaatctcccaagtcctagcctcacaagacctagttgaagatggaagctgagaaagtgaggaggtggtttgggggagcacactcccctactcatccctctcatctcaaactcaccttctactgcacaggaacactgaggatcaccaaccacccgtgaccatgagcttgatcttgccaggttcggttagtggaatgcaaccacacatcaacagtgttagagcaactctatatgtgtgtgtatatatatatatatatatatatatatatatatatatatatatatatctccaacaatattccctgagaagcgttcaatgccctgttcttttcaatatatgggaaaactaaaaacaacaaaataccatcaggtttacaagacttcccaagatagatggtcacacatgttttcaggggatatatacaaatgattttgatcacttgataccttgaaaagagctattttgggacgagaatgatattcgtaagtgacaagtatgaaacgagtgttcagtgacattaaaaaagcaaaccgacccacacatagaggaagagctttggacgtagggatgtgaaactggtcttaagtgtaatgaaaagccaagatgctgccccagtaagagaaaagaaatcaacataacaatgggatgcagcaagaatactgagacagggtagaaaatcttttttaaaagtgaattattccttcattttcagtcgatacagaaaaaactgcagaagacccagagggatatcatagcagactaaaagtttgctatctttcacttgtggaaaagcattaagatcattttaccttaaaaagaaggtgaggtgacttgatgactaccactaagaaaatataaccttctggaaaactatccctaccttgatgattttatacacacaagagatgaacaatgaggaatatgcttatatgtattgagaaagaggtgggcctgtagcattgtcacaagggtgcacaaatactgagagtgactgctgaagaaatggtccccatcagtgaccctcaggtgagaccagggggcctagtgtttcagcacagcctgggcaattggaatgcagggtttctaagattccatgacacccccaccttctaattctgttattgcaactgcagaccgttacctggtacgctggctgctacctccctcactcttgtcagagtcggagctacaggcagtgccttcagctctgagctcaggcatcccggtccctgtttttgcggttaaggactctaaagtgttgtgtcgtgttcatcaactttttctcaactgtaagttaacaattccagtaattgtcatctctcagtcctgattaaac

SEQ ID NO: 2114 - DNA, 2300 bp, Homo sapien
tacaagaaaactatcctcaatatgataaaaatcgtatgtgaaaaacctacaatgaacatcatacacaatagtgaaagactaagagcttttttctctaagattagaaataggcaagtatgcccactttcatcacttcattcaacgtagtactggaagttctaatcagagcaattaggttagaaaaagaaataaaagccatccaatttggaaagcaagaagtaaaattatccctttttcagatgatatgactttatatttagaaaatcctaaagacccaccccccacacacacacacaaaatgttagaataaacaaattcagcaaagtggcaagatgcaaagtcaacacaaaaaaatcagttgcatttctatacctatatgctaacaataattaatccgaaaaggaaattaaggaaacaatgccattaaagcatcaaaagaataaagcacttaggaattaacctaaccaagaaggtaaaagacttatgcaatgaaaactataacacatttctgaaacaaattaaagaaaacataaataaatggaaagatgtcccacgttcatgggctggaagacttaatattgttaagatgtctatactacccaaaacaatttacagattcagtgcaatccctaccaaaatcccaatgatgaatttgcagaagtagaaaaacccatactaaaattcacatggaatctcaagggaccccaaatagccaaaacaattctgaaaaagaagaacaaagcaggaggactcacttcttgatttcaaaacttactgcaaaacaagagtgattaaaacagtgtgctactaacataaagacagaaatatacaccagtggaatagaatagagagccaagaaataaacacttaggcatatgtgctcaaataatttttgacaacagtgcaaagaccattcaatagggaaaagacagttttttcaacaaatgaagctgggaaaactgaatatctgcatgcaaaagaatgacattggacccttaattaacaccctattaaaaattaattcaaaaaggatctatgacctacatgtaactcttaaaattatgaaactttagagaagacgacacagggcaaaatcttctcgacaatggatttggcattgatttcttagacatgacatcaaaggtacaggcaaccaaaacacgacaaattggacttcatgaaaatttaaaactttgtgcatcaaaagtaaaaaggagactcataaaaccgaagtaaacatttgcaaatcatatatataataaggggttcatatacaaactatacagaaaactcctaaaaatcaacaacaaaaaaaaacctaatttgaaaatgaacaaagaacttggacatttctccaaagaagttatacaaatggctactaagcacatgtaaagatgcccagcatcactaaagaggagtccagatggtttggacttctagcaacaaccaaaaaaaaaaaaatctcaccaataaagagctttacagtcttcagacctaactcctaaaattcaataggagttatatctgaagactgctaagcattgacagaaaataaataaaataatttttttctcttgatattctgaaacttccatctaaatagtttaaaaataatcaagtcaagactggcctagagaaggaaggtattcctaatttagatgaggttctaaaacaatcagctgaagtgtacacccatggatcaaagtctgacttcccctagaccttggtgtggatgtcagaaagagaatagctctggggctcttatctgtgcctgtcgtttggagacgaccctgaagcacactgccctgggcagagaaacccctaagaaaagagatgttcctttacttctgcacaaaggctaacatggcgcctgacgttgtgtgctggttccataaattttgaacgagtcaccagaaacagcatctccccaaaagccccctgaaggtctttgtcactacggaaagtggctttttttttttttttttttttttttgagatggaatctcgctctgtcgcctgggctggagcgcaatggtgctatctcggctcactgcaacttccgccttccgggttcaagcgattttcctgcctcagcctccggagtagctgggattacaggcgcgcgccaccacgctcggctaatttttgtatttgtttagtagagacgggggtttcaccatgttggccaggctggtctcgaatgcctgacctcaggcgatccacccgcctgggcctcccaaagtgctgagattacaggcgtgagacaccgcgcccggccggaaagtggctattttaagaag

SEQ ID NO: 2115 - DNA, 2300 bp, Homo sapien
aagttataaaaaggcaaaagtcttaatgagaatcattggtactcaatagaatagtgcattaaatacagccaagggaagacccaagtctcatatttctcttgtatattccaaagttccagtgaaattccaggtaatagaggttatttcccacactgttaaagcaagattgcaggcacttctgaatttcggtcccaatgctgaaggagggcacacctctgtcctggaaaatgacacaggaatgaatgctcttcccatgactcattctggtcattcttccagcatcacagaaaccaaaaaatagaaatatagccaaatacatgatttgctatccctcttcttcaggtttcttacctgtttcttatggataataacattgccttaaggattatgatgaaaatatgatatccaagtatgtgtacagttttgaacaaaatgcctagtatgaattggtcaataaataattatgtttatttattgaattacatggattctataaataattactgaataattattgtgattccttttattggcagtgctcaaaatgcatccctgtgtgacctcaagtaaaccagtaactttgtgaacctgcagttttatcatttttaaagtgaagaaactagacagattttcattctgacacagaatgtcaggtctttgagacaccagagaatagataaatttatagcctttgctacatctcaaagcactgtcactacacagtgtaggtggaggatggtgcgggctgctgagaggtgcgctttccactgggattgatccagtcctcctccttcacttccacatgaatgctgcgtagcccgtggtcacactcatcacaccctcaactcaggcaagtccagcagccacacttaggagacctgggctacaggacaatctcccaagtcctagcctcacaagacctagttgaagatggaagctgagaaagtgaggaggcggtttgggggagcacactcccctactcatccctctcatctcaaactcaccttctactgcacaggaacactgaggatcaccaaccacccgtgaccatgagcttgatcttgccaggttcggttagtggaatgcaaccacacatcaacagtgttagagcaactatatatatatatatatatatatatatatatgtatatatatatatatatatgtatatatatatatgtatatatatatatatatacacatatgtatatatatatatatatatatatgtatatatatatctccaacaatattccctgagaagcgttcaatgccctgttcttttcaatatatgggaaaactaaaaacaacaaaataccatcaggtttacaagacttcccaagatagatggtcacacatgttttcaggggatatatacaaatgattttgatcacttgataccttgaaaagagctattttgggacgagaatgatattcgtaagtgacaagtatgaaacgagtgttcagtgacattaaaaaagcaaaccgacccacacatagaggaagagctttggacgtagggatgtgaaactggtcttaagtgtaatgaaaagccaagatgctgccccagtaagagaaaagaaatcaacataacaatgggatgcagcaagaatactgagacagggtagaaaatcttttttaaaagtgaattattccttcattttcagtcgatacagaaaaaactgcagaagacccagagggatatcatagcagactaaaagtttgctatctttcacttgtggaaaagcattaagatcattttaccttaaaaagaaggtgaggtgacttgatgactaccactaagaaaatataaccttctggaaaactatccctaccttgatgattttatacacacaagagatgaacaatgaggaatatgcttatatgtattgagaaagaggtgggcctgtagcattgtcacaagggtgcacaaatactgagagtgactgctgaagaaatggtccccatcagtgaccctcaggtgagaccagggggcctagtgtttcagcacagcctgggcaattggaatgcagggtttctaagattccatgacacccccaccttctaattctgttattgcaactgcagaccgttacctggtacgctggctgctacctccctcactcttgtcagagtcggagctacaggcagtgccttcagctctgagctcaggcatcccggtccctgtttttgcggttaaggactctaaagtgttgtgtcgtgttcatcaactttttctcaaccgtaagttaacaattccagtaattgtcatctctcagtcctgattaaacctaattgat

SEQ ID NO: 2116 - DNA, 2300 bp, Homo sapien
aatacaagaaaactatcctcaatatgataaaaatcgtatgtgaaaaacctacaatgaacatcatacacaatagtgaaagactaaaagcttttttctctaagattagaaataggcaagtatgcccactttcatcacttcattcaacgtagtactggaagttctaatcagagcaattaggttagaaaaagaaataaaagccatccaatttggaaagcaagaagtaaaattatccctttttcagatgatatgactttatatttagaaaatcctaaagacccaccccccccacacacacacaaaatgttagaataaacaaattcagcaaagtggcaagatgcaaagtcaacacaaaaaaatcagttgcatttctatacctatatgctaacaataattaatccgaaaaggaaattaaggaaacaatgccattaaagcatcaaaagaataaagcacttaggaattaacctaaccaagaaggtaaaagacttatgcaatgaaaactataacacatttctgaaacaaattaaagaaaacataaataaatggaaagatgtcccacgttcatgggctggaagacttaatattgttaagatgtctatactacccaaaacaatttacagattcagtgcaatccctaccaaaatcccaatgatgaatttgcagaagtagaaaaacccatactaaaattcacatggaatctcaagggaccccaaatagccaaaacaattctgaaaaagaagaacaaagcaggaggactcacttcttgatttcaaaacttactgcaaaacaagagtgattaaaacagtgtgctactaacataaagacagaaatatacaccagtggaatagaatagagagccaagaaataaacacttaggcatatgtgctcaaataatttttgacaacagtgcaaagaccattcaatagggaaaagacagttttttcaacaaatgaagctgggaaaactgaatatctgcatgcaaaagaatgacattggacccttaattaacaccctattaaaaattaattcaaaaaggatctatgacctacatgtaactcttaaaattatgaaactttagagaagacgacacagggcaaaatcttctcgacaatggatttggcattgatttcttagacatgacatcaaaggtacaggcaaccaaaacacgacaaattggacttcatgaaaatttaaaactttgtgcatcaaaagtaaaaaggagactcataaaacggaagtaaacatttgcaaatcatatatataataaggggttcatatacaaactatacagaaaactcctaaaaatcaacaacaaaaaaaaacctaatttgaaaatgaacaaagaacttggacatttctccaaagaagttatacaaatggctactaagcacatgtaaagatgcccagcatcactaaagaggagtccagatggtttggacttctagcaacaaccaaaaaaaaaaaaatctcaccaataaagagctttacagtcttcagacctaactcctaaaattcaataggagttatatctgaagactgctaagcattgacagaaaataaataaaataatttttttctcttgatattctgaaacttccatctaaatagtttaaaaataatcaagtcaagactggcctagagaaggaaggtattcctaatttagatgaggttctaaaacaatcagctgaagtgtacacccatggatcaaagtctgacttcccctagaccttggtgtggatgtcagaaagagaatagctctggggctcttatctgtgcctgtcgtttggagacgaccctgaagcacactgccctgggcagagaaacccctaagaaaagagatgttcctttacttctgcacaaaggctaacatggcgcctgacgttgtgtgctggttccataaattttgaacgagtcaccagaaacagcatctccccaaaagccccctgaaggtctttgtcactacggaaagtggctttttttttttttttttttttttgagatggaatctcgctctgtcgcctgggctggagcgcaatggtgctatctcggctcactgcaacttccgccttccgggttcaagcgattttcctgcctcagcctccggagtagctgggattacaggcgcgcgccaccacgctcggctaatttttgtatttgtttagtagagacgggggtttcaccatgttggccaggctggtctcgaatgcctgacctcaggcgatccacccgcctgggcctcccaaagtgctgagattacaggcgtgagacaccgcgcccggccggaaagtggctattttaagaag

SEQ ID NO: 2117 - DNA, 2300 bp, Homo sapien
gtcactatcttttatgatgacttctcttgccaagattaccaatgacctcctagaccttcaattcagtagcttcttttcagtccaaatcctctgggactgctctgcagcactctcttgaaatggtcctctgtcctacatggatcacagattgctctctctctttctttctctctctcttctctctctcacacacacatactcacataccacacacacacactttagttgatctgtttgcatatctctgtttttctccattcctttataagcccctatgtcttattcatttgcatctctagtacccagcatagtgcctggcacacaatagaactttgtaactacgaatgttacatgattaaaaccgtctgggcttccaggccatctctttcttcatctcctttttctcttgactgcttgttcttaggcaccttcacgatctcctctttgcctaccctttaaatattcttcagagtaactcatccttatccaccttttgggcttcagccatcagcgattacctcaattcccaaatgtatattttcaattgccaatgcatttttatgagctaaggctgcctctctctccctagatgtactgcaagcagatcccataaagactcattatctcttccattcccaacctgccctcctcttgctttcaatgttcagtcaatgaaattaacattcatccagtgctctaaatgacaaatctcaaagtccccaaatgcatctcactgtctttgccccctgtcctgcagggtaagaagctttatccattaccaaatccccacccccgaacctgcctctgaatctttttttttttttaatttatttctcctagaacaacttaccccactttgtcccaaatcattttcatcctttgaaattcagaaaactgattaacttcaattaattgcttctctgagttctacatagcttggtgctaggttgtgtttttttaatgacctgtctaaacatgtcttcctcactagattgtaaaattcttgagggcagttattggcttttggttatggggtctagccgatgattgacattttaagcaatttttttatatgaatgaatgagtaaacgagtaaactgagaaagaaaatattttcaattaaaccctttcagaattactgtggcagaatctgagtgaaaatgacaataactcagtttaaaaacatgaacatcacgtaaccaactttgtaacattcattgtaacaatacatgcatgattacagaaggcaggtaattgttattcccctagggagatttttttttaagcctgctctgaagattttgttttgtttttaagacaggggcttgttctgttgcccaggctagagtgcagtggcgcgatctccgatcattgcaagctccgcttccccggctcaggctaacctccctcctcagcctcccgagtagctgggattacagcgtagccatgccagactgcctgcagaatttgattttaagcatttcagttctcagtatagacagacaaatttttaaagggagggtattattttaactgcttctttgctcttttatcttttgtcctgggtgacaggaactagataagctataccccagagaaagcgcctgcagcagtacggtgcctgggcccttgatagtccctcagcacatcattttcctttttcctaccttatcttccttttatatttgaaggctcgtgaatttagagtacctaacggaaattttagttttaggatttcaatttgaccaaaacaacgctgagattttaattgcctctattaacccatggctctcaaacccaaaggaaagaaaccactggagggggtgggggagaaaggaggcggtgcaaaaactgaaaagaaaggcggagaggaagcggtagaaggaagctttctctgtcgggtttgtctttttttaaccccagaaaggcgtgacgtgctaactgccgtcgcgggttagagtccgcggccaagcccgcgcccgcccacaaagtccccgccctccctccggcttccgccccgccgtgcgctgcaggccgcggccgctgggggcgcccccgacccccgaggcgctgaggcggcggttcctcgagcctcgcctctcccgactcccagacgggcggcagcggcggcggaggcggcggcggcggcggcggcgagctgagcaccaaaagggcgctcacctccccgggcgagctgcagcacgaccgctccccgcgggcggtcggggtccgcgccgcagctgccgccgcgttccggcccaggctgccgcgagaggcggcggcagcggccccggccgcgg

SEQ ID NO: 2118 - DNA, 2300 bp, Homo sapien
aggggaggcaaaaaccctagatccaggaatgctgtatagatgatagcttttatgttttccttaaaatttttgaaactgtggtaaatatacataaaaccactttaacaatttttaagttcagtggcattcagtgcaaccatcctatctacaaaacttttccatcacccattaaacaactctcaattccctcctcctctcagcccgtagcaaccaccattctactttgtctctatgaatttggctactctaggtacctgatataaattgaatcatgcagtatttgtccttccgtgactgattatatatcactcagcatatcatcatcaagattcatccatgtggcagcaaatgtcagaatttcactccttttaaaggttgattttcctgaaactctgattggaaaaataaaggctgaatattccattgtatgtatatcacattttgtttattcatcctttaatggacatttgggttgtttccacattttggctactgtgaataatgctgttacgaactttggtgtacaaatacctgtttgaattcctgctttgagtatatacccagaagtgaatttattatttaaacattctattttaaattacatcctgtagtaaggtgtacactcctttaatgaagtctgctaaaactagtttccccaagtcaacaggaacctctcaaactgtaatgtgaaattatcactgagtgttttttctttttagacatggtctggttctgtcgcccagactggagtgcagtggtgcaatcatagctcactgcaggctcagattcctggggtcaagtgatcctccggcctcagcctcccaaacagttgggaccacaggcaggcaccaccatgcccagctaatttctttttttttttggtagagacggggtctcacactccggggctcaagtgatcccccaaagtgctgggattacaggcggaagccacggtgccgggccttatgattgaatttttgaagcttattgttagttatgtacttctttacctatgacactagactccccaaaatgccaaaaacaagattggtgtaatttatcattgtggtacccttaagctgtcagcatagtgctttgcatacagcaggcgttaaatgtttgaaaatacagttccaatatatcatttgtggcatattaataggctattaattcagtagcaaaaacaccagcttttgcatctttcaaaatataagtcaatcttttttccctaaagaaggcagcttcgtccctcccctcacccccctaatactcttccatcatatacaggaaagaaagtacttatatatattaagtggagtctccagagggaaggatggcaggatacaataacttttccaagagatcaacagttctatccacaacactcggggaaaactatttcgggggtcgggtggcggtggagagggggcgttgggagcggaaagaacgtttttctgaacgcaggtgtcactgggccaacttcacccagcctacattcctttaaggcccccgtggactgctctgggatgaaagcggaggctgactgggactccagccgccggccgcctcgcgtggagccttgctgctcctcttgccgccttccgctggccaggaccgtttttaggcctttgccacgcctcgggagcgccacgaactcaacagccgcccaagccgccttccggctcgcggtctgcggacgcgctcggagttgggggccttcgccaacagctgccgtaccgtgccgcgtcgcagccgcacgctagcggggtcaacggcgcggcaggcgcaggggtcctcgccaaggttcggaagaggaccttgaaaatggcttctgggcatgcgccacagcggccgttacgagacgcaaaaccgacgccttggaactgagagcctagagggacggagctcggcgcaccatgaggctcccggggcccaaggccgaccgtgagagcgcacgaggttggcgagccccgcggggaggccgaggcgcgggtgcgggcgccggcgtagccgcggcggtagcgtcacgcagcgaggccgtgcgtgcgcgggcgtcagggcggcgctgagttgaggacgctggcggctccgcgacgagctttgttttttcggttgggcatgctgcttaccgcaggatgatggaagcgacggcccgtacaaagacagaagcgttggtttcagtgagcagggtttctttttctttttctttttttttttttgagacggagtctcgctctgtcgcccaggctggagtgcagtggcgggatctcggctcactgcaagctccgcctcccgggttc

SEQ ID NO: 2119 - DNA, 2300 bp, Homo sapien
aattcaaacaagtacttgatccataataaatactctatacacatttaccaaataagtaatcatttctcattttttaacttaaaaaaaccccctaacactcagagaggatgcaacttccaaaggttatgcagtaatagtaaaatctggatttaaggcctatttgacttaaaatccactctaaaagacgttacatggtctataactcagtaggacttaccttgtgtacgaaggaaagatgagttataatgacaaaatgagatgacaaggctaagctattagctgtgggaaggaacagatggtagatgacagcttgaagaagtcaaaatttggtgattgtccaagtgtgggaaggacaaaaatggacagagccaaggatgatttttcagactctaataagagtaggaggccaggagaatgatgaaataggcaaatttggagagggaatggacatgaggagctcaagttcataaatgggctaaccagcaggggaggcaaaaaccctagatccaggaatgctgtatagatgatagcttttatgttttccttaaaatttttgaaactgtggtaaatatacataaaaccactttaacaatttttaagttcagtggcattcagtgcaaccatcctatctacaaaacttttccatcacccattaaacaactctcaattccctcctcctctcagcccgtagcaaccaccattctactttgtctctatgaatttggctactctaggtacctgatataaattgaatcatgcagtatttgtccttccgtgactgattatatatcactcagcatatcatcatcaagattcatccatgtggcagcaaatgtcagaatttcactccttttaaaggttgattttcctgaaactctgattggaaaaataaaggctgaatattccattgtatgtatatcacattttgtttattcatcctttaatggacatttgggttgtttccacattttggctactgtgaataatgctgttacgaactttggtgtacaaatacctgtttgaattcctgctttgagtatatacccagaagtgaatttattatttaaacattctattttaaattacatcctgtagtaaggtgtacactcctttaatgaagtctgctaaaactagtttccccaagtcaacaggaacctctcaaactgtaatgtgaaattatcactgagtgttttttctttttagacatggtctggttctgtcgcccagactggagtgcagtggtgcaatcatagctcactgcaggctcagattcctggggtcaagtgatcctccggcctcagcctcccaaacagttgggaccacaggcaggcaccaccatgcccagctaatttctttttttttttggtagagacggggtctcacactccggggctcaagtgatcccccaaagtgctgggattacaggcggaagccacggtgccgggccttatgattgaatttttgaagcttattgttagttatgtacttctttacctatgacactagactccccaaaatgccaaaaacaagattggtgtaatttatcattgtggtacccttaagctgtcagcatagtgctttgcatacagcaggcgttaaatgtttgaaaatacagttccaatatatcatttgtggcatattaataggctattaattcagtagcaaaaacaccagcttttgcatctttcaaaatataagtcaatcttttttccctaaagaaggcagcttcgtccctcccctcacccccctaatactcttccatcatatacaggaaagaaagtacttatatatattaagtggagtctccagagggaaggatggcaggatacaataacttttccaagagatcaacagttctatccacaacactcggggaaaactatttcgggggtcgggtggcggtggagagggggcgttgggagcggaaagaacgtttttctgaacgcaggtgtcactgggccaacttcacccagcctacattcctttaaggcccccgtggactgctctgggatgaaagcggaggctgactgggactccagccgccggccgcctcgcgtggagccttgctgctcctcttgccgccttccgctggccaggaccgtttttaggcctttgccacgcctcgggagcgccacgaactcaacagccgcccaagccgccttccggctcgcggtctgcggacgcgctcggagttgggggccttcgccaacagctgccgtaccgtgccgcgtcgcagccgcacgctagcggggtcaacggcgcggcaggcgcaggggtcctcgccaaggttcggaagagga

SEQ ID NO: 2120 - DNA, 2300 bp, Homo sapien
ttggtcaaatcttggaccctttatattcccccatgctcaagtcagcctgttgcatatcatggtctcaagaaagagaaaatagcatagtgaagagggatgtcaagtctatctggctacttcctgctgaaagagggctctccagcctgggccagagagtgggactctgtctcaaaaaaaaaaaaaaaaaatccagacagtctagtcacaaatgttcacagcattttcaacaacaatttgtgttgtttctaatttggggctattacaaataaaaatgctgttcccatcaatgattagataaacaaaatagtgataaatccatacaactgaatactaatcagtaattaaaacaaaacacaacctgctgatacatgcaataaggaggcaaaaaaaaagagaacactgtgtggggataatgatttcatttatttaagattcaagaaaatgcaaactagtctctactgacagaaagtggttgcttcggtatgaggttggaaagagagatggattacaaagggcacaagaaaacttttgggattgacagaagattatgtttattgtagtagtggtttaatgggtatacatatatgtcaaaactgatcaaaccaaacttacggctttatatatgtgcagcgtagaggtcttcaattataactgaataaagttttctaaaaaatggggataaaaataacatcttcagcctgttgtagggattcactgaatatgttaaagcactttatcataatacctggctccgagtttgatgccgctgacacttagatatcaaactcaacctctctaccaagctcttcatccaaacagactaggggtaaagactgtctaagactatacagaaagatcatgtatctgaggaattaaaaatagggcataagatttggcaatgtgtcactcggcaaactcaataaactagtattatcaaggcaaaaaatatatacacaaaaagaactgggttaaaaaaaattttttctatggacttttaacgtgataactcatgacacaggggttaggatcttcagttttcctttggaagttaataaaaaccactatagagaaaaacaagatttgctagtaagaaggtgaaaactgcttctcctctcagggttctagttctcttgcaacctaaaacaaaggaaccagacaggatatccactttcgtaccgtacagctccaaacactaatcaatcactccattcacttatcttttctatttccttgtattctgtcaaacaactgtctcttggtttaaatacttttctgctggtcttcgctctctctctctcctcttctggtttattttcatccagatgtggattttccccaaagtttccatcttatccttttctcctcctgtgtatgcgccactgaagtcaagattgccacattcaaactccccacacattcacacacccactcccaatatacagtatctcgcccaatgtttatcactccggatacattcctagaatccaaagatctggagcagggagaaaaagaaaaggcgcctaccagatgcctggaacagtctactaggcactacaagtacattagctctttcaatgctcacaacagcccagccagatgttatctcaatcttacggatgaataaatttaagacttctggctggacactagaggctggcgaagtacgtgacctttgatcagaatctcctggaggagtggggtccctgaccattgtaccttccagagaaccttaaaactgagatcccaggagacccctctcggatactctgcagaagtcagagtgacgatattagcaagcacaccgcagccatgcgaacccttcctggctcagctcccgacaaaagaaatcaagcccccagtcaaaatacaacaacaacggattaggcctacaaccctctcccccggcccccaaattctcaggagaaatcccctaagagtcaggtacggaggtcactgcagcgacttcagcgtgcagagaacgcggggacctaggaagaggacgctccagcccaactgagcgtctctgattggccgccagctcagcttggaacgctggggtgcgtggcgtcatatccgccgggcccgccatcttgttcccaggggcagttggcggaagagatcgagctccctggctgccggctcgccttctgcgtggagttctcgcggtctgggtttcgctgtctgctcttggcccggggtcattttgtcggcgtcgggtgccctctcttgcccagctggggcacagcgaggcggccccttctcccgacgacgttcgatggagtagggtcccagaccgttgt

SEQ ID NO: 2121 - DNA, 2300 bp, Homo sapien
aaatacaaaagcaaataaagcatgatccctccattcaaagaatggactatgtcaaaggagagaccaatggtgagtcagcgtttccagtttcacctgaccagtgctttggcagaaggctgccgacacagcgaggcacaggaggcagcatcttcatcaggctggggcactgagacagcatcccctagaataacttgtttcttaaagacttcccctacataggtttccccatgttttacaaagctttacagagtttagatttcacctctggattagtttcctagggctgctggaaccacaaactgggtgacttgaacaatagaaatgtttggtttcatggttctggaggctacgaagtctgaaatcaaggtgttggctaggttggttccttctgagggatgtgaggaagaatctgttccaggcctctctccttggcttgtagatggttatcttcacattcacatggaattttccctatatatgtgtatctgtgtccaaatttattcttttaataaggaaatcagccatattggatgagggcccaccctaatgatctcatcttacctgattacatctgctatgaccctatttccaaataaggctacattctgagagtactaggggcaagaacttcaacatatgaacttggagggaactcaagtcaactcataacaggctctcactactctacctatttttcctagttctcccatgcttcctgtgggaaaagcaagttgccctaaaacactgcaggctacccctaccagccctgggcccagcacttccctaaagcagaactgcctctgcagactagctgaccatgcagtgggaaggggcctgtcaagatggcccacgggaaaatcatggcagatgcctgccttacagagaatgagttaggtcctcatgtcctcaaagaggccttcccggccgggcacggtagctcacgcctgtaatcccagcactttgggaggctgaggcgggtggatcacgaggtcaggagatcaagaacatcctggctaacatggtgaaaccccgtctctactaaaaatacaaaaaattagcagagcatggtgccgggcgcctgtagtcccagctactcaggaggctgaggcaggagaatggcatgaaccccggaggcggagtttgcagtaagccaagattgcgacactgcactccagcctgggcgacagagcgaggctccgtctcaaaaaaaagaaaaaaaagaggccttccctgtttgtcccagacatgtccagaggatgctggtctctgctcacagactgtttaagcagtttcctaaggcctgctgcgtgggcgttattacagtacagattccaaagaacggaggccaatttctcccctccccaggccaggacaccttcttacgcttttttaatgcggtaactcttaagaaaggaaggtatatttacaagaatgtagggttaagtgttttggagacactaaaagactgccttaatatgtatgcatcacacttgacaccttccttccttccttttgataatgaatggaaagaaaatctgctcctctagaaacaattatgaccgaaaagctattacagtaaaagttgtagcagatgtcaaaagtaacgaagggatatgtttagtttcattgatcaataacagaaaatatttgacctatcacttaataataacgtacccacgtggcccttttagttctccccatttataatttcatttaactattttaactacttattaaataatgcattaattcattcaaaatatgtcttttggcacctataggtgttaggcatggatcttattagatctatttagatataagaaaaaaataaataacaaaaagggtaaataatatggggtcaaggtcacacagtatattatgagtttgcatagtagcagatgaattaccagttcccaggcatcatcctaaatcccaattttatgctttgaacacttgtaattatccaactattgggtaccttatcctccaggctctgcaacattgttatgccaactcttacgtagtttgtaaggctactacaaaatcttaattgtttctctaaaatgtaggtcctcgggcccctgccaacattcaagtctctttcgatagtggagctctgaaggcatctttttcctgggcacgggcagaaggagctttcaattatactgtgatggctttgagcgactcttcagagctgacctgcagtacaactttcagttcctgcaccatctcttccctccagtgtggaactgaatacttgatttcagttttagcaagtaatgatgctggatctagcaaat

SEQ ID NO: 2122 - DNA, 2300 bp, Homo sapien
ctagtaagaggcagagccagattttgtaggatgtaaacctatgcctacgtgcagttaaagaccatgcttgctccactattccgcagtgccaccaaggactctggccttcaggagcatgagccagaactgcaccccatgtgaccagagtcaaacttccaacccagagggacctgtattattccctggcacctggtcattctcctgaagggtaagagatggaggcacctcacccatctcactcttccctcttggtttggctcttcagagcaaggggcttcacctcagaagggtgaattttccctggcacatatttttcttatggattggggcttcaccctgctaaactaagcagaacctaacttaaaatgaaaagggagagggaaatcatatgtgcacttgtttaaaacattgagcaactgaatcaatttagagtaggtttaaaggaggtcagggctccagcttctattctcatataagccttgaacagaaaaaccactcagccataggttgtgccagaacccattttatggccttttttattgttagatacagggtctcattctgttccccaaactggagtacagttgcatgatcatagctcactgcagcctggaactcccaggctcaagcagtcgtcctacgtcagcctcgcaagtagctacgactcctcagcttgcaggtagcatgcgccatcatgcccagctaacttttttattaattttttttttttttttggtggagacagcagtcttgctatgttgcccaggctggtcttaaactcctggcctctatcagtcctcctgcctaggcctcccaaagtgctgggattacaggtgtgagccaccatgcccagcctgttcttaattcttcatttgcctttcctctcctaaaaattgcaggttaccccacagactactctattgctttccatgtagcccaagcctgatctttgttcccactccaccactaagtgcatccttggcaagttacttgacttcattaagcctcagtttccttgttgtaagtgttgctttgaggatcagtgaggtaatctacttagcatggtgcctggcatatggtaagtaagcactcagtaaatattagacattattattagtagtagtatctaaccacttctacttccctgtgtgaccaatttgaatctttacagccactggttctttgcaaatccttctaggaaagcctactttctgccaatgtcacatggttatctcacagttagggctcttagcaactaaactgatctcacttacgtttgattactttgatttaaagtcccaaaggaaccatctcagtaaacagatctctacctaaactttctgagctcagatctcctcctctgtgaatcaactttcaacaataattgtagattctgaagcattaacaggccctccctacatttgttgcataaatttgttaataaatgattattcttttgttggttcatttatgtatatcttatcattaaggcattcaatttttaaactaagttttaactacctgcagcattccaggaattgtgctctttaattagattgtaaattattcaggggaaagagttgatctctcatttctttgagtttcctaaaagtccagcacagttcttggcacactggagggaacctcacagttctacgcaattactgtgtccttgaaaaaatgaatgaaataatcatttggggacagtacattttccattgggtagttgggctggctactgagtgaagtctattatgaatcgccttgcgaagtgaagggttcttctgtaatggggaggatcctccagtcttcgtgtatgtgtgaactcggaatttcatagacggccttggctcacgatcggtttggcacttcgcgttcctaggccacaggacgtcgaacctcgggcgacagcagcctcccgctagggggctcccgacttcccacggaggttccacctgtactgcgcagcctccgtccgggagtgggcggaaattcccttgctgacgcgcgtgacgtcaccggagggcgcggtctgctagagggggtggggcattcccctgcagcaaggggcggggccaccccaacgccgcttctgcggccaaagtaggttgggagtggaaggtggtggctgctgctccgcagtgtcgggaagatggcgccgccggtggcagagagggggctaaagagcgtcgtgtggcagagtgagtgcggtggggtaggggttgagagagggaaggccgggaggctgccgtgccgggcctcgttttgcagccccaacccagcggtctgttgaggagccg

SEQ ID NO: 2123 - DNA, 2300 bp, Homo sapien
gtaaaacataatctcgtccaagcaaggtggctcatgcctgtaatcccagcactttgggcggccgaggcaggtggatcacgaggtcaagagatggaggccatcctggccaacatggtgaaaccccgtctctactaaaaatacaaaaaattagctgggcgtggtggcgcacacctgtagtcccagctagtcaggaggctgaggcaggagaatcacttgaacccgggaggcagaggttgcagtgagccaagatcgcgccactgcactccagcctggcgatagagtgaaactccgtctcaaaacaaaaaagacataatctctacaagaactttaagacaattttaaaactcaatctgtaaataaatatatttgaaggtaaaaaaaaaaatcaggctggatgaggtggctcatgcctgtaatcccagcactttgggaggctgaggcaggtggatcacttgagctcagtagttcaagaccagcctggccaatgtggcaaaacccatttctactaaaaatacaaaaattagttgggcatggtggtgcatccctatagtcccagctacttgggaggctgaggcaggagaatcacttgaacccgggaggcagaggttgcagtgagccgagatcatgccgctgtactccagcctgagcaacagcaagactctgtctcaaaaaaataaaaaataataaataaataaataaatcactaagcaagtttaaacaaaatattgtctaattttttagaacaaaaaaaaacagagtatctttttttttttttttttagacaaggtctcactctatcacccaggctggagtgtagtgacaacaccatggctcaactgatcttcctcccttagcctcctgagtagctgggactacaggcgcacaccaccacacctgactaatttttaattttttttttagagatggagtttcaccatgttattcaggacggtctcgaactcctgagcacaagtaatccacctgcctcagcctcccaaagtgctgggattacagacatgagccactgtgcctggcctgagagtatgtttaaatgcctacagagagaatggaagaagaagaaaacaaattctagttttgcaagacttttaatgacccaagtatcagtcccaaagttatcctcatgctttctttacattttcaggagctcattgccaaacgccatacccttcttgtatagaaaggaaagatactttgttggccaaattcccacttttaaaatataattaattaaaactgataaaatttgaattttgctctggctctcaagaaaaagaaaaaaagtccaggcacagtggctcatgcctgtaatctcagcactttgggatgccaaaacagaaggattccttgaggacaggagtttgagaacagcttgggcaacaaagcaagaccctgtctctacaaagaaaaaaaaaattaaaaattagccagcagtggtggtatatgcctgtagtcccagcaacttgggaggctgagatggaggatcagttgagcccaggaggtcaaggctgcagtgagcagagatcatgccactgcactccagcctgggtgacagagcaagaccctgtctctctctctctctctcacacacacataaacacacacacacaaacacacacacagacaaagaaagaaagaaaggaaaagaaaaggagtgagataccattaagataaaccagaaacctgaggaacactctcattacatacaggaaaacagcttctgttgttattattttttgcatgtgtgcatgcaaaatatcaagaggattttttctggaaaaggacaatccatacccttagcaaggtaatgagcttctttgagataactggaggaactggagcatcttcccatgtcaacacttggctcaatcttgaaatccaaaggcatatccaaagaggttccactcagaatccaacagaacctttctgtagaatccaaattgattttctgaagtcaggtgactacatttggggccacgcctgcttatgcagctatcttgaccattatgtgctcagcaatacctcacaagtcactctgagatgaacactttgagcaaacagggccaggacatcacagtgacccaggctgtgaaaacacttcaggccagtccctgagtaggaatggacaacaaggtggtcaccatgctgacagctattccctgtgtgatttactttattatgaagtctaaatttgatgctgaagtgctagcctaagctcactaacctgccaacttagagaagaaggtaaccatggctaggatgactgggaatctgatggactc

SEQ ID NO: 2124 - DNA, 2300 bp, Homo sapien
gacagagtgagactctctctcaaaaaaaaaaaaaaaaaaaaaaaaagacattatacttctttaaatcaatgtgttttaaagtttatcactggaattactttcagaaaattaattggtaagagttttctaaatgttcccaaagcacagcaaaggtccgtggtttacagcacacactaggctacatcaatgggaaaattggataaaaagacagggctaacctcaccaaagagcaaggaaaaccagcaaagttttctggtaaaacacaggcaggaagtttctccaaatactgctttactcgcacttttaaaaggctttcctcccttccccccaacttctaaaatagtttcaggataacaaatttgtaacagctggtcatcaaattcatgcgcactcccaaaaggacgacagccctaagactgactataaataatacatccatctggctcttgtaggagtattggattgacttgttgcccatcacagtgtctcccttctgccaccccacaatgacagggtgaagctagacagcctcactgaatggtatatggttacagttgaggcactgcattgtgggtaccccacatttctgagataaagttagctgatagaattaccagagcataatcaaatgcagtcattacagagggagcctatatcatgttacctttgaaaatattttaatctagaaacatcatacactgtatacaaaattcatgaatccctgacgcctgggcgtggccttggacatattattctgagccatctcctattttctttcatatgtaaatgttattcttgagctaggaataggagagaaagagaaaattgaaacagccagaccaagtgtttttgaatgctcttaaaagacaaaaaaaaaaaaaaagacaaaagtttgtatcacatcagaagttccctacgtgctcttcaaagctgattgcttgcagttaaaagaacccagaagaagcaggcacgccatgattttgaagctccgtttttgttctgttattcaactgcagtcaacttccaactgttgaaaaaaagatgatttagaattaaagggttgcttgtctgtgtcgcaaggcccttcaacttgttcacctgtgatatccagagactccaagatgttggtgagtttctattgcaattgccatattgccatggttttgccctttgtgttgactgtagcattgtgctgtttgaagacagagcagcatactgctttgtgtagtaaaaattgatggataatgtacttaaagcttttagatgtacactattcacattctaaatgacagatacaaaaaggaataatcagaatttagattgttgaatcattgcctccaacagccaactcttaccgtgacaaagtcagtagggctgatcttagaagtgtaggacttgtgagtgttacgtggttgtactaactggtaccttagtggaggggcagataaggtaagtagaaacaatgcctgctttctcctccatgtctgggtcctacacatagtccccagtttgcctggtttgtagaggtttaaacacagaacagagggtgttgggaatgagacaaagagattgtcacaggaacatggacccacggttttcctttggtgatgaaaacaatcctgtcaatatggaaaactgtgttatcacaaaatgggcttagcgaatagaagaaatgtcacctaccagccggaaacaacaattcgctgaccatctttggcctcttgccactaaggagttttggttttcccatctgtagaaattcttaattgagtccatcagattcccagtcatcctagccatggttaccttcttctctaagttggcaggttagtgagcttaggctagcacttcagcatcaaatttagacttcataataaagtaaatcacacagggaatagctgtcagcatggtgaccaccttgttgtccattcctactcagggactggcctgaagtgttttcacagcctgggtcactgtgatgtcctggccctgtttgctcaaagtgttcatctcagagtgacttgtgaggtattgctgagcacataatggtcaagatagctgcataagcaggcgtggccccaaatgtagtcacctgacttcagaaaatcaatttggattctacagaaaggttctgttggattctgagtggaacctctttggatatgcctttggatttcaagattgagccaagtgttgacatgggaagatgctccagttcctccagttatctcaaagaagctcattaccttgctaagggtatggattgtccttttccagaaaaaatcctcttgatattttgc

SEQ ID NO: 2125 - DNA, 2300 bp, Homo sapien
cagcagagcctaactacaaactcagtctggcaccgaagtccataacctaactgttctctatatttccttttgattccaggacctgcatggtactgtgtgcctaacaggtacattcaatacatatttgtttaataaatgaaggaacagttctaacgggaaaataaaagttacctgtaatcctaccacatgttttgagattcattctatagatatttcttctaatatgaaaatagacttttaatcaaaatcttaactttttgaaatcattttgaggagcatagattaggtatcaatgtgcaatatatttaaccttgtattcattattttaaaaaattataattacaagtcaatgttcttcctttaggcagggggaggagggcggaggagagaagcataagtctttggttaagggaggaagggttttcctaaaatattctggcccttcttatctccaggaggaggttgcaaaacttaagtttgaaagtttagggaagggcagagacgtttcagggacaagattaaaaacaaattatacttattcgaggctgggtatggtggctcatgcctgtaatcacatcactttgggaggctgaggaggaggatcgcttgaacccaggagttcgagatgagcctgggcaacctagcatgatcctgtctctacaaaaaaaaaaaaaaaagaaaaaaagaaaaaaaaaattagccaggtgtggtggtatatgcctgtggtcccagctactcgggaggctgagacaggaggattgcttgaacccaggaggtagaggctgtggtgagccataatcatgccactgtactccagcctgggacacaacaagactctatctttacaaaataaataaataaataaaatttaaaaattatacttctttggctgggtgtggtggctcatgcctgtaatcccagcactttgggaggccgaggcaggtgggttatgaggtcaagagatcaagaccatcctggccaacatggtgaaatgctgcctctactaaaaatacaaaaattagctgggcttggtggcacgtgcctgtactcccagctactcgggaggctgaggtgggagatggcgtgaacctgggtggcggatgttgcagtgagccaagattgcgccactgtactccagcctggtgacagagtgagactctctctcaaaaaaaaaaaaaaaaaaaaaaaaagacattatacttctttaaatcaatgtgttttaaagtttatcactggaattactttcagaaaattaattggtaagagttttctaaatgttcccaaagcacagcaaaggtccgtggtttacagcacacactaggctacatcaatgggaaaattggataaaaagacagggctaacctcaccaaagagcaaggaaaaccagcaaagttttctggtaaaacacaggcaggaagtttctccaaatactgctttactcgcacttttaaaaggctttcctcccttccccccaacttctaaaatagtttcaggataacaaatttgtaacagctggtcatcaaattcatgcgcactcccaaaaggacgacagccctaagactgactataaataatacatccatctggctcttgtaggagtattggattgacttgttgcccatcacagtgtctcccttctgccaccccacaatgacagggtgaagctagacagcctcactgaatggtatatggttacagttgaggcactgcattgtgggtaccccacatttctgagataaagttagctgatagaattaccagagcataatcaaatgcagtcattacagagggagcctatatcatgttacctttgaaaatattttaatctagaaacatcatacactgtatacaaaattcatgaatccctgacgcctgggcgtggccttggacatattattctgagccatctcctattttctttcatatgtaaatgttattcttgagctaggaataggagagaaagagaaaattgaaacagccagaccaagtgtttttgaatgctcttaaaagacaaaaaaaaaaaaaaagacaaaagtttgtatcacatcagaagttccctacgtgctcttcaaagctgattgcttgcagttaaaagaacccagaagaagcaggcacgccatgattttgaagctccgtttttgttctgttattcaactgcagtcaacttccaactgttgaaaaaaagatgatttagaattaaagggttgcttgtctgtgtcgcaaggcccttcaacttgttcacctgtgatatccagagactccaagatgttggtgagtttctattgcaattgccatattgc

SEQ ID NO: 2126 - DNA, 2300 bp, Homo sapien
aaagaatttataattaagaaggaattaatacctacctctgaaacagtacagccaaccaattccattgttatttacaagaacctgatattaaagatggttgtaacgataataggtatcaagtatggagcagtttctatgtgtcaggccctatgtcaaccacttaacaaccttacctcacagaagcatcatagcaacccttattagaagaggctttattatgttttacaggtggggaaactaagactaaagaagataactcattcaaggtcaatcagcaagtaagtagcagaattggaactcaaacccaggtctagtttgatgataaagctgttcctttaagcaatttgccataacatgcacctaatgggaaatgttgcttggatcactggttatggccatcattcacggagatactgaacccggagttttctttaacatagcctttaccctgtagaaacatttaaacttcatttcagaagagaaatatctatttgaaaaataatctaagtaaattcatcagatgctttaccccagagagactctggtcttggtattttggtttttgttgttgtttgagacggagtctcgctctgtcgccgaggctggagtgcagtggcgcgatctcggctcactgcaacctccgcctcctgggttcaagcaattctcctgcctcagcctcccgaatagctgggattgcaggcgcccaccaccaggcacggctaatttttgtatttttagtagagacggggtttcaccattttgaccaggctggtctccaactcaggtgatccccccgcctcggcctcccaaagttgctggtattacagatgtgaaccaccgcgcccggccggtattttgtgaagaacaaactataaggtgactactattttggggtcaccttgacatggaggagaggtgaatggaaataaaacttattcttcccagtgtctttagaatgtaggcgctgaaactgagtgaaactgagtaaaactgccacccaattttcctgggaaccagcgattctgtagtcaacagaagtttgcttttccaacagctggaaacgccagggttgggcacagcctcaagaactgaggctgccttgttcagactttcacacggtccctctgttccttccacagaggcctctttttcttctatatcccgcatctgccgcttgggacactcattctgtagcgcagcaccaagtcttccaaaaaggcggcgctggttttgcgctccttttttaaagggatctaggccagcctctatctgaactctgtacgatgttttttgtttgtttgttttgttttgtttttgagatggaatttcgctcttgttgcccaggctggagtgcaatggtgcgatctccactcacggcaacctccgcctcccggattcaagcgattctcctgcctcagcctcctgagtagctgggattaaaggcatgcgccaccactcccagctaattttgtatttttagtagagacggggtttctccatgttggtcaggctggtctcgaactcccgacctcaggtgatccgcccgcctcggcctcccaaagtgctgggattatagccgtccgtcacagcgcccggccaactctagacaatatttattgctctactttttagtgtctgaagaagaaagaagaggacaggaaagaaacttcagtctgagggttgaggacacgtcccggagcagaggaggaccaagctcccaagccccctgtcaccttgacacgcagacggttccccaggactgcgaagaggggggcaaccagcgccccgccccgccccgctgcgccgcccgccattggccggtccgaaagacgcggggcgttgtcggtttgaatgagagcgcctggagccggggcgcaggcgcagaggagggcggtgttgagaccggcggagcggcgggacccctaggtggcggagggacgctccgggaaagcgaggggcgctacgagctctggcccacgtgacctgccgggggcgggagcagggggcgcgccggcctcctgcggtgcccctgccttggggaggggccgtgaccacccgtctgtcgcccgaggcggccgccgctgcaccttcaccgcgtacccgggacccgcccgcccgcgggaggtgagcgcttccgcgacgcgggttctgaggcgtttgaggggctctcggagggaggtgacagggaggggtgcgtgtgcgtgcgtgtggggcttctgtgtccagaggtctgggggtgacgtcctttgttttgggcaggaggcgggctgggggcttgcgggacctgtgggcgctgcggg

SEQ ID NO: 2127 - DNA, 2300 bp, Homo sapien
gagaccctgtctctaaaaaaaaaaagaaaagaaaaagtgggagaagatatttgcaaatcctatctgataaggtggttaatatccagaatatataaggaaccaaaacacaacaaaaacccattaaaaaatgggcaaagccaggagttcaaggctgcagtgggccatgatcatgacactgcacttcagcctgggtgacaaagcgagaccctgtctcttaacaaaacaaaataaaacaaacaaaacaaatgggtaaaggacttgaatagacatttctccaacaaacatatacaaatggcatgaccaataagcacaagaaaagatgctcaacatcactggtcattagcgaaaggcaaatcaagaccacagtgagatacctcacacctattaagatggctactatacaaaaataaaaagatgtcagtggagatgtggggaaattggaacttgtgcactcttggagggaatgtaaaatgttgcagccactatggaaaagagaatggcagttccgccgggcgcagtggctcatgcgtgtaatcccagcactttggcaggtcgaggtgggtggataacgaggtcaggagttcgagaccagcctggtcaacatagtgaaaccccatctctactaaaaatacaaaaattagccaggcatggtggcaaacgcctgtagtcacagctactcaagaggctgaggcaggagaatcgcttgaacccgggaggcagaggttgtggtgagccgagatcgtaccactgcactccagcctgggcaacaagagtgaaactccatctcaaaaaaaaaaaaagtacggcagatcctcaaaaaattaaaaatagaattactacataatccagcaattccacttgtgtatatatattcaggagttgaaagcaacagatatttgaacatctgtgtgtatacccaaaagggttaaaaaacagatatttgtatatccatgtttacagtattatttcacagtagccaaaagtggaaacaacctgttatccattaacagatgactgaatgaactggtatatacataaaatggaatactattcagccttaaaagaaattctgacacgttaccacatggatgaaccttgaggacattatggtaagtgaaatcagttacaaaaagacaaatgctgtatgagtccttatatgaaatacctagagtagtcaaattcataaagacagaaagaatggtagtcgctgggaaggagggaggggaagaatgaggcgttaccacttactgggtacagagtttcagttttgcaagatgagtgctggagatggatggtggtaatggttgcataacaatgtgaatgtatctaataccactgaattgtacctttaaaaatggttaagatagtaaattttaccatcttcacagtttcccgagattgcaaggccagcagttaaagacaaaaacaaaactacttccaactgccctacagtgtgcagacctttcccttgtcctgccctgagtagaactacagttgtcattcgtgatcctccctttaaaaaattatgcttgtggctaggcgcggtggcttacacctgtaatcccagcattttgggaggccgaggcgggcggatcacctgaggtcaggagttcgagaccagcctagccaacatggtgaaaccctgtctctgctaaaaatacacattagctggatgtggtggtgcgcgcttgtagtcccagctgctcgggaggctgagagaggagaattgcttgaacccgggaggcagaggttgcagtgagccgagccgagatcgcgccactgcactccagcctgggcaacactgtgagactctgcctcaaaaaaaaaaaaatcatgcttgcgtttcatggcgaatgttacacattcaaacttatcaaatatattaatagtaagaaaataggtttcctatccgttgtatatatttgagttccaggcgagatttccttcgcagaaagagttccgcagatgaaaagtaaaagaaaatccgcggcgaaaataacccgcgcgcagaggccggtcccgctactagccccgcccaatcaacgaggccaatcagcggcccgcaacgggggagggacacgcagccgtcagccgaacaattcgatgacgaggcccaggaagcacgctgaaaccctgggcggcggcaagctgtgcgacctcttctgcggccggcctgggcaggtgtcttcctcgagaggcaggcaggggatcccggacgtgagtccgtgcagttgggtgtgttgtgcggcgggtggggcgggttacccgccgttacgccctggcgggtccagcggactcgc

SEQ ID NO: 2128 - DNA, 2300 bp, Homo sapien
ttttttttttttttgagatggagtcttgctctgttgcccaggctggagtgcagtggcactatctcggctcactgcaagctccgcctcccaggttcacgccattctcctgcctcagcctcccgagaagctgggactacaggcgcccaccaccacgcctggctaattttttttttgtatttttagtagagacggggtttcaccgtgttagccaggatggtctcgatctcctgacctcgtgatccgcccgcctcggtctcccaaagtgctgggattacaggcatgagccaccgcgcccagccctccttctttctttccttttttttctttttctttttttttttttctgagatgggatctcactttgttgcccaggcaggatcacggcccattgcagccttgacctcctgggcccaggcaatccttccacctcagccttccaagtagctaggaccataggcctgcaccaccatgtctggctaagtttttctttttcttttcttttttttttttttgggagagacgggctccctctgttgcccaggctagtctcaaactcccgagctcaagcaatccttctgccttggcctcccaaagttctgggattataggcgtgagccatcgctcctggccatgggtctaacttctttttttttttttggagatggagacttgctctgtcgcccaggctggagtgcagtggtgtgatcttggctcactgcagcctccgcttcccaggttcaagtgattctcctgcttcagcctcccaagtagctgggattacaggcatctgccaccatgcttggctaattcttgtatttttagtagagatggggtttcaccatgttggccaggctggtctcgaacctgacctcaagtgatccgcccacctcagcctcccaaagtgctgggattacaggtatgagtcaccgcacctggcccatgagtctaaatcttaaaagagcaatgtagcttcctgtttgtgccctttgtagccctgatctcaatatggagtcaggctacagcaatggagagactatttgttgagggcaaggccctgaggctaacttgttttgctccctgttttatctccctattgtctagatcagagactggccaatagtatttgtagaatgaattaatgagtgaataagtacatgtggagtattagggatgccatttgactttttactcatcatggcttgctcaagtcatccatttcctacttgatactactcaagacagatggaatgaaaatggcttgttttgttgatgagcaattttggtagtggtgatattgttattgactctttctgaaagttaagttttaaatggaaaattaaaccaaagttatattggggaagaaaaagaattttttttctgtttttattgtaaaagctgcttttaaaaagtctgtgatactggctgggcacagtggttcatgcctataatcccagcactttgggcggaaggcaggaggatagcttgaacccaggagttaaggaccaatctaggccatatagggagactctgtctctacaaaaaatttaaaaagttagctggtcatgatggtatgcacctgttgtcccaggtatgtgtgggaggtggaaggattgcttgagcccagggctgcagtgagccacgatcatgccactgcacttcagcctgggcaacagagcgagaccctgactcaaaaaaagaaaagtctataatgcccattatgcctatcttctgtagtgttatactatgggaaaatgtggatcttctttcagtatcttggttatgtcttaagttgatggtggtaatttttaacactaaatttgccatagattatatattatatgtgcatatttttaccttttcacacttttaaccttgtatatattaggaatgcaattaagtttttattttaaaatgattacattgtttaattttataggtccattcaaaagcttggtgaattaaatattggaatggatggccttggtaatgaggtatcagcactcaaccagcaatgtaatgggagcaaaggcaatggatctaatggttcttctgtgactagttttactacaccaccccaagactctagtcagagattaacacatgatgcttcaaatattcatacaagcactcctcgtaatcctggatcaacaaatcacataccttttctggaggaatcaccttgtggaagccaaatgtaagtgcttgactttgtaaaacttggaaatattaacttactactaatggttagaaggttgaacttgtctttggagccttataaataaaagtttttagagcttact

SEQ ID NO: 2129 - DNA, 2300 bp, Homo sapien
gtatttttagtagagacagggtttcaccatgttggccaggatggtctcgatctcttgacctcttgacctcgtgatctgcccgcctcggcctcccaaagtgctgagattacaggcataagccaccacgcttggcctgccatttactatttctttgtgttgggaacattctgaatcttctcttctagctgtttggaaatatagaatagattattgttaactatagtcacccaattatgctattgagcactagaatttattcctgctacataactgtatttttgtacccattaacctctttatcccccctttgccctccactacactttctagcctctggtaaccaccattctattcactacctccacgagatcaattcttttagttcccacatatgtgtgagaacgtgcaatatttgtctttttgtgcttgtcttgtttcacttaacataatgtcctcccgtcccatccatgttgctgcaaatgacaggatttcattctttcttaatgggtgaataagattgtattgtgtggccgggcgcggtggctcacgcctgtaatcccagcactttgggaggccgaggcgggtggatcacgaggtcaggagatcaagaccatcctggctaacacggtgaaaccccgtttctaataaaaatacaaaaaaaaaaaaaaaaattagccggacctggtggcgggcgcctgtagtcccagctacgcgggaggctgaggcaggagaatggcgtgaacccgggaggcggagtttgcagtgagtcgagatggcgccactgcactccagcctgggcgacagagcgagactccgtctcaaaaaaaaaaaaaaaaaaaaaagattgcattgtgtatatgtaccacattttctttatccatttgtctgttgattgacataggttgattctatattttggctattgtgaatagtactgcaataagcatgggagtgccagaaatatttttgatgtttattctctttaccagactgttaccccattttccccttttgggaggtccagctcactctggactttcgcctctgtgaggatgatgttcttttttctgtgagacggagtctctcgctctgtcacccaggccggagtgcagtggcatgatctcggctcactgcaacctccgtctcccaggttgaagcgattctcctgcctcagcctaccaagtagctgtgattacaggaggcttgccagcacacccggctaatttttgtatttttagtagagacggggtttcaccatgttggccaggctggtctcaaactcctgacctcaggtgatccgcccgcctcggcctcctaaagtgctggaattgcaggcgtgagccaccgcgcctggccgagaatgatgttcttacaggtttgtgtaattgtattcttccttatggttatacttcctggatgcttaattaagctcggttgaacatcacgtatatttgtggaataaggggcttacaaccaacaggagtagacaaaacctgaacatattaaatgttaagtaactgaaaaatgctttcaaggcagatcagctttgcaaaatgagaaaccaggaaggggacaaacaaactactggagttttctgggacgaagtgggacctaggaaagcagcgaaagaagggtagaaggcaacattaatttcattaacctttattaattatcggggaggagtatgaagagtcaatcctaatgcgcagtcttctccatttgcaggcgacaatcctgttcgtgctattttgggacatggggtcaccggccagctaagggtctacgtccctgccaccagtctcacgctattgccgcacccgttctgctactcccccgggcccctagccggtccctccaagcccgacccccgcccgccccgcccaggctttggtccgccccgcccaggctttggtccgccccgcccctccccgccccagctttgggcccgcccctccacgcccctccccgccccgccccgccccgccgactcgcccttcggctcaggcacctgcctggccgccccgcgcggcggggtcctgaggcgcctcggggaagcgcggcgattggctgccgctcgcgggtagagctcggctccccggcacttgacaaccgcagtctgcaagaggctgagctgaggagtcgctgggccgggaggggcggacgtgagaaggacggattgacgaactgatggattgacgcgcgggcggtaggagggaggaccgacgccaaacccagaccgccgccgtcgtgctcctgccgcagcccggagccggccgcttcggggccctggccgccggcct

SEQ ID NO: 2130 - DNA, 2300 bp, Homo sapien
ctttgaatgcagactgatttgggtgagtattgtcgacctaaaaggaagaagctgaggcaaaattaatataaatagagagtttatttgggccaaacttgaggattacaactcagcagcataaagttgcctagaatatacactctaagattagcagcaggtacaagtggatttttaaaggaaaagaatgaggacagggagtgggctgatacaaagttgtctttaaggagttctcattggttcacaaaaataacattgattagtaattggctaaacattatcaagctatagggtgtgcgatatggtgtctgatggggcataattaggctaatttataactaatacttgtggcaatagcaagcggttttaagacataaatacatagctcaaaagggggcaagcaggatgtgattgcctctcattttaatgcctctttgggcctaataatttaactcacattcctcaaatcaaagttattttttcattattcactattcaaattattacaagtgatgttgcttttggtgacgttatttcttgaaatggtacacagctcttaatgaattccagaccaaacaaaatacaattactattcaattttggggtaataacattcctagaaacttcaacgtacattaaaagtgtgggaaaatgctttgtgtttatttttttaatttttattttttgaggtggagtcccgctctgtcaccaggctggagtgcagtggcacaatcccggctcactgcaacctctgcctcccgggttcaagcgattctcctgcctcagcctcccgagtagctgggattacaggcgtgcgccactacgcccagctaatttttgtacttttaatagagacggggtttcatcatgttggccaggatggtcttgatctcctgactttgtgatccgcccacctcggcctcccaaagtgctgggattacaggcgtgagccactgcgcccggccgctttgtgtttattaacaaagataggttcaactctcagataattagttttcactcaccgaatgttcagcaggacattcagaaatcgtgtgtattacgggattttctttatgtagcatcatctgttacactgtagggacatttatattatatccctagctctggccttccgatgcctgtggttttgccagccattgttctgaccaaaagccttccccggtggacacggtggctcacacttgtaatcccagcactttgggaggcagagcggggcagatcgcttgaggccatgagttccagaccagcctgggcaatgtggggaaaccccatctctactaaaaatacaaaaattagctgggcattggtggtgtgcgcctgtaatcccagctacttggaggctgaggtgggaggatggcttgagcccagcaggtctaggctgcagtgaaccctgattgcgccacttcactccatcccgggggacagtgaggttgtgtctcaaaaaaacaaaaataaggccgggcatggtggcgcacgcctgtaatcccagctactcgggaggctgaggaaggagaatcacttgagcccgggaggcagaggttgcagtgggccgggatcgcgccactgcacacttcagcctgggcgacagagtgagacttcgtctcaaaaaaaaaaaaaaaaaaaatcaaaaaaccttcacaaaattttaaatgcttagtctcgggacaccatctcttggaaatttgtgatgaagcacagtatccccaataattaacacagtgcttagaaacagtggaactacaaatctttaaaatgatttaaaagcatatttgtctgataaaggactgctggcttgccctcctatgatccatagcttcgcagtccccaaacaagaagctgtgattcaatacgcagtagcaaattcagggtgacaacgagatactcgcgacctagcccgtgatttccttttctttgttagttttcaattccttcgggattacagggaggcgctccggcctcctcccttagagactgtcgcatttccgccgctaggccggaaagcaccaccgtcctcccgcaggccgcagagggctaggcccagctacggccccgcgcgtcaccggaagtgaggcggcggaagtagtgtaaccagctgggagccagccggcaggacgctgtgagttggcgtgctagtgggatggcagatgaggaagaagaccccacggtgagtgaccgtctctgtccaaaacctgtcttttcttcactccttcgggctcagtagcggaggcagagttcaggatcgggtctgcttgccttagtgaattcagcggacagagttcggg

SEQ ID NO: 2131 - DNA, 2300 bp, Homo sapien
gcccacctcggcctcccaaagtgctggaattacaggcgtgagcaaccgcgcccggccaaaggggggcagttattattattattattattatttgaaatggagtctcgctctgtcgcccaggctggagggcagtggtgctgtctcggctcactgcaacctctccctcccgggttcaagctattctcctgcctctgccttccgagtagctgggattacaggcgcacgccaccatgccaggctaatttctgtatttctttttttcttttttctttttttttttttaagtagagacggggtttcaccatgtggtcagggtggtcttgaactcctgacctcaggtaatccgcctgcctcggcctcccaaagtgctgggattacaggcgtgagccgcgcccggccagctgctgctgttttagacaatggttgatgaaggattcgaaggcctaaacaatagagcttttgttctgttttgtttttgagtggtcctgaacagttcttttgggcaggggaatttgtctgtgtgtgaatgtgcaaacatatatataatctgagtggctgcctggccttgtcctaggttttgtcccgtatatacgccgtctttttttttttttctttctgcatgtatgtatattttctcaaggcatctgtcctgcactagactttggcttgtctttccaggccagcttccagaggatgctttggcagttttccctctgggtaaccaagcaggctgcagccagcagatggcactgcagcagaaaggggcagagtccctttaggcccttgacaagcacggcggattagtaaccgtataatttaaccctccagttagccttggaggactcggtgtcgcacttccgcccgaactctaataaagcgggccgagttgtgtgcaattaaggatttcagtatgcaaatctgaatctgtacttttgtctcctccaccccacccccatcattagactggcaatgtcttttgtcacgttgtcaaagtgtcctcagagaagcggtgtctagatatcgccgatttctggttaaagtggctgaagtgatcccagcattaattaaatgcaggagaatcgagattctcctgatagtttaaggaaaagaaaaattcacacaagcaaacgggcaaccctttgaatgttttccgacgacgtggtgctttaggatctgaaagatgcgacttggtttttgttgttgttgttgttgttgttgttgtttttgagacggagtttccgctcttgttgcccaggctggagtgcaatggcgcgatctcggctcaccgcaacctccgcctcccaggttcaagcgattctcctgcctcggcctcccgagtagctgggattacattacaggcatgagccaccatgcccggctaattttgtatttgtagtagagacggggtttctccatgttggtcaggctggtctcgaactacgatctcaggtgatccgcctgcctcggcctcctaaagtgcttagattacaggcatgagccaccgcgcccggctaattttgtatgtttagtagagacggggtttctccttgttggtcaggctggtctcgaactccgacctcaggtgatccgcctggctcggcctcccaaagtgctgggattacaggcgtgaaccaccgcgcccggccgcgacttgtttttgttacaaggttcctcatttcatttgcaacgttcagacgcagtctgactagatttccatccggagtaaggaagagcagctcaagggcagtcacggaggccgcaggtgcggcttcttcacccgcggtgctggagttctctcaagtggaagcccaggacgatgaaaacctcataggtaggctgctgcttacacacagcagccgccacggcgcaaaataaactacaaaactacaagcctttaccttttcaaacacactgacgcgggccagccccagccctacgcccgcaggggcacgcagaaaagacttagttaccacggccaagtacgaagccttcgagatagcgttcttcttaccctacgtaaacacgcagtttcccgagctcgacaatcggctagccactcctgatagcgttcggcgctcgcctctcggcccttgctcctgcgtactacggcttcttccagtcacctcggcccggatcgggaagtgtcaagcgggcgctcccccatctccgccgctattaccactgaacccggaccccctacccaggtccagggccagccgccatgacgaacggtgagaactgatgccctgagcggagggtgggagtgaaggacgaagggaaaacgtggcgggcggggccgg

SEQ ID NO: 2132 - DNA, 2300 bp, Homo sapien
gctttcctttaagttcctggttctcacggcaccctgcacacaactctgtcacaacatgtgctattgtgcaagcatttttgctattgtcggtctctctttactactagagttccttgacagcagaagctacatctaatttatttatatatccttggcgtttagcagagtgtctggcttatagtaaataagtattgaataaataaaaaggggctctcaatattgttattagaccacaatcaccacttaattcatcttattgtgcaccacttcatatatcccaatcacttctaccagaaaaaagatcatctaagttccgaaatcagtgtccaccatcatgctaaacacacacataacaaacatattgtggtgttaaccagaagacagagacagtgtgaacacagatgtgtaaagcatgacctctggtggctttcagaggattctctcccactccatatctcatttctcttcagagaacagtcttccaaatagggaaatgggtagcttgaaggaacctgggcactgccataacttatactcacaattgatttgagctgccagagccccttgttcctctagactagaactctactttcctctgctcaaaaacgcctctgaaacgttagccgacttgaatatggagatagggaggcaggcagaaaacagacttccctggtacccgactgagtgtcttcaccagagtcctttatgttaccatctctgctcatcacacagacagaaagaagactaccggcgaccctactgggaatctgcgcaagaaaccacagtaccttggaagcccgcagttctcctaagtaggaatcatcgttatctaatgtaggctgctggaaagggtcccgggtgggaggcatggctaaatgcctaactcttttaagagggatgggaggcccgctcagccgcagcacagcctcactggcataagatcccgggtcccaattgtttggagcgctggtttcggttgccaggcaactgcccagccatctatgacagaggaattccctcagaggagggcgccacctggcggctgaccacgggaggcccctggggaggaagctccggggactgcagagggaacgttccgctgagcgggcccgagacttggaattgcactcctgagcctcggcggaaaagtgctggctgctcaccatcaggacttctgcaaaagacttcagttgaggaaagaagtcctgaaagatgacccagaaatttccttctccctcgcacctaacaaaaggctttcaaagccatgagagaatgaggatgtcaagagaccaaagagggccgggcgcggtggttcacgcctgtaatctcagcactttgggaagcggaggcgggcggatcgcttaagcccaagagttcgagaccagtctgggcaacatggcgaaaccccgtctctacaaaaagtaggaaaaaaattagctgggcttggtggcacgcgcccgtagtcccagctactcgggaggctaatccaggagaatctcttgaacccggaaggcggaggttgcagttagccgagatcgcgccactgcactccagtgtgggcgagagagtgagaccctgtctcagagagagagagagagagagagaaagagagagagagagagagagagagagagagagagagagagagagagagagaggcccacgtgcggcgcttgggaaattgcggctaaggcaaactcctcgcttaaactcggatcaactacagtgtcagggcttctcttctagccggttgtaaaagcacggatggatttggcgggatgtaagatctccaggagtggccttcgtaggagggaacacgtactggggcctcttccaggcgacgacgtctggagggtgatctctccatcttctttctctcggttcacacgccacgtgtgcaacatcggagatgctcataaaataacccctggcccgaaagggcagtagaaaacggaaatttgttggctggcttggaggatgcttccactgtgttcttcacacgagccccgggcctgcctgttgggccggttgcgcaccccgggcgcgcgctctcccgcgcccacgccgcgcgcaccagcggcggcggctgccatggcgacccgcaggtgagctgcagaggcgcgcgtggtccctgccccacccgcgcggagccagagaggaggcggttgtcaaggcgacgtgggtaggaggagaggacagagggaggaggaaggatgggcggtgttggcgtagccgcagggaggtgactgaagcgagcctggcctcttgcatcctccgcctgtgtacctccctcccctttt

SEQ ID NO: 2133 - DNA, 2300 bp, Homo sapien
tccaaggaaattacaaacctggtttgtgtagaatgattgcatgaagaaaaggaaatttccaaggtggaaggccttcattctaggcatatattagaacattcatagaaaggcttggaatgagtatgaaagcaaaatcatgttttacttcaacacttcaggagtagaaaaaccacacccagagtcaagacactaaggcacctggaagatggtgaactctctgaacctccccaggtttcagggaacttaggttggcagtggttaacctgcaagaagctgtttccgtctaccctccttgctggtcctttggccaggccacttctccctcccttgccccatggggcgggggacgggaagcggcaaacagtggtttctcatcagcacctggaacaggtgcaaagggaagcttgagcagggttggggaactggaaatgacactattgagacaaggggaagggtgagtgtgcaggattttctacttccggcaatatttgtgtggcaatgcacccagggacttgggagtcacagggccatgaagaggccaggagctcagctttcttatgtaactccaaatatttcttcttgctttggcaatttagagaaaggatcttcttcctgtaacgtgcgcccagcttgcacagacaaagattatttctacacacacacggcctgcgatgccaacggagaggtgggtagtacagtcttggagccccttagccccagatggactgtctcccactccctgaggtttgccaccatttggaacttcagcagtcaatgacattggcactagttaaaaccccacagacctttgaggtgaccctagggctaggtggggtggggggcaaaacgagacctcttcattcattttccggtcagaaactgtttttgcagcgtttgtttcactgtttatgcacatatgttctgtttcaaaaacccacttcattctctcttgcttggtttcttctatttgccgagccactccggcagagcctgcctgtccgtacacaatgtcctcccggggctcttcaggctcaccccctcggcactgttttgtgggctggcacggggaatggattcctgcctatggtctgacttgttccgtttctgctgcttctctttcctccaggctttctgcttcagaaaagaactttccctcctagtctacactgtcactgagtcaacaagcattttttgaggctgactgatatgtcaggcctggcactataggctggggagtcagagacgactgaaacaagctcctgcccccagggagctcacagtcctgtatgagaggctggagagaggagaaaaacgggcccagtcaaggcaaccagagggatgtgcagggaactgggggagcccagaagagaagcgaccaggacttggggtgggggcagcagagaaagcctctcagaggaggccatttgttcaacagtcaacaaatatttatcgaggagcgactctgtgccaggcacggtgctaggtgctaggcatgcatcacttaacaaaactgagggaacatctagcccttatggagcttaactcttgttggggagggagtggagagagagataatagacaacaaatgggtatataatatagcaaatggtagtaagtggtaggaaggaaaaaaaaaaaccaggattaggagagagagaatgaaggagggtggtgccactattttagaagggtagggatgtcctctcaggaggtgacatttgagcagagacctgaaggagatgagggaggagccgtggagctttccaggcagcagacacagcaggagaggaggcggcagctgggccaggtgggtggagaaacagtgtaagtgagcagggaagggcttgaggtgcacggagaaggatctggctgagctgtctgtatccctaagctagagattctcaagaggatagaactaggagttgggcattctgcactcagcactaagcatgatgcttggctcttagggagcataaacatttgctggctgggcggctgactgaattctccctttcctaactaagcatgggttaaagtctggtccttaacaatgaatattttgcacagtcatctcttaccaacaccacctcccccacgtatttggggcatcatccccttctccagcagccaagagagaatggctgtgtcttgtcagttgcaccttagactcagttctgtggtgtctggtattctgtatgaccttgtgaacatttattttcattttcttggtctcagccaactcactaataaaaggcagacaattaatcctgctgctcttctccctcctgttcataacatgt

SEQ ID NO: 2134 - DNA, 2300 bp, Homo sapien
aacagtcaacaaatatttatcgaggagcgactctgtgccaggcacggtgctaggtgctaggcatgcatcacttaacaaaactgagggaacatctagcccttatggagcttaactcttgttggggagggagtggagagagagataatagacaacaaatgggtatataatatagcaaatggtagtaagtggtaggaaggaaaaaaaaaaaccaggattaggagagagagaatgaaggagggtggtgccactattttagaagggtagggatgtcctctcaggaggtgacatttgagcagagacctgaaggagatgagggaggagccgtggagctttccaggcagcagacacagcaggagaggaggcggcagctgggccaggtgggtggagaaacagtgtaagtgagcagggaagggcttgaggtgcacggagaaggatctggctgagctgtctgtatccctaagctagagattctcaagaggatagaactaggagttgggcattctgcactcagcactaagcatgatgcttggctcttagggagcataaacatttgctggctgggcggctgactgaattctccctttcctaactaagcatgggttaaagtctggtccttaacaatgaatattttgcacagtcatctcttaccaacaccacctcccccacgtatttggggcatcatccccttctccagcagccaagagagaatggctgtgtcttgtcagttgcaccttagactcagttctgtggtgtctggtattctgtatgaccttgtgaacatttattttcattttcttggtctcagccaactcactaataaaaggcagacaattaatcctgctgctcttctccctcctgttcataacatgtgactgaatgtggctgtctttcctcccttctgccccattctcttccctccctgggctcacgccaaggccttctgggtcagtaccgtgcttgctgcctgaaagcccgggtgtctgccttggcctgaccactgccggggcctttagatgctgggtcagaccaaagcctgtgttcccgccttgcagcacagccaaggcccagctcagaggaggagcactgaagcgtgtgctttcaggagtgcgcatgaacatgcattccccagctgttccttgcagacttctgctttgtgcctcattcccgcactggttctgctcagtctggtgattgagtttgtcttctgaacagtattttaaaatcaagggacacacctcgagctggctcctatgattacatttctgaccttggctgtgcctcagttgtttctcagggaccaggatggcccatccattggggtcagtgaatgtgctgctccaagagctggcccgagacagtttgccagctcctaggactctcctctccctgagactcacaggaggcaggtgaggttcaagcctggggctctggctgtcgcagccctccgcagggaagagggccgagctgagcaggggaaggaggagcccagggctccccatcagttaaggcagtctgtgtccctccttaaggacttgtttcttatcttgaaaaatatggacagaggccttattcatccttcttttcatatgtatggtatctgcacagatcatgttcatcaacccctcagttcaacctataagggcacgtttttgtctgtgactcgatctgagggccacatgggaagaatggagctgcccaccttcacccctgactcagccggggtctcctgcgggtcatctccacttctgtacccaatgcaggggccatgtttcattcatctctgagacaccaggtctggcacatagatgcattaggatttacccaataaataaaagagcaaagaatgtaccactcaaaaaataagtggggacatctcagccaccccctcagtccccgggggacatctgagccacctccacccttgtgcctttctgtgttctgggattttcaccagctgcttttcctgtgaccttggtagcaataagattctacagtggaatcggagctttctctaagacaactggtcccacattctctgtcataaagtcttcattagagctattccttgtcacccaggcaacattcatttggcagatagtgattgaacacaaccatgactcaggcactgggctaggtgcttgggatacatccgtgagccacacaaagttccccaccccagaggagctcttacctggcccagaatctggatctctgcccccagcccctatcctcaaggtagagtcccaaagatgtcctaaatctcacacaggctgagttgtgcttaatccatttctgcagac

SEQ ID NO: 2135 - DNA, 2300 bp, Homo sapien
tcacttcagcctcagaaacacctgccactgttttagaaacttaattggcaatacactttggcggtgccttcaatgacatggaagcagggagcgcccccatcacagaccttgccctcagaaggttttagggaacccaacactttgaggagagtcttcttagatgttttcctccaagactgcagctcctcacccttcctttccactggttttaaatctaataccataggcaggttgaaccaaggagagcacacccagacaagcccctttcctctgcctccctcagggtctctacttagctctatcattgttgttagacctgacctacacttcagggttggcttggcagaggctttttggggagcagggatagtgtaagaggcaaaaaaaaacaaaaaacaaaaaacaaaaacaaaaacccacactcaacacacaacatttctgtgaccagatgcagtggtgaggggccctggggggtaagttcctcagacaccaagcgattctccagtggacattggctaagcattctataattcaattcgattctgattctgacactagctacctggaggtagtgtcagattccatggggtaagggcttgatcccactagactgctcctcttcagatgccaattgcaagtagtagatttcacctatacttcttagcagctataaactggggctcccactaccccctcctttggtctgattaatttgctgagaaggctcacagacctcaaggaaacatttaccagtttattataaaggatagtacaaagggtacaaatgaacagccagatgaagagatggatagggcaaggtgtcaggggtgcagagcttccataacctttctgggcaagacaccctcctggcatctccacatgttcaacaaccctgaagctcatcaactcttgttgttcgagcgtttatagagtttgatgtccagctcctcccctccccctttcctggaggttgaagggtggggatgaaagttccaatcctccaatcacttggtctctctggtgactggccccatcctaaggttatctagggcccccatcctaaatcacctccttattataaactcaggtgttatcaaagagacccattacgtataacccaggaaattcaagggttttaggggctgtgtcaggaaccagggacaaagcccaaatatatttcatattataaataaataatatgatagttagctatgtcacaccctcatctcaggagtccatgacggcggtataagatcaagaaggtcttagcacatctagcttcgagaaggcattggaagtgaggctttaaagtttctgcagagtggaaggattgggggtgggggtgggggaggagatcacctgttcccaaatccttcaaataatctcttgttatcagggagattctttgataactttggcttcactcggcaactagaatatttcatttaaaggtctgaacattataaaatcaaagtatgatacaaaccgttcttcaagacgctttcaaattgacccaagacatgacctcaacaccttatacggcgttcaaatctgcttaatgtccctttggaaaagttttctctcgtctctctctaaaagacaaccgcactttcccaaagctgtgctcttaagagttggtaaagtgacaatttggtttatccaataatcagattaataaaggtataccatttctaaggcacgagagcaggaatcttaagctgaggtagccctgggactaaatatgccatcctcttgtatcaagatggagaagacggccgaggttcagggaaagagcccagtggaagaacccaacctagtgagaggaaaacgggcacctggtgaaggccccggcctctaagctagggatgaggggacaggcctctgcctagcctgagacaggagtaggaaactgaggcattcacacttttatgtggcgatcacagttcctgcagactgtagcagagctggggagcaggaaccagaggtatagtcccacgcccacccactctcccctcccctccctccgcggccccgcctccaaccagccgcttccggtcgcggggagggtcgcctgcgggctccagctgcgcctgcgcaggaagggcgggtcagcgcgccggcgcagtgcggcggtcacaggctgagtgctgcggcgcgatccttgcttccctgagcgttggcccgggaggaaagaagatggtgctggatctggatttgtttcgggtggataaaggaggggacccagccctcatccgagagacgcaggagaagcgcttcaaggacccgggactagtggacca

SEQ ID NO: 2136 - DNA, 2300 bp, Homo sapien
gtagttttccaggcctctaaacactgatccaggggaacctttcttccttactttttttttttttaattaaaatgctgctacataacaaaatttagaaatggcagagggaattatctgctttcccattgacctaatataacaattgtcatcttaaaatattcatgttgggatttttttcatatatatgttgttttcacatacttataattgccatgtacataaattgccttttaacttagcattatttttaatttttatttttatttatttattcattttttgagacagagtctcactctgttacccaggctggagtgcagtggcacgatcttggctcactgcaacctctgcctcctgggttcaagtgattctcatgcctcagcctcccgagtagctgggattacaggcgtcgccaccacacctggctaatttttttttttttttttttttttttgagacggtatctcactctttcacccaggctaaagtgaagtggcatgatctcggctcattgcaacctctacgcaccgagttcaagggattatcctgcctcagcctgttgagtagctgggactacaggcatccaccaccatgcccgactaattttttttttttttgtatttttagtagagatggggttttgtcatgttggccaggctggtctcgagctcctgacctcaggtgaaccacccgccttggcctcccaaagtgctaggattacaggcatgagccattacgcctggccacacctggctaatttttgtatgtttagtagagacggggtttcaccaagttgtccaggctggtcttgaactcctgacctcaagtgatctgcctgcctaggcctcccaaagtgctgggattacaggcatgagccaccgtgcctggccacctttttatgtatcattatatcaaaagtatttttctgtgttactgcatggtcttcatttttatggttgtataatattacataaataatgttacagtgaactttgtcctgtctgaacttttttttttttgcattattttcttcagttgaacagcaaagtatattctttaaggatcataaccactaacctgtaagcaccaagaaagcagagactggtgtccctttttgctccacattggtgtttagtaaacgtctcacaaggattaatgtatgtggctaccagcacaggtttattgcatacctgccagcattgaccattattcatcatggatgagttttctgtattagataagtggaaaatagctgggcacagtggctcacgcctgtaaccccagcactttgggaggctgaggcaggtggatcacctgaggtcaggagttcgagatcagcttggccaacatggtgaaaccttgtctctactaacaatacaaaaattagctgagcgtggtggcgcgtgcctgtaatcccagctactcaggaggctgaggtgggagagtcgcttgaacctgggaggtggaggttgcagtgagccgagattgtgccactgcactccagtctgggcagcagagtgaggctctgtctcaaaagcaaaaaaaagataagtggaaaatattctttcctcttaatttacatttctttgatctctgtcagggaccccattttggactgacccattcctttatctttttagtattctctccccactcccaggcagggattaaaggaaatttttcctgcactattattgatctctttcttgtggtttcttattctagccaaggtcctccccacttcctcttaactggtatagctccttccttccacaggtgattggcaaaggcagtgaaaagtctgatgacaactcctatgatgagaagtacctgattgccacctcagagcagcccattgctgccctgcaccgggatgagtggctccggccggaggacctgcccatcaagtatgctggcctgtctacctgcttccgtcaggaggtgggctcccatggccgtgacacccgtggcatcttccgagtccatcagtttgagaaggtgagtagatgggtcagggtaaggagtggaactttctctgtctccagaatggttagatgagagataggatctgtgttgctgaggcccatcctggctccagcttttcctctcattgcttacctctgtgtttctggggaagtgcatggtggagtggcgtggattatggaccctgaaaccaggctgcggctttaccactcaccagctgtgtaacattgggcataatgcataagcccccagtgctccatttctgcctttgtatgaggaggataacagtaacagtgcctgcctcaccaggcctattg

SEQ ID NO: 2137 - DNA, 2300 bp, Homo sapien
aagctcctgtttggtcaaaggggagggcatttccttgagccatgggtcctcctcctacttctatccatcctgccaggagcacagtctaaccctaatctttcttgctgtacccaaggcccatctcctttcctgtttccccaggggaaaagagaaaagctgatttctcatccttggcctcactgtgtggtcacacagacactccttgggcctggggctgggggatcctctgctgtgacccagtgagagtggcaccactgtgaccgggggcagtggtagaagggagcacctgatccagtgcttttcagatgggttcctccagaccctcaagttgcacagagcagcccagggatttcttggttgggggagtggtggagaggggcaaggccctgaccccctcacttcaacccagcagcactactcatctgttctatattctggccttccacttcagatttcttttgaagaaaagaattctactgctaaataaacatttgagaaccattcaccttattcaatcccctcattttacaaaaagggacattgaggcacagaatttgagcaaggtcacatagctgtggtgttggaggctgggacccaggcccaggcatccccccaggccagggcatccccccagggactacctgactgggcccctggctgctccaggatgtagggaagccttttctgggtcgcctgcacggctcctgcctggctctccgtgtggtccagcttcatgtctggtcctcttggagaacccctggaatcctgcacaccctctcaaatgaagctgccttggagagggtcaggagcccgggtaccaggtaggcctcctcgctggtcacaaaactgtggcggaaggagggggtagccgcaggacatggacagggaggcaggaggggatgagaggccgcctctctagacaggacctcagggggcagtgtaagccccttgtctagaatccaggaagcctgtgttaaagctaggctccaccgcagccggcctccgaatctggtgacagtgtgtttgcaccacctggcttccacccactctgacccttctaatttacttccctggaaaagcccaagtggtgtccaacatgaggctggggtcattcttccaacagcccgaccccaaggggcatgctggtcagacaacagcctcgctggtggggtggaggggacggtagggagcgagtgggcccggtgactcattgtgggtgcttctctgggattttggaggctttgttgtgttgctcagggcccttttaactctgtctgacctatgggaggggacagcaacgagggcttttatgactggaatgaactggaaacttggcctctgagagcccttaaaatgttttggaaacctctaggcatacttagggtacttccaccatgattatcatcggctgtgtggcttccgatcgctaattcgcaccgggcatctggcgaggccggcctggggaaattgggatggagggtcctgctggagggaatcctggcgctttgggcggaggagtgctctgggtggggcccacctcctccagcgcggccggcgttgccgctttaaggcggccgcggcgcgagcaggtctatggtaatgagccgccgccgcgactctgcagagctcgcccgcccgccggggaggcgagggagcgcggggctgggcccggggccgcggcgacaggcagcagccgcggcggggacgcggggcgcgagcgggcggcgcgggaccgtcgggggccgccggggccgggccggggtcggggcgcacggctacgcgggcgcaggtgggcgatcccataggggcggagggggcaccccggctccggaacccggggcccggcaaggccaggggcgccgcggggcccccgggcgcaggtggtgagtgcccggagcgcaggtggaggcgcggcggcagcccgcggtgctcagggtgacccgggagcgggtctggctcagggggcagtgggagcccgggctcgtcggagggtgcagcgcggggtcccgccgagccatccagacgcaggccccgcggggcgcacgggaggcccccggggactggcgccctggcccgggcatgaggcgcggcggggccggcaggagccggaggaggagccgccgccgccgttgacccggccgccggccgggagctgggagagatgcggagcccggccaccggcgtccccctcccaacgccgccgccgccgctgctgctgctgttgctgctgctgctgccgccgccactattgggagaccaagtggggccctgtcgttccttggggtccaggggacgaggct

SEQ ID NO: 2138 - DNA, 2300 bp, Homo sapien
tctgggggcagcccctctgaagtctttgagatcgaccctcgctctggggtgatccgaacccgtggccctgtggatcgggaagaggtggaatcctaccagctgacggtagaggcaagtgaccagggtcgggacccgggtcctcggagtaccacagccgctgttttcctttctgtggaggatgacaatgataatgccccccagtttagtgagaagcgctatgtggtccaggtgagggaggatgtgactccaggggccccagtactccgagtcacagcctcggatcgagacaaggggagcaatgccgtggtgcactatagcatcatgagtggcaatgctcggggacagttttatctggatgcccagactggagctctggatgtggtgagccctcttgactatgagacgaccaaggagtacaccctacgggtgcgagcacaggatggtggccgtcccccactctctaatgtctctggcttggtgacagtacaggtcctggatatcaacgacaatgcccccatcttcgtcagcacccctttccaggctactgtcctggagagtgtccccttaggctacctggttctccatgtccaggctatcgacgctgatgctggtgacaatgcccgcctggaataccgccttgctggggtgggacatgacttccccttcaccatcaacaatggcacaggctggatctctgtggctgctgaactggaccgggaggaagttgatttctacagctttggggtagaagctcgagaccatggcactccagcactcactgcctcggccagtgtcagcgtgactgtcctggatgtcaacgacaacaatccaacctttacccaaccagagtacacagtgcggctcaatgaggatgcagctgtgggcaccagcgtggtgacggtgtcagctgtggaccgtgatgctcatagtgtcatcacctaccagatcaccagtggcaatactcgaaaccgcttctccatcaccagccaaagtggtggtgggctggtatcccttgccctgccactggactacaaacttgagcggcagtatgtgttggctgttaccgcctccgatggcactcggcaggacacggcacagattgtggtgaatgtcaccgacgccaacacccatcgtcctgtctttcagagctcccactatacagtgaatgttaatgaggaccggccggcaggcaccacggtggtgctgatcagcgccacggatgaggacacaggtgagaatgcccgcatcacctacttcatggaggacagcatcccccagttccgcatcgatgcagacacgggggctgtcaccacccaggctgagctggactatgaagaccaagtgtcttacaccctggccattactgctcgggacaatggcattccccagaagtccgacaccacctacctggagatcctggtgaacgacgtgaatgacaatgcccctcagttcctgcgagactcctaccagggcagtgtctatgaggatgtgccacccttcactagcgtcctgcagatctcagccactgatcgtgattctggacttaatggcagggtcttctacaccttccaaggaggcgacgatggagacggtgactttattgttgagtccacgtcaggcatcgtgcgaacgctacggaggctggatcgagagaacgtggcccagtatgtcttgcgggcatatgcagtggacaaggggatgcccccagcccgcacacctatggaagtgacagtcactgtgttggatgtgaatgacaatccccctgtctttgagcaggatgagtttgatgtgtttgtggaagagaacagccccattgggctagccgtggcccgggtcacagccactgaccccgatgaaggcaccaatgcccagattatgtaccagattgtggagggcaacatccctgaggtctttcagctggacatcttctccggggagctgacagccctggtagacttagactacgaggaccggcctgagtacgtcctggtcatccaggccacgtcagctcctctggtgagccgggctacagtccacgtccgcctccttgaccgcaatgacaacccaccagtgctgggcaactttgagatccttttcaacaactatgtcaccaatcgctcaagcagcttccctgggggtgccattggccgagtacctgcccatgaccctgatatctcagatagtctgacttacagctttgagcggggaaatgaactcagcctggtcctgctcaatgcctccacgggtgagctgaagctaagccgcgcactggacaacaaccggcctctggaggccatcat

SEQ ID NO: 2139 - DNA, 2300 bp, Homo sapien
ggtccagctcaccttctctgcaggtgatcacagttgccccccatccttgcccatcttccaaaggccccaagtcttccagcccctgaccccaagccacatactctatcagccaaatctgggcccagccccagccactggcaccccaaaccctgccattcctagccctcgtcaggcattccagctcacctggtcctttccccaggggagtcaaccaccacggtgtccccattcgtgcccggaggagtcagtgatggccagtggcatacggtgcagctgaaatactacaataaggtgggtgtggagggcacagagggttgggggttctgttcttgcctcaggtgcttacccagccctgagtggcattgcctccaggcttgggtgggctggtcagggcatttctggctgagaggaagggagcggctgggaaggtgccaccttgctgggcattcccaccccactgggcactgctcgatgctctctgttccactaggcagccgcaaacttggacactgaggaaggtagttacatgcataaaccacgtgagcacacgtgtgtgtatatgcatgtgtgtacgtgtgtctgggcatgtgggtgcacacagaggcacccagtgtgtgctggccatgaacctagtgggctctgtactcagtgtcccccttctctgctctttcctgtccacagccactgttgggtcagacagggctcccacagggcccatcagagcagaaggtggctgtggtgaccgtggatggctgtgacacaggagtggccttgcgcttcggatctgtcctgggcaactactcctgtgctgcccagggcacccagggtggcagcaagaagtgagcaggggaaagggccagggatggggtgaagtgagggcagggccaggcagggagggaaggtggagagggtgggcttttggggtctctctccctttgcctctcttagcccctgctcagccctggggatggggtcaagactggggaatcagagcaaggccctgtggggcagtctggggagggggctgagtgttcgacaagaacagttccaggtaggggtgacgcccttcctgagcactgctctgcagggcctcttggacacctgcctacgccgttcgtgtctctggcctggcggcagagcgagcggaggaccagaagctcccagccctcccttgtgccgccaccatctttgctcccccaggtctctggatctgacggggcccctgctactaggcggggtgcctgacctgcccgagagcttcccagtccgaatgcggcagttcgtgggctgcatgcggaacctgcaggtggacagccggcacatagacatggctgacttcattgccaacaatggcaccgtgcctggtatgggggcccggggtggagccaggctgggatcccagtgctgagaggaggggctgtgcctggtgtgaggatgccagaatggagggtctcagaggcctctctaactgctgccacaggctttctctttagagccccagctcaggtccactgagctgccttctctccattccaggctgccctgccaagaagaacgtgtgtgacagcaacacttgccacaatgggggcacttgcgtgaaccagtgggacgcgttcagctgcgagtgccccctgggctttgggggcaagagctgcgcccagggtaggaggggcggctgttagaggccacagcctgggtgccatcaacagtctgggaactggcagggttggggcaggcactgggcagggctctgctgagcggggctgtgggtggaaaagcgtgtctgggcagagccctgaaagggcaacacaggagacaaaggggccagtcagaggcaggcctgggcacagcgtggggcggtcccagggcaggtacgcactttggagggcggggctgatgaggggagtgggctctgcctcccgtgcagccgccaccgctgagcatcacagccccagggccctctgaggctccacccgtcacagtctgccttttcctgcctccccagaaatggccaatccacagcacttcctgggcagcagcctggtggcctggcatggcctctcgctgcccatctcccaaccctggtacctcagcctcatgttccgcacgcgccaggccgacggtgtcctgctgcaggccatcaccagggggcgcagcaccatcaccctacaggtgatgcatggaagggcggctggccctggcctggccatagggccctggtagcctctaggcggctggacagaagtggctgggcaggtcctgggcaggggtggggacatatagaggccgctggatccgtt

SEQ ID NO: 2140 - DNA, 2300 bp, Homo sapien
cgctccgtcctgtctaggctgagcggctacagcggaatgagtcaggcctagactcagggcgctcccagcagctagccctgctcctgcgcaacgccacgcagcacacagctggctacttcggcagcgacgtcaaggtggcctaccagctggccacgcggctgctggcccacgagagcacccagcggggctttgggctgtctgccacacaggacgtgcacttcactgaggtggggcttggaggatgcagggctggctggttagataggggtcatggtgagtgagcctgctcatggcaacctggggggcagagggggccctcccatcccacctacaaggagctccctgctggcaggaggcctccatgaaaccctgtgacccctggcccagccctcttcccaacccttctcatagtaacatatgtgtgttggggcatggtctgacccagagcagaggcctgcctgtggtaccatgggctgggaggaagcagtatctcaggacatgtgtgtgggtccaggcacagggctgggaagctcttatgtagagaatgaggaggagggcttaggggcagagcatccagtgacctgagtgggcagtgcggtccaggagcatttcaggggaggcaacagtgagcacagagggaggggcctggtggggagcagggactggcccgggcacaggccggggctccatggtggggatgtcaggtgtgggttgtgagcacacccaccgtgaccttgcccaccccagaatctgctgcgggtgggcagcgccctcctggacacagccaacaagcggcactgggagctgatccagcagacagagggtggcaccgcctggctgctccagcactatgaggcctacgccagtgccctggcccagaacatgcggcacacctacctaagccccttcaccatcgtcacgcccaacattggtaaggctggtgcctgggttggggaggggtttgtggagggagtccccgacaagagcggctgtgctggggtcctgcctgcctcacaggtccgatctgtgaccatccccttccttagtcatctccgtagtgcgcttggacaaagggaactttgctggggccaagctgccccgctacgaggccctgcgtggggagcagcccccggaccttgagacaacagtcattctgcctgagtctgtcttcagaggtcagtggtggccatggattgagttgggagctggaccccagtgtctgtgcagactccacagagagcagggcccagctaagtgtgacagtgtcccctcccagagacgccccccgtggtcaggcccgcaggccccggagaggcccaggagccagaggagctggcacggcgacagcgacggcacccggagctgagccagggtgaggctgtggccagcgtcatcatctaccgcaccctggccgggctactgcctcataactatgaccctgacaagcgcagcttgaggtcagcagctaggggacaggtgtgggtaggggtatgggtcgggcggtgagtgctgaggcatggagggggtcgggggcgtctccccagtcatgtgactgccgtggtgactgtgcacctgactgccccacatcagagtccccaaacgcccgatcatcaacacacccgtggtgagcatcagcgtccatgatgatgaggagcttctgccccgggccctggacaaacccgtcacggtgcagttccgcctgctggagacagaggagcggaccaagcccatctgtgtcttctggaaccattcaatcctgtgagcctgcactgccctcgccccctcaggcttcgggctgaaagtccaggcccctgcatgcctcaccctccttgtctccctgaccctgccttcctcacacagggtcagtggcacaggtggctggtcggccagaggctgtgaagtcgtcttccgcaatgagagccacgtcagctgccagtgcaaccacatgacgagcttcgctgtgctcatggacgtttctcggcgggaggtcgggcccacaggggcagctgcagagccgtgggtgggcacccagggcacggggctgggtgctcaggtcctgcccttcctaattccctggccccctgccacctactctgcagaatggggagatcctgccactgaagacactgacatacgtggctctaggtgtcaccttggctgcccttctgctcaccttcttcttcctcactctcttgcgtatcctgcgctccaaccaacacggcatccgacgtaacctgacagctgccctgggcctggctcagctggtcttcctcctgggaatcaaccaggctgacctccct

SEQ ID NO: 2141 - DNA, 2300 bp, Homo sapien
cacctacctaagccccttcaccatcgtcacgcccaacattggtaaggctggtgcctgggttggggaggggtttgtggagggagtccccgacaagagcggctgtgctggggtcctgcctgcctcacaggtccgatctgtgaccatccccttccttagtcatctccgtagtgcgcttggacaaagggaactttgctggggccaagctgccccgctacgaggccctgcgtggggagcagcccccggaccttgagacaacagtcattctgcctgagtctgtcttcagaggtcagtggtggccatggattgagttgggagctggaccccagtgtctgtgcagactccacagagagcagggcccagctaagtgtgacagtgtcccctcccagagacgccccccgtggtcaggcccgcaggccccggagaggcccaggagccagaggagctggcacggcgacagcgacggcacccggagctgagccagggtgaggctgtggccagcgtcatcatctaccgcaccctggccgggctactgcctcataactatgaccctgacaagcgcagcttgaggtcagcagctaggggacaggtgtgggtaggggtatgggtcgggcggtgagtgctgaggcatggagggggtcgggggcgtctccccagtcatgtgactgccgtggtgactgtgcacctgactgccccacatcagagtccccaaacgcccgatcatcaacacacccgtggtgagcatcagcgtccatgatgatgaggagcttctgccccgggccctggacaaacccgtcacggtgcagttccgcctgctggagacagaggagcggaccaagcccatctgtgtcttctggaaccattcaatcctgtgagcctgcactgccctcgccccctcaggcttcgggctgaaagtccaggcccctgcatgcctcaccctccttgtctccctgaccctgccttcctcacacagggtcagtggcacaggtggctggtcggccagaggctgtgaagtcgtcttccgcaatgagagccacgtcagctgccagtgcaaccacatgacgagcttcgctgtgctcatggacgtttctcggcgggaggtcgggcccacaggggcagctgcagagccgtgggtgggcacccagggcacggggctgggtgctcaggtcctgcccttcctaattccctggccccctgccacctactctgcagaatggggagatcctgccactgaagacactgacatacgtggctctaggtgtcaccttggctgcccttctgctcaccttcttcttcctcactctcttgcgtatcctgcgctccaaccaacacggcatccgacgtaacctgacagctgccctgggcctggctcagctggtcttcctcctgggaatcaaccaggctgacctccctgtaagatgctcctactgcccagaaactgtccccaccttctcaggccgcctccccagcccccactggcaacccctgctcctgcaccatgaactctaataaggtgcctagtgcagcacctggcccagggtttcctcttctgtggctcccccgggatcccccagcacctgcctctggcccaggcttccctggaagcagttcccaacacccaggccctcctccatgcctgacccgaagcagagcctgtgctctgggcgggccccggtcgctgacctgccctggcctgggccctcagtttgcctgcacagtcattgccatcctgctgcacttcctgtacctctgcaccttttcctgggctctgctggaggccttgcacctgtaccgggcactcactgaggtgcgcgatgtcaacaccggccccatgcgcttctactacatgctgggctggggcgtgcctgccttcatcacaggtactcccacccattcccagtcttggggtcccacatccctgggtccacctttgtgccatgttctctccacccacatacaggccctgaggccccacatccccatgccccaggccgccttattcacaggtgtccctctggtttaacccagactctgcagccgccacccaggcgtcactcccttatcctggggagatcggtaggggccgatggtgggcagaacccttttccatgcttcatgcctggccctgtgagcccacctgcccgcagccctacttcccaggcccctcatcacccctccactgctcccgtctgtctccatgctccagggctagccgtgggcctggaccccgagggctacgggaaccctgacttctgctggctctccatctatgacacgctcatctggagttttgctggcccggt

SEQ ID NO: 2142 - DNA, 2300 bp, Homo sapien
gattattcataggttttctgggaaaggagcatgatttcctggaactgaaggctcctctcccttttataccatatagacgttgccatagcatttgtaaactgtcaggacgctggcaggagtgtcttttagcatgctaatgaattacaactagcatataataagcagtgaggatgaccagctgtcactttctttttttttttttttgagacggagtctcactctgtcgcccaggctggagtgcggaggtgcgatctcggctcactgcaagctctgcctcccaagttcacgccattctcctgcctcagcctcccgagtagttggggctacaggggcccgccaccacgcccggctaattttttgtatttttagtacagacggggtttcaccgtgttagccaggatggtctggatctcctgacctcgtgattcgcccgcctcggcctcccaaagtgctgggactacaggcgtgagccaccgcgcctggcctactttctttaccatcttggtttctggcagatttggccggcttctttactgcaccgttttattagagggatgtttgagatctgtatcttgtgcggacctgctgtctcctcctgttgttaccagaaaggggtccggatccagaccccaagagagggttcttggcccttgcataggaaataattcagggcaagtccataaagtgaaagcaagtttattaagaaagaaaagggataaagaatgcctactccagaggcagagcagcccggagggctgctggttggccatttttatggttatttcttgattatatgctaaacaagggatgaattattcatgagttttccgggaaaggggtaggcaactccctggaactaagaattcctcccctttttagaccatgtagggtaatttcctgatgttgccatggtatttgtaaaccgtggtgatgctgtctggagtgtcttttagcatgctaatacattataattagcgtataatgaggactgaggacctccagaggtcagtttcatcgccatcttggtttcggtaggttttggctggcttctttaccgcatgctgttttaccaccagggtctttgtgacctgtatcttgtgccaacctcctatctcatcctgtgacttagaatgcctaacctcctaggaatacagcccaggtctcaaccttattttacccagcctctattccagatggagtcgttctggtttgaagcctctgacaagttcactggtggcccgggcaacatttagaaacaacagagacaacactcctaacaagttggtttaagcattttacaaatactgcttttagttcagagggggctacttacaaacaccccctctaaatcccctaagggcacacggtagaaaacgccttcataattatcctcgtaacaccgtaactgcgaggaccaacatcctcctttcacagataagcgaagagaggtgaaaagagggcaaatatactcaaggcagccgcctctaaaccgaaacttgggttctgaggtcagttaaacttgggttgcatttgaacctaagcctgcctgcgtgaaaagcccgttgctttctttgcacctcagctgcctcaggttcttgaagaggcgatggaggatgtacttctaagagaacctcaatatacctacaatataagtgtttaggtgctcccttaacttggaaaaaacccacaactgaggaacctcggccaatgcggcgcctgcatattgagtgcgcccaagaaaacgaatttcctcccgtagagcgtcggttagcggccacgttaggcagcacaaccgttctggagactgggtgctcggcggcccagcagagggagcggggcggggcgcgagttccatactcgtgggtccgtttcttccctcctggccagccgcgctctgctcccatctgcctacgggaaagagagtctccgcgcacgcgagcacgcgcactcgcagcctcaaccctcggctccgccaccgggatgcagtcttctgggaacggttctcccccagcccccaccggctgacttccggccggcagctcctcagcccctccccctgaggattcaccaatcacggtgcgcgtgtggcttgagtaggtggggcctgagagattcgaaaggagccccgccccctcggagctgattcccgggactaggttgcgggagaaagcctgttgcgtggaagataaggcggcgcgggaagtggacacagggtgggctggaggtgtgcttcgcgtgtgatgccaggggagtggaaaggtggcttggggagtgcagaaccctgaggatagtggcgggga

SEQ ID NO: 2143 - DNA, 2300 bp, Homo sapien
catctgctcctcttacatttctcttgctgttcttacgggccctttcttgtccctttcatttaaggacctttggagagttgcagccttcctctcttgcaaagcatttaagagaggttcctgcccacccgtctggaaccgttagccatcctaccctgctagcctggggcaatattccatgtaatactccagcaccttggtctgaagatgacagggcaaagcccttgttcctgaggcccatctgatgggcgagttcctaccccaggacattatctaagatcgttgttttatttgaaggaattctatctaacatggtattccaagatttcctgcgccagagtcactaggttggtttttttaggtgcagatttctggatagcaccccagacctattgaattagactttctgatgggcaaaccttaggaacctgcatcttaaagttgattctttacaccttcgctccaacaaagggctaagactcagcctgggccaatttcctcaccaaaagatgggttacgtgttgtgtaaaagggggtgtatttggggtctcctggctaggagactgtccacacttacggggccttggctgggtcaagcaggaaaaatagttcagaaagaccttcaagctagttctgatatggcaaaaacccagtcttctgccaaccaaatcaaccccataggccatccaaggccccaataaacagattgtcctgggccttagctcctataccagttacaaagaggctgagcttctgtcaccccaagataacacaggctcctgggatcttaccaattaccccaaaattgaaggcaaaaatgagtaagaagtcagtccatttgttcaactgcacccattttttttccatgaaaaaaatacaggggtgagtagggggctgtgggaaccctatactttccactcagctttgccgtgactctcaaactgctctaaaattaaagcattttaaaatgcagagggatgctggcttctggagataagaaggtaggagtatgataggtggcagtgtccatggcatgtacaacacgtatagaaagatggtttgctaagtctggaaatcatgtaggacctgtagtatgtgactagcacctgctgtgagctggccactttcctatagattgtatcattttatcctcaacacaatcatggcatcatcccttgtttcatagactgggacttgagactccgagtcggccatttgcccagagtcccagctggtgagtgagtggtacagccagaagtcacacgcaggtctctgagctcgcctccctccaccactgctgcctctccctttatttgtacttcatctaataggcaaggcagccattgacagctctcaaagggggaagtgctggcctgacctaaaaatagcttacatttatcaagcacttagtcggctacactctgctaagcactttacagagattacctctttaatcctcacaacgaccctatggttataattatctccattttacagatgaggaaacagactgaagagagactgtgaggtgttgtgagtcacacagctagttggtgacagagccccaagtggcacctgggcagccagtgcgagtgcagtctccacctaccactgcgctgtgcccgctgcccccggggagcgggggaggatgggacaggccctgtaaaggtcgagttgataagactttacaattcattgaatgtgggagcagagggagaaagagcagttcaggcgttgctgtgagtcagctaatcctgggccccttctttgggacctgaatgccccacgggatgaactggaggtcaggagcagagatgtcactcaaccctccctacagaaattagaggtcccttttggatggtgtgttcaagctctccctccctggtgctgtggggggtgtcatctctctcccgagataacagggacacctcagtcctcctggggctattctgggctgctgtctgatcctcctctctcccccaacccctacttcagcctttctgctgggcgtagctgagtggggagggccagcccagttacgtaaccctgtggctgggacccgggaggccagcctgggagcaggtgctcagcccctccctcatcaccagcagtgaaaatctagagctggagctcagcctctgggaaggcccagcatggaggcagccacagctccggaggtggccgcaggatccaagctgaaggtgaaagaagccagcccagcggatgctgaaccaccccaggcttcacctggacagggggctggcagccccactccccagctcctgccccctatagaaggtgac

SEQ ID NO: 2144 - DNA, 2300 bp, Homo sapien
tttgtagaatattaaaacaagctttcttaggttaaagaagtgatcttactacgaacagcaatggtttcatgatgtgtaattgctttatgttatctttctgctatagaatgtttcctggagaaaggtacggtttttagtaataagataaatttactttagtcctgcaaataaggtgaaatcttatgtccagtatctcacaaaggagaactgacagtgccacttttatatttaatgtcaatctcattagacaaaaatgaaatatagttcctagggtttccaatttaaaaagtgaaataataaatatattcactcaaacattttctcagtgccatatgcaagttaccatgtcccagaagctgatacagtttgaagaaggaaatatataagtactgtaagcctgtgataactaaaagcaacatactaaaaagtgaaggtacagataattggaacaaatttaatagcgtttaaaagtgtatttggtaatttctccaggaggtggcactgttgagttgttttttcttttcagacagtaagacaatagaccattcatctttgtgtcacccaaacaaagaaatattcctttataaccccctttcctccccccacctaatcacatgctactggaactgactgtcttgtgatctactcccatagttggcatagatttaaaaataatcttttttaaattaatctgatagtagttatggaaaggaacaaattgttcaccaattttcatcagctttatcttttcagtccagtaactgagaacttaaaaagactattctagtgattttactatcctgctcagatggcattcaaaaacatttttcacttctcacgtcttggaaaaatttgtaaattcgttaagtctttttgtttgaaagttaatgtgactggaaatattttaatgtaaatatcgggttgggtgcattgtatcattttgctctacaatgactatatcctcatttgggtttatggccagtttataattaaaagtaatctttacttgctttgagtgtaatgacttgcatattttgtatctttctatttgctaccttttctactgaacaatttctagctttctgaagggatggagtcagtaagcttaaggattcagaactggttttacctgtgctacgtgttgtagaagttgtgtgtgcagcttctgcggtaaagggaacagcgtaggggttttattttattcattagaggtggatcggggtgctaatttagaggacatcacatactggaaccaaacttgtccgaagctctcactgcagagttaaggcactttggtaaaataaatgtgcatctaggaaatgatcatgtgtacagtaggcattggatcattctcttgcccctcttttacctgcccctaatgcctaagctacattcgaagtcctggaaaacctgtaagtaattccgcctttggcctacctcccctcagaagaggaaggtgagagaggccaaacgtatggaaagactattcttcaggcttgcaggagtcacggatgtcctgatgtctgtctccgtaggatgtggcccacatcagttcgcattcaccttcttgcagcaaggcagctgcttagcagacaatgggcgctccagtgagcggggtttataaaaacccgaagccccggttcatgatggagcccccttttccagctgagcaagctcagggatttcctgggtaggtttttccaggctctgcctcaccgaaggaattttaggagtgtctctggggaacaggagggacgtaacccagccccaacttgagggcgctagaggtgcggcaaggggtcgcgacgccaggagcccggggctcggcgggaaggtatgagaagctcctacgtgaactccacaagccgggcccgggagacgccgggcgaggcggggttgacctcagcagtctctgccccgttccagccaatcagtcccgcatcttagcatccgaatccaggacccccgaagccggaggcgacgcgagccaatgaggagtgggccggggaagagggacaggcggccagcctatggggcggagaggcccggccgcgcgtatccaaggagcgccgcgctcggctcgggggtgtggcgcgcgccggcgggggtgggcgggcgcgccgggcggcaggtgtcggcgtcggcggcattcggcggcgatggagcggccctggggagctgcggacggcctctcgcgctggccccatggcctcggcctcctcctcctcctgcagctgctgccgccgtcgaccctcagccaggaccggctggacgcgccgccgccgcccgctgcgccgctg

SEQ ID NO: 2145 - DNA, 2300 bp, Homo sapien
acctcgtgatccacccacctcggcctcccaaagtactgggattacaggcgtgagcccctgtgcctggccataaaagaacttctaaagagcagctgtagtgaatttacgaccaagacttttccatagaaaataactgataaggtgaaaaaaaaaaaaagcttgtcagaaagctgacaagaaagctaaaaattaccattcttttctcagaaatctaacagatcccagaggattgctacttggagttcttcctcagttttattagtgctaaacatctgattggccagggatgaccaaactaaactcctactgaatccatgaaggaagtcagaaaataaagggtggggaaaactaatcttggttaatactcaaaaggcttatttttacatttcctgcacctttgaaatgccttggtgacttacaaacctaatctaggaccaagaatgaactttactggagagatacaggccttgagaggttaaggacttgactagtggtatcacattaacaactggaaatgagatgctggcatttccctttccagcatatactgcctgataaatgatttctttcccccgactccagctttaaggtgtaagtgacaaatagaaattgttcatgtttatggtatacaacgtgacgttttgatatacatatatatacacacacacactgcaaataattaaatgaagctaatcaacataatccatcatctcacatactttcctgtggtgagaacatttaaggtgtaccctcttcacaatttcaagtacacaatatatgattattaactatagaactcatccaccttctctgactgaaactttgtatcatttgaccaacatttccctatattccccacccccgtgccaagacttcttacttgcctttcttgaacaaatacttgaattacagtgttattacgaagctgcaaagttgctcctcaagcaacttattgaagggaagcaagaagcgtcgaaaaagaaagcgctttttttttttttttttttttcggatagggtttggctgttgcccaggctggagtgcaatagcacgatctgggctcaaagaaaacacttatttttcacaaacaacagaaaaagcagtgaatattttgaagtctggatcctgaactctaggttatttaggtctgaaacctgtactagggggaggggtgcaagaaagagttgataaaattaccttaaccatgtggaaactttaagactttcttacatactaacccctcgccccccacttttctcaataaacgagccaaactggctgaaacgaagggactcgtccgcggcgccggctcagacccactgtagccgactcattaccgcccaaagtcctggagccctcgaccgggcatggagaacaccgtggaggaaccctaagagagggaatcctgcgaagagaagtcaggtggtggccttgccggaaacgggaccaaagtcctctagctgggattacgggagccggcgagggacctattatgtcagggttcagacaacccagctctgcatgcaagcctttccaattgccagtcttggggcgggctcacatcttctctacaaggcgaactcactacacgccttgggtgcctatcgtccctagcaaccacccgcgatttaaggcggaagtacctccctggtcctcctcctcctccggaccaaccaagccctcgtgaggaagcgcgttggcccaatcacctaggcgggaactactaccagccaataggaagcaggcacaggagggcgggctaaagaggtcgcggtcgcacgcgcagttggtccttagtactgcggccgtgtgggtgagttggctgccggtgagttgggtgccggtggagtcgtgttggtcctcagaatccccgcgtagccgctgcctcctcctaccctcgccatgtttcttacccggtctgagtacgacaggtccgtgcagctgggggacgtcgggtgggaattatgggtgggcaggcccgggacctggccgcgcggcctgggttctgccgtgtcatggggctccccaggaacccgagactggccggacctggggatgttatgccctcctcaggcgcccgccgtccttccccaagctagaccacatcggcggcacttgtcctaccgctgagtcacccctgggtcctaactcggtgcggaagcgagaagctccggctggtgcttggtaaagaaggcgtgaggagccggaactcctaccttgaacccggagaaggccaagggtcactctttgctccgttcatcttttcgtgcctagtatgactgccttgaacaaacaaacaa

SEQ ID NO: 2146 - DNA, 2300 bp, Homo sapien
ttgatagggtctgcagagcaccatggaaccctgggtgctcaggaaatattatgctaaagtacctacgtagtaaaataactccgttttttttggtttttttttgagatggagtctcactctgttgctcaggctggagtgcagtggtgagatcttggctcaccgcaacctctgcctcccaggttcaagcaactctctgcctcagccttccgagtagctgggatcacaggcacccaacatcacgcccagctaatttttgtatttttagtagagacagggtttcaccatcttggccaggctggtcttgaactcctgacctcgtgatccacccacctcggcctcccaaagtactgggattacaggcgtgagcccctgtgcctggccataaaagaacttctaaagagcagctgtagtgaatttacgaccaagacttttccatagaaaataactgataaggtgaaaaaaaaaaaaagcttgtcagaaagctgacaagaaagctaaaaattaccattcttttctcagaaatctaacagatcccagaggattgctacttggagttcttcctcagttttattagtgctaaacatctgattggccagggatgaccaaactaaactcctactgaatccatgaaggaagtcagaaaataaagggtggggaaaactaatcttggttaatactcaaaaggcttatttttacatttcctgcacctttgaaatgccttggtgacttacaaacctaatctaggaccaagaatgaactttactggagagatacaggccttgagaggttaaggacttgactagtggtatcacattaacaactggaaatgagatgctggcatttccctttccagcatatactgcctgataaatgatttctttcccccgactccagctttaaggtgtaagtgacaaatagaaattgttcatgtttatggtatacaacgtgacgttttgatatacatatatatacacacacacactgcaaataattaaatgaagctaatcaacataatccatcatctcacatactttcctgtggtgagaacatttaaggtgtaccctcttcacaatttcaagtacacaatatatgattattaactatagaactcatccaccttctctgactgaaactttgtatcatttgaccaacatttccctatattccccacccccgtgccaagacttcttacttgcctttcttgaacaaatacttgaattacagtgttattacgaagctgcaaagttgctcctcaagcaacttattgaagggaagcaagaagcgtcgaaaaagaaagcgctttttttttttttttttttttcggatagggtttggctgttgcccaggctggagtgcaatagcacgatctgggctcaaagaaaacacttatttttcacaaacaacagaaaaagcagtgaatattttgaagtctggatcctgaactctaggttatttaggtctgaaacctgtactagggggaggggtgcaagaaagagttgataaaattaccttaaccatgtggaaactttaagactttcttacatactaacccctcgccccccacttttctcaataaacgagccaaactggctgaaacgaagggactcgtccgcggcgccggctcagacccactgtagccgactcattaccgcccaaagtcctggagccctcgaccgggcatggagaacaccgtggaggaaccctaagagagggaatcctgcgaagagaagtcaggtggtggccttgccggaaacgggaccaaagtcctctagctgggattacgggagccggcgagggacctattatgtcagggttcagacaacccagctctgcatgcaagcctttccaattgccagtcttggggcgggctcacatcttctctacaaggcgaactcactacacgccttgggtgcctatcgtccctagcaaccacccgcgatttaaggcggaagtacctccctggtcctcctcctcctccggaccaaccaagccctcgtgaggaagcgcgttggcccaatcacctaggcgggaactactaccagccaataggaagcaggcacaggagggcgggctaaagaggtcgcggtcgcacgcgcagttggtccttagtactgcggccgtgtgggtgagttggctgccggtgagttgggtgccggtggagtcgtgttggtcctcagaatccccgcgtagccgctgcctcctcctaccctcgccatgtttcttacccggtctgagtacgacaggtccgtgcagctgggggacgtcgggtgggaattatgggtgggcaggcccgggacctg

SEQ ID NO: 2147 - DNA, 2300 bp, Homo sapien
agaattggataatggatatttctggggaggaaggagggagggagtgacatgaggtgatatacaggttttcaattttatgcatttttttcttttttaaagaatggatttaaagaaaataatggatttgagacaaaaaagagttaaagattaacaaggctggttggtgtgtaagtggatttttgttgtgttattctgattcttttttgattgtgttgtattctgtatgtatattgttgaagacattggtaatgtgtatgtttttgtgtttgtgtagtgtggcattcacatatatcacactatttaatttttatgacagcttcgtgaagtgagtggaacataaattattatccctattccatagaacaggaacctaagacggcagaacaatttttaaactgtggactggggactgggctaagctgttccttgcttagtctagatttgcatggaaatccactggagaagtttccttcaagtccatgtggcctgatccagcccgagctgccttcctcacgtctctctctaaatcccaaggctctgggaaggcacttactcaatagggaagcgacttgtatagataatagccaaatgtttgttcaaaaggcattcattctgatgtgctggggggagcggttgggggggcggacctgcaggaatgacttggatgagacggatacatatttacaagccagtgcacaggaatttgtccttggacaaatcacttaaccttttactacttatatttatgctctcgtaaaccaagtgtggaatattctcaactgctcacccctgccaaatgcttttcaaaagttagagaccaagttacagttaaaaaaatgcaacgacttcaacccaaccagtcccttcccttcccttcttcccttcccttcccgttctttttctttctttttttttcctctctctctctccccacttctgtctgccttttttctttttctttttttcttttttttgacacagtcttgctctgttgtccaggctggagtgcagtggtgcaatctcggctcactgcaacctccgcctcccgggttcaagtaattctcgtgccttacccttcggagtagctaggagtacaggcacgtgccaccacgccctgctaatttttgtatttttaatagagacagggtttcaccatgttggccaggctggtctcgaactcctggcttcaagtgatacacccgcctccgcctcccaaagtgctgggattacaggcttgagccaccgcgcctagccagacgtcaacttttcagtacgtttcaatatattctttgcgcctcattcctcaaagaccttttttcactctcatttaaatggtaatgaccattttaaaggagattaagtttctacttgttaaagattaataactttttttttggagacagagtcttggactgtcgccagggctggagtgcaatggcgcgatctcggctcactgcaacttccacctcccgggttcaagcaattctcctgcctcagcctcctgagtagctgggattacaggcgcacatcaccacacccggctaattttttgtatttttagtagagacggggtttcactatgttggccagactggtctcgaactcctgacctcgtgatcttctggcctcggcctcccaaagtgctgggattgcaggcgtgagccaccaagcctggccaataacttttaaatcactaacatacaaatgtcttttgttgttttaaaaaaaaatcaaaacaatacctagctagacaggataaaaaatcagcagcttatattctatcgcccttttgtcggtactggcggtatgttaatcgtgaggcttagaaccttgtttcacagccctgatcgtgccttttgagaatcttttacgttctggatattctggtatggaagaggagaaaaaccggcgctgggcagtttgcaatccaggaaaatagggaaggataaacctgaagcctgtgcgtccaggtgcgcctggctagggtttccgacggccgcggtgtctcggtggggaccggtcccggaggcttcggcgaggaggacccggagtcccccccgccccgcggcggaactaaccacggaggcctctggtccctttaaggtgcccggcgagcggagaaagggagcagagggggcgggaggagggttcgggagcgcacgccacgtgacccggcggccaagttcgctgcgagtttgacagaagtttgaatccgagtcgggggctttctgctgccggcggggcaccgcggcggccgcagcctctgagagcacgaacagcagcgcccccgcgtcccagcc

SEQ ID NO: 2148 - DNA, 2300 bp, Homo sapien
gctggcatcactgctttgcaaagtggggcctgaggtagaagaaggtgtctggtttctccagctgctgtaggaggctaatgggcagggtacttgccctttgtcccactagactctaacccagcaccagggtgcccacctaggacctttcctggacatgagtttccttcactatcatagtcatgagcctcctacttctgggattgcagatcaggggtggggggagaatgttgcatgttgttttctggtgcttgttattatatatttgaataaacagtgctgcaagtacttgccatgaaggatctgagactggagtccttccggggatttattttttcttcctctcccttgctttaagttcttgaaccaatatcaggactttcaccaagatatcattctactgctttccactgtgcaccccaagcaacaaagtcagactctgttgcttggggtgcagagaggagagcagttattcctagcaggctctggtctagtgacatctcctcttttggtggcacccaattagaccaaagtaactgggactcattagcaattctggagcaaactcaaaaggtgagagatagtggcttccacaaagctgtttccatttgttctcctaccatctgtgacccaaacaggcttcctgtcaggagttgagggccatatgcttcactttcttaactatcagcttcttgttgaacaaacttgcacctctatccctcttcagagagtcacacactacatttacatcccctagaaaaataccttgggtacaattgaacatttaatttttacctgattcctggatgccctagggatcatctgtgggtctcaggttgagattccctgccctcagagattattcttgaagtacttacaccttccctggatgaaaaggagaagaaaatctgaggtcttgctccccaacttgttttccccttagctaaagggtcaagcgtcgggggtgaggtgtgagaggttgaggaggaaaaaggattagtattacttttttaatgcgatggcggcggggggggggcgggaaatggagtaggcagacttttgtctgattgtgtgagggtgggaagaaatgttatcagctgagaagatgaaagaaatggatgattaaggtactttccagaccttagcaaggaagatgacagctctgatgagaaatctccctatgccgaggcttcagaagcagcccttccagcagagaaagtattcattagaaaaagaaggcaaagtgatggatggagtcagggtccagccagggtttgggaagaggctgtacagggtatcgatcgcagttctcaagagaagagagacagatcagcagagatgctgcaaacaccagctgcctcggggccaccccagttctggggctggctctggctcggagacagccttctgtcatcctgtcatcatgacaggtgatcttggtcagcttggccaggtcctctcaaatccagacaacgccacgccaaccctctgctctgcatcagggcagcgtgggtttcccacagaggaggcacgacacgggagccgaggccctcccccacaccacccctgtgtccttcagcacctcctacagactccctccccttgcccttctgattcacagcgcccacctccctgcacctaccctattcgatctacaggggagcggagtcgcttcgtggccgccagcccgggaaggggcgccagccagctggcggacgcacggcttagaggggcgtctgggcagagaggtttggggctggggagagatgcagtgagcttgggagagtggactggtagcacaaataatgtgtgcataagggttagaagaggaggtcctggagctttggtcttctcttttccccctgcaattgtgcatttcggagggactcttgctgcaagctcggtaggcaatagcatccgctccaagactacacttcccagaaggctgtgagtgggtggggggggggggggcgcggggaacaggcaacctgtgttgcgcttgcgcaaagactgcgctggaaaggcaggtggggaggaggggaggcgtgcccgcgacggggcgagggggagggggccgcgcggcggcggcgccagggcgggcgcgcgtccgcggcggtgatggcggtgcgtgaacgcgcggcggcagcaatggccgctctggagcggcgggtgccgagtctcgatgacttcgcgggacagagctggagctcgtgggtggagcgggccgacctgcccgcggctgacggtgagtaaagccaccctaaagtccggggaccccatcactatctcccctccccccttcc

SEQ ID NO: 2149 - DNA, 2300 bp, Homo sapien
ctgattcacagcgcccacctccctgcacctaccctattcgatctacaggggagcggagtcgcttcgtggccgccagcccgggaaggggcgccagccagctggcggacgcacggcttagaggggcgtctgggcagagaggtttggggctggggagagatgcagtgagcttgggagagtggactggtagcacaaataatgtgtgcataagggttagaagaggaggtcctggagctttggtcttctcttttccccctgcaattgtgcatttcggagggactcttgctgcaagctcggtaggcaatagcatccgctccaagactacacttcccagaaggctgtgagtgggtggggggggggggggcgcggggaacaggcaacctgtgttgcgcttgcgcaaagactgcgctggaaaggcaggtggggaggaggggaggcgtgcccgcgacggggcgagggggagggggccgcgcggcggcggcgccagggcgggcgcgcgtccgcggcggtgatggcggtgcgtgaacgcgcggcggcagcaatggccgctctggagcggcgggtgccgagtctcgatgacttcgcgggacagagctggagctcgtgggtggagcgggccgacctgcccgcggctgacggtgagtaaagccaccctaaagtccggggaccccatcactatctcccctccccccttccgggcccccgccagctgaggggagccgccgactggagccgccgtccggctccccggccccccaaacaaaggacccgccgggtcctagtgcccgcccgctccgtcaccttcgcgcctccgggtcctagcgcctgctcaccgctcgcagcccaccctgccaacctctgcctctgccagtcgctaatacctgcccccatataggcttgcctttatctttctccttgcctgctgcccctcagctcgcgaccctcctgcacctgcctccagctttccctgtccgcaacagtcctccacgtgtttcccacgcaccccacttctgtgcccccttcctcaccccccttgttccttcgccttttgccccacacctcctgctccttttcggcatttgcctgcagctgcagtgcttttagacccccgccctctccgcgttagttcgtccgtccatccatctatcctccctccctccatccttcggtccatccatccatgcctccaacccactgtcctttcccaggcctcttgccctgcctcttggctctctgctcttactctcaccttctctaggcccctgagtgccttagtgagcgggcctacagccccttcttctgatctttgtcttctgggccccagggagcacctggcctcgtggcctttcggggtgacagcaggcatcacgcccctgaagaagtttgcaagtgagaagaggtggaggaggagactgcacggaggggtctctaatgacacttgttctcctctgagacatccgactcccagtttcgttctatccatcattccccgcacttgcatttaacggacttagagtgggagctgccccttgtctcttgcgtgcctaacccacgacccctcataatctggatattatataagattgtcaacaatcttctcatcctagaaaggagcatatctgttaatgggcatcagagagcagacctaagtgggagcccaggccaccctggggctgccccatgctgggtgggcaaagatggggccattgtcagggtctgggtgcattgagaaccggaaatggagtcagacgggtttggtgactcagaattgattttttttttcccaagggacagggagggggcgtagaggagggaggggggaggagagaggtagggggatggggaaaaagctgctttgcacagctaagatgtttttgtcattaacccagaaactgaggtacaagggcaacccctgcccaaaggccctctaagaaggggagggacttgcatagctgaccaaggagactttgaagatgctcaaggaccaaagacagcagtttctctgctctgtgaccatcctatcagtgcaggacctgagaagctgggtgtaactttgacaatgctatggtaacccaggtggagcaaaattgagttcatgggggtggggacctgggagagtatctatttgggatgccacatagtagcagaaaggacccatcgagaaatctcaagaagagactcagggacttatagaaacattggttaaggacggtttcccctttaaatggggaagcaggcccagaaaagagatgatacttacccacaatcacccaactagttagcagtggaaccctaaactgcac

SEQ ID NO: 2150 - DNA, 2300 bp, Homo sapien
tagagtccaggccccaggcctcgcctcccctcccctccctcagccaaccccctctctctgtgtgtagccttttcgtgcctgtggtgaatctggagaagatgtccagtctcccgaagcctgatggacatggaatcagggtggccccaccctctgcttttctcagccagccagggggcctcaccaaggactcccctggaaaacctcccatggctcccccttctaaagaacctcctggcagagagaacatcgagatcatccccagtgaggggtccagtcactgggctgaaggcagccctcctgaaaaggagcccagtgggaccaggctgccccctaaaacccaccggaagatggctcgtgagtagttgtggtcttgggggtccagaatgtagagtggggactcctttgggctgctttgtccttgggctggatgaggaggaggtcaggtttatgggcctggccatcacaggttgtagggtataggagccccgtcacctcttgacctgcttgcttcctgggaagcttctctccatcctgtgtctcctgatcaaggctgagggagcccatgcccaggaggtgaagttctttctcactcttttctcacctagatccagggcgccagccagacacatctcacagctggcttctctggcctcccagatgcccatggctgcttttgtttcttgatgtgtgttgccctgctttgggcttgaagtcccaaaaggcgcacctgaaattgggatagggatggttctcacacccagcaaggagatgttgatgcccagaagtttatctggaaggtacagccccaggctgagggctggagtctcttctgccttagtaccagttctcaggcccttggcaggaagcggccaaatcctcctgtaaactcctggaaatggtcttgaggttcattggaagtgctttccccacagggaaggagtgcgacctcaacaggcagtgtggggtaataaatccagagaccaaaaagatctgtacccgcctgttgacctgcaaggtaacccccttcccactgcacggtgagggaggacagcacagggcttgcccactccttccctgggcaaagagaggaatgtcgatgttactgaaggtccagcttaagggagggcagttaggcccacccaagggaaggggagatgggtatgcccctcctgggcagaaggtgggaacagtgggaaggagggagtttccagattcccccatcccaaaggagggttttggccccatgggggaatgaaacaaagacacatgaacacagctgcaaatatgcccacctctctccctgccccccaacttgcccgggccaaagcaccctgccgtccctcaccccttctcagttcatacctactccccagctctccactctgctgtattctagatccactcagtacaccagcgccgggaagtccagggccgggccaaggactttgacgtgctggtggcagagctgaaggccaactcccgcaaaggggagtctcccaaggagaagagcccagggcgcaaggagcaagttctcgagcgcccctcccaggagctcccctcctcagtccaggttgtagcagcggtggctgctcccagcagcaccttctctgttcgtgccaagcagacctacccatactgtgcactgcccaggtacgtctagaatccaacccctacctcacctgggggtacttggcccctaagccatcaggggcccctggaaacaggctcagggagtgtcctggaagaggcactccctcagccctgagtgtgggggtattcctggggctcctgacagtggtgtggaagcaggagactcccctgtttccaaccaggcataccacagcaccccagcctctcggcagtgtgccagatccaacactcaggatatgaacattttcccagctgcctccaacagaccgaaacttgtcactggggagctgaaagggtcacactcctgggcaaggcagccctatgtgtattcactcactggccccttcgcgtgcagaggctatgccggaccccagggagagcctgacttgctgaaggagacacacatgcatctctgcctgtcacacaaggggcagacacgaaacacaggctcagctcacagacaggctcacaggaatatgtgatgcaagaagggggttgagcgagttgactgggctgaccagagctgggtacagttttaactgtgaagattttctggaggaggcggatctgcagcagattatcccctgaggaggaaggggctgggaggtgaaggggctggggagagaatcccttgggagcagtctctctgt

SEQ ID NO: 2151 - DNA, 2300 bp, Homo sapien
taatcaaagggctacttctttctgaattggctgtgaccctcattccaggtactggagctacctctgttccctgaaggaaagggagtttgagtccctgggtcacagcctaacatgccgagcagcaaggtgggtgggctggtctcactggtttttcctctgggcatcagggccttgaagggcaggcacacaaccccatgtccacttatgcacatgtgcccacctccaggtgtgcaggtgacaggcaagttctccagggtttccagtaaagcctgcagccagttttatttgcctcttctggtgggagccctggtgtagtgtgctatgtgctctccatatgatctctgccaggagggacttactggaggtgggacgggggtgctctcctgggttagatgtgggcctaatcataaaccctgtgtgttctccagcttcactacccaggctgcccctggtgagctggcattcatcttcccccttgctcagttttactcaccaggccagcagaaggaaatcaagctttagcctctgtagtgcacacagttcactgggtaggacagctggtaggcccccaccctgaccctttctctcgcctcttgtcttcctgcagtcaaaagcccattaacgagaaagtgcctgcccactgcaacggagccgccagcacctcctcccctccagatccgggccccaggctgctgccgctttttataactttatattatttttttttaagaaaaaaagctctttaaaatacctcaagactgtctccctgttctgttgctgctatgaaaatataaaaacagaaacatagaaaaggaaggaaaaaaaataacaaaatgagtgtccttactgtccccagccctaccctgggaggctgagatgataggcagccagactccagctcccatagcttgcctgcaaaagtctcttatgctcattattattattattgtcatcttgtcattttcaatagtgtgaaaaatgtttgtgtcactggggtagtctttccagacaggatgatgaggcgtgtggctctgaatgagtaaggcttcctgagtcttgacaccagagacgactatggtcccattgggaagagaaactcgagagggggagctgcacttctggctctttctaggatccttgccccgagggtctgggaattggcttgtgacccttttctggtccttcagcaaccctaggcatccatccctccctgaattattgcctgcttttcttcagctgttcctgcagcctcattttctcagccacttagggagcttgagctgggttggtcattgctgttgggatattcctgttttctattggacagccttccttccctgcctgtgggtttgcctttaaggaaggggtagaacctttcccagggaggcctccttgggttgaaccaccccttttttggaggcaggaagggaaaaggcatcatcacttgcagaactggtggtgtgggaggccacaggagtgtgggaggccttggtccttcaggatcacctggctcctcagggctgagcagctgctgaggaggcggcagggctgggagtgccctagtttttccatttatctcgctggggaccactcccgtgcagatgcgagaggagacttgcatttccctcctttggtccaccaggttcaaggcactatattttggcgatgtcctttcctattctccttgctcttaggcatggaggaagcttgttccctgaacaagacaaaatgaggtgacaggagacagtgcacagccagggaaatccagtactactagaaatcggctccaaacacttgtttcacagtcttggttcagcgtaccaagtgtgtgatttggggtttcactgaaatcgtttgccacaaaagtaatttccacaggctgcttgggatttaggcccttgtagacagacacacagatacaaatgaaggtgggctgggaactgttcggtccccttctgcctccgggctctcgcgggagcgggcctctccggggcactcgcgtttcccccccagcccccagagggcgctgtgggccactccgccgcactgccggcggcgtccccggggaggagcctctcctgcagccgccaccgcctccgcgatcgcaaacccggaagacgtgttcgggcagctggagtgtacgggcccgcgggccacggccatgcagcccctggaggtaggtctggttcccgctccagctggggagccgagactgacccgctggctgcggagaggcagtgggatcttggcgcacctggtagctttgggcttcaccatctttctgacagcgctgtcccggc

SEQ ID NO: 2152 - DNA, 2300 bp, Homo sapien
caaagagccagatcactgtgacttctgtcttgctgtctcttgcatctcttgctctgagggaagtcagctaccgtgttgtgaggaaactcaagctgtcttgtggagagacctttatggataagaatagaggtttcctgccaacagccagccacatgaatttaagtgagcctctatggccccagtgaagccttctaatgactgtagctccatctaacgcataactgcatgagaaactgccaagccagaactgtccaccagactgctcttgaatctgaccaacagacactgtgaaaggcaataaatgtatattgctgtaggaagtcactaagttttggggtaatgtgattatgcagcaatagataactgatgcaatgtgatttcaagattcttcacaccttgtcctccaaaaagattaccctcctcatcttttcaatgatgcctgaaatgaacagaacagaacatctttctcttttttctttctttctttctttctttctttctttctttctttctttctttctttcttttttttttttttttttgagacaggatcttgctctgtcacccaggctggaatgcagtgacacaaacatggctcactgcagccttgacctccagggctcaagtgatcctccgacctcagcctctcaagtagtgggcaccacaggtgcgtgccaccatgccttttttttttttaagagacagagtctcaccatgttgcccaggctgctctcgaactcctgggttcaagcaatcctcctgccgcagcctcccaaagtgctgggattacaggtgtgagccactgcaccttgcagaaagaccttttcacactatgcataagattaacacgctaatactccttgaagagataatatattcactaaaattcatggtaaaacatgtgacagatataaattctttttaaaactcttagcaagctaatctactgagacattaatttcagtcttgatcttgctgttataagagactggaacaaataaaaaggtaatttcttatggtccaccatctcaagaacagctaacatcttgaatgataaggtctaggctcttcctgcatctctctctttcctcacccccaaacccaaacaacatacactagtaacagcttcttgttgtttcaggggccaccctaaagaagaaacccctccacctccaccactggccttcatcttgaggattaggtaacagagaaactatgttgcaattgctccataaggggagtggggagctggcactggtttaggaagaaggcaagtggccagacctaagggctgaatgacttcctccgggctgggaagggtttcggagtttccaggaatggaaattgtccctggcttgtatgcagtccgtgtgtgtgtgtgtgtgtgtgtgtgtgtgtgtgtgtgtgtgtgtagcaggtggagtggggagaggtgcatgaggtgtctgtaaaggggtgttctggggcctgggctcaccaaacaccccctttcccctcactcctgcgcagctggcttgcaggctaaggagctgtgcccttcagtggtacctcaagggtcatgaactagtagcatcaagacgggggtggggtggggggaacccctcccccaatttttgagaccccacagccacagagagaagggagggggaacctcagaatgtgactaatgaatttcccgccaacattggcaggcgggagctgagccagatttcttcaatttgcgaaattaaaagacatgtgacgcctcttgcccgagtaggtgcagcgaattcactttagttagacttttcctgagagccggtctgtgtagcgagaagggtgctgggagatgggggaatgggggatggaggaagttatagcggagcctaaggggccagtgccgctcttcctgccaattttcgtctttagctcagcgtccggagctcgctggttgagggaacgaccccgcgcgcgtccgcccggccggctccgacacaaacacacgcacgtgcgccccgcccccgccgcgcgcacgcgccccgaggctccggcggcggcgacgggcgcgcgcgcggtgctcgctgcccccacgccgctccctccgctgggatcgctgcgcctccggctccccgcaccgatccgcgccaggcctgcggacctggaggcagcgaccgcggtcggtgggctccggcgggctcagcggtcgaggcggtggcagggtgagcggagcggggccccgcaagtccccgggaggcgacggtgccgggcgcgggcccctgcgtaaggtgggcgcagtgacaggccggccggtgaggcgccgc

SEQ ID NO: 2153 - DNA, 2300 bp, Homo sapien
aggctccctaccactattagataagcttggaagtgaagaattttgcccattttcacagacagccaactcacaggccaaggtcttaccaccaaccaatagaatggcgccaaactggaaccaaggttttctgactccagtctagcgctctttctaaaatcctgttccagtgggcccaggtctgctccagttcttattgaatccctcggaaggggccatgccagtctgggctggggccctgcaggaagaatgtgggtgctgagcagggacaggctttacctaatcccagacaatctgcttgatgccaaattaatcttgccaacacaacagcacagggcttcctaaaaatcactttgctgtctacaggttttcaatttggtatttccatttgaatttcttgtacgcaggtatgcctaattttgaggtctgttttaggctttctggaaggcagtgactacttctatgaagatagcttttagggctgtagtccacagtcttgtgtcaggccactggagaggccacggaacgaagggagaaggaggaggaaatacttggacttcaaacagatctgggttcaaatatcagctcttgcacttattagctgtgtgatttggggaaagtcacttctcctccagcacccggttcctcacttataaaatagggcaagtcatggctgcctcatagattggtgtggggatcaaagaaactgtatgtaaagggcctggcactcataacagctcaaaaagtggtggctggtgacagcggcacttgctgcatcggctcttggtttgtcagtggcctctttgtttttgacctggggcttggggcagccaacttgtcccagtgaggtccttgggtaactcattgttcttatggctctttgggttgggtctggtaaacaattccagaattccctttttccttcttagaggcagaaggagtccctagataggcaagtctcagggaagcaggctctggagtaggggatcatgcctgaattccctgtttagactcatggctctgccatgtggagctatgtggctttgagcaatctctttatctctctgggtctcagaaacatggataccttggcctgtaggatgtcctacagctttgcaatgttaggattctatccttgggtatcagtcatgtacccgggtaaatgatcattttcttcatagctagagggaggccatgccccttcattgcgtctctgaaggcccatcatgccacagatgggcgatgctcagtggctgatgctacctagctctgtccagtcccacaaatccagatcagtgtgagcattcctgagtccctggcccccactctgtctccttcaggaagcagtgttgtggtggttcccatggtggctcggggggatgttagatcctcccgccccctccctgccaatctccatcagccctcacagccccagttccaataaacatacaatctaagcaaataataataatgtgcttttgggaggcaagggcagggttaagacaaagccttcagctgcccttcaaacctgagtgctgctcctaaacctgtcccccatacgcattaggcagcttccaaaggggccaaaccttggaccatcccctggagcctcagccgcctccctggcctaagccttggggccctgggtctgcgctgacctgcctgcatcagcaccttggttctgatgtcacacagaaccatgcatctctcctatcttctctttgaactgctaagaaatcaaggccaaaatgcaacttgcccaaggtcacacggctagtaagtgccatagccaggccttaaacctggattttctgactccatgtacttttttttttacttcatcaggctggtcaagagggtctcccctacctatcatttcctggccccacgaaatttttgagacgcaatccagcagcctgagagaagtgagaggagttgagctcactgccaggcaccttgcctggggcattggtgcccacctttttgctccagaagtgactctgaggggctgggtgggaagcaggaggccattaggacccagaggctctcggagcactctgctttgccggctgcctctcaccgctcactgcagtgcttcaggcttcagcagccttggagaagcatcagctgagaggagctatcacatgggagccgggactgctcagcaaaggtaggagttgccgactaggccaggaatgggggccagacccagagcctggtggtgagtgccaaggtatccccacagaagggtggctttccaaggaccagccctgcctacattccggtgagcagtttgatcagga

SEQ ID NO: 2154 - DNA, 2300 bp, Homo sapien
ggcattaaacattgcctggcagccattttgttaatttattttgccttttcctttgactttgccctccagcccttccttcacatacatcaaagaagaaagttttaagagcaagggtatctttaattcaggctgaaatttcctgacactgtgatctcactggtgtttattacagagtttgacatacatgggttcatttgccatttatttttccctgtaggagtggatcatgaaggaaataaaaatttctcttttattatgctgagaactttcccaacaatttctgctatgaccaccttccaggagttttctagtcaccagatgccttggtaaagttcaatacgtaatctttggctctgaaagctgttcctggacaaaatctgagctaactcactgaagaatcaacagattgaggcaaccatccggtcagttactttttcctgcatcctgctggtgttggggtaactcccaatcctagatgaaaaccttagactttctgttgtcaggtgtccccaggcaatatcctacgggggcatgatagaaaagggtaactctggggtcagatagatgtacttactcactgtgtgaagttgggaaagctgcttaatttctctgagcctacttcctcacctgtaaaaatggggatcattattacctacctcacagggttgttgtgaggattaagagatgggatgtgggagcacctagccgtatctggcaaataggtactcaataaatactggttttacttccctttcctcttgccctttttccccaaaagtattgataatggaaaagcagtccctttcattcttaacagtcatttgggaatgactgggggacttttcaaaccttgaagaattggcattgctaagagttaaggtggacgaggctttttaaggtggctctaatcctctaattaaatccttctaattaatgaatcatcactatataaacctctctgttgggaccttactttctcaagttcagattctattagagaaataaatttacaatcacagggaaaggttttagggactgagttcccttcgctagaacgtatagtaattgtgggcttatttgcctgaaaagttgatttaggactaccttcacgcagtatccagggttattagtgaaagatgctatctgcctgggactttcacagtggacttaagtttcaggtgatactagggctgagaggcaaattttactagaacctctccttttgcatgttatcgcaacaggaaattttagtaggagattcacaggatgcactggtttgtttcggggtgtggaattgaagttgacttatcttggttttagttctaagaccctaaggtaggaagatctgaattatactggagagaagggcagcatggaaattttatggaggaactacaggcttacctttcaggttatcgagtatctgctagcgatttcaagtggccttttgccaatataggagttaagcaaatctcaagcccacagaaatacgtgaatagcaaaaggaccaggggacattttgagaggagtcagtgggccagagacggcaaaaagttattgctgaggtcctaagcacagtcggtgttacgatctcagatgtgagacgtgaacggcgcccaggccggatagcttgttcccattccattgatctgagataaccccaacggaggcagtgtcccatacttgggtaggggtcccgagtctccacagccagagatcaaaggagttttctggcaggcgagaaattaccagcagatattcccgcgcgggatgtaggctttaatttagaaatctccgccccaaaactggcatcttgaacgcgggagggcattatgagttagaggccccggtttttctccatttatccaaatcaggtagccgaaaggtaaatgaggcttcaagttgggcggcgggcagcgaacttgacagaacctcgaaactctgcagatccgccgcccaacccagccgccagctccccgtgacttccgctttcggtctcaactcctctccctgaggagagtggtttaaacggtgaaggctgcggggcgtcgccggaagtgtcgtaaacgtcggatatccggttcttctgggcgctaagggagctgacggagagggccaccgcccagcaatagacggtgcctcagcctgccgagccgcagtttccgtggtgtgagtgagtccgggcccgtgtcccctctcccgccgccgccatgggctgcacgttgagcgccgaagacaaggcggcagtggagcgaagcaagatgatcgaccgcaacttacgggaggacggggaaaaagcg

SEQ ID NO: 2155 - DNA, 2300 bp, Homo sapien
aaatgttaatatgtgctaaaagcccaccttggaacttcacagtgttatacagactttgtagaagaaaatgggggagtaaattgaagttactggtgtgtctccccttgagacctccatggtgaaatatatgatgttagccttcctaaaacctgtattgtgaccctatattaaagccaacttgtgattacatcatttcaggtgtcatgaccaaaggtcaaaaagaatcgtgcaagatcaacccaaaggaagagttgggtcataaagagataattcctttcaagcatacattgagaaatcaccaactgtgtcttatttctttcaatttctgggggaaaacatctctggaaatgtaggcctctagtcactatagatcttatacattaaaccagtttggcagagtttagcctttaaaaattgtgtcattttcttcaaacaccgatcacaagtaacaatttgcatgtgtacatcattagacctaagtatcagctaaaacacaaagcagtgcagatctttttactataggaggtagttgaggatgctgttgatagaagttcagcagttgactcagaataccaagtaagtcacccagaagacagtattggactaaaactaatatggagtgtaacataaagtttgtgaacagttgagactttattaattaggtttaagtaagactcggagtttggaaatattggtcaaggctgttttttagttattgggttcatagaatcctaccataaaaatataatttatttgtttttacaattaatctctaattttttttttaaggtaaggaaaacaaacttaatagggagaagttatggaagcagagtgcaaatagggcatttagaggcaaaccattttgagagtcagaacatgggtgctggagttagagtgcctaggttcagatccccagtccctgtttgttagtagtgtacctttgagcaaatcatttaacattgaatgtgcctcaatttctttatctgtataattgggataataataatagtacttctaggagtgttacaagggcaaaatgagttaagatgtttagtagtagtgtctggcaccatggtaagcactcaataaatataccattattattattatctcaaactgttttatttagctctttgcttttcctgtcttttcccctccttcctttaatccatttcagtgcttattctgctgacttttcacacatctggtacaagctttgatagagaagaggctcagctatctaaaatgagaatctagattattcacaagttttattttctcatgttgttgtcttgtacttttagccaggataattattttgactgcatttaatctattctttttcttctattataaatgaagttttgaatatgtaatagtgggaagtttcctaatcatttcagtttaggggaaggtgtatgtgtgaccttgctgaatttgctttctttccccttgcgcaggatgtttgatgtaggtggccaaagatcagaacgaaaaaagtggattcactgttttgagggagtgacagcaattatcttctgtgtggccctcagtgattatgaccttgttctggctgaggacgaggagatggtatgttggagcttctggtaaaaagcctgtctaatgtagccaggaaatggaaaataacttattaggaagattatctgcatccatttcctcattcaaccaaaacttagtatctttaatttttttgatctgtgccctattactctaaaaaagatgttatagccaccttgagtatgtggaaaggatgttagccagcccttcctcctacctcctctcccccaaaaattacaaaaatgaggactgacactcaactttatcttattggtgtttgacttatttccgtgaatgccatttagtgctgcaaaacttgttggtttgtctttttcattaacttaatccacttttactatttgctactgacctatcatcctttatttctttttcagaaccgaatgcatgaaagcatgaaactgtttgacagcatttgtaataacaaatggtttacagaaacttcaatcattctcttccttaacaagaaagacctttttgaggaaaaaataaagaggagtccgttaactatctgttatccagaatacacaggtaaggggttatgaaagattttattggaggtacacatcttacttagatcaacactttggtggcattcataaaactgcctttttttttttaatgattgattgggagagtattcagtggtagtggcattggcattaagcctgtgattaaaagcccctaagtcaagagtgccatat

SEQ ID NO: 2156 - DNA, 2300 bp, Homo sapien
tctagtctgtaaattggggacaatagcagttattgtgataattaactggtatgagccacttacattgttcagcagttattaattataataactataacataataattattaatagttccaggcagccccttgaacagtgtagccttcagcatggctctggcctcagtgtgagttaccagtattgtgagtacgctggagcagggctagcagtggggtataattactgaaaccttataaccaagattccaagatagtcacaatttcaaagagactctcctgtttttccttaagtcaataaggacttgccaatttgattgggaaaacatggctaccatggaaagcacctcagcagctgcatatttctccatcagcccctacagtcactgaaaggtggtgcgaaggaggaagataattagctatggctcagggtacctgataggcggggagacctagattctactcctgaccttcccagtcccaactggccactgctgcacaagtccagctctaaaatgaaagagcaaattacatccttcgacctcagtagttctccaccttggctgtacactagaatcagctggggacgtttttaaatccttgtgcctggactgcactccagaccaattaaatcagtattttttaaaaagctctccaggtaaatgccactgtacactaaaagttgagaactgtttcaggccagggtttttcaaacttcacagatgtgataactacctgtattagcttaaaatattttctctggctctggagtttgatgctaacataccatttaaaaacatacactattttaacatctcggaaagcagggtaatcttctagtcagtggcacctaagacttgaggaaacacagacaccagcaacccaggtgattcttaggattaggtaagtttagcggaaaacaggtccctagggcagtacttcccaatctttaatgtctttagagtcacctgagatcttgttaaactgcggattctgaatcagaagttctggattaaagcctgagattctgcatgtctaatgagcttccgggtgatctgatgttgctggctcttgatccacattttgggcaacaaaattctaaaacatctccacctgaggaggctccgccagcaacactcatttaagtaaactgaaataattggcatagaggagtacaacctgtggagtcctaaatgtctgtgaggcagttgctagactgcaccctcatttttcccccaggaaagggcagctgggatgagagccagaaggagagagagctgccccaacctttgagaagccagagtctggagtccaatttcccaaagaagcagagttttttgtgtgaggcagcacaaaccccacactgaataccagcaaagttcatttatgaagtgaagttgggactcagctggctttagtgggccaaagggaagcaaccccattctcttcaccatacacccttttcctgcatttattcattcaccaaaccttttgatccacaaataaactacaagttctgagaggttcaaagatgagtcagatttggtccgttgagctccagggggagaaatgcagtgagggaaaagatttgtaaaacgacgtacaatatgaagtgataagtgctaataacagaagtacaaagagaggggccaatgcaaaggaacaatgctagtagcttcctggagcagcagccactgcgggagctgaaacattcctaatcttcccaaggaagggcaccacccaaaacaaatttcctggccaggaccagcctatggtaaacgagtatgctttgataccctgaagcccttgagatcaagaccttataatctggaggctcaacataaggaatgctttctacatatgtgccagtaatctctagctctatgatgcaaataaatctaaggaagcaagagactttcaggggatgaaccccttaaaggatggaagtagtcgtgcatcctatccttccgtcagaacccagcagatcatttccctagttatagaaacatttgagtctttaccccttgccatattgacaaagctcttaattggcttgacctatcacattgctagatataaaggctacaatccctagactaagaagtaggtctccagttgaagtagggagtctcagtcaatgtaggcagagtacaagaccctacagcctgctctctcacctgccatcgtacagaccagcttttaggggagccaagttgggatactcaatcccaacttttttccttctcttccatctcacatacaggaaaccttacgagagaggattaggggcctgaaaaagctga

SEQ ID NO: 2157 - DNA, 2300 bp, Homo sapien
gccacctattggctgctgaggtaggtaggtctgcattaagcaggatgctcaagagacctggcccaatgcaagatactatctttaaaactatgtcaacatttgcatcttatcagaagatacatgacatttatgtagttacatggtgcttgatttttgagattcattttattcattcttgagagtccatcagcctcaaaatccctaagcgccccaagaccaattcagtgggccataaatgtaaacagaatagtttaagtctggggttaagaccccgggaaggctgggttggggggactgtggaggcaattacagatttttacagatttttgttgatttctatccccttgattataaaagttatgggtatgtattataatttctaaaatgcaaataaatataaagaaaataaatataacccataattccatcactacagataatcattggtaaacttgttggtgtgtttcttttctacccatgtatatcacataagtaggaccatactgtgtatagtgttttgcatccattcttttacctaactttatattgtaaacatttccacatcattaaacatttctccaagaacaatttttaatggctgtatttcatggtatgaatattacataaacattcccctattgttcgacctttaaagtatctaacttttctatgcaatacacattgtggtgctgaacaactttttgcatacatatttttctggcagctctttttagaaaaacaacttccagaaagttgattactgggtcaaataataagaacctttttgaaaattttgattctatattaccagatggctttcagaaagattatatcagtgttcaaggccaccagtaatgtgtttgtgcacatgtacgtgtgtgtgtgtctcccatctcactaactatacccttgccaacctgcattagcgtttattttttggttttttgttttttagtctttgctattttgattaggtaaacctggttatctctgttctctttttagttttatggattctgtgtgaggtgaagaggccaagttttttttaagtttgttcagggaacagtagccagggatcaatggaagtggcaccagatgcaggtggagaaaagggttcagggtccagaatccagcgtggggagagaagagggaggcagagtttgggaaggatctctgctgtgggagtggtaagaactgggaggagccagacaaacagcattagaacaactgggtgtggggggcaaaggcctcccacaagagggaaaatagggaagagattaattcctgctaatgcatttaattatattcagtgaagtcttagggacttccctccacaagttccctttaggtcggattatctaccccttggcagtggggatgcttgttggatagaccccagaacggctgcaagtgaatcaacctgtgagtgtcaatagagaaccaaggccaaggctaaagcaatggtaatacatgaatactgagtactaactacaggccaggcacagttctaagcagttaacttatattaactcatttatcttaaccaccatataaagcaggtactcttacactcattttacagacgaaatagaagcacagagaagttaggtaacttgcccagtatcagtcaggaagtaggtgaaatctggatttgaacccagacattctggctagagttaaagctcttaaccaccaaatacagaaatgtgggaaggggagccagaattgcagggcacagcctcctacctacgccggccggaagaaaacagacgaccaagtgagattgcaggggcaggacttctgcttaaaatgaatcctgggacaatgataacagctacctttcactgggccctcacttcgtgccaggcactgtgtaaagggactttacgtttaatcttcacagtaacccctttgagtgaggtactgtcattaccccatcttactgatgaggaagctgacgcacggaactggcccaagacccagggtcggctcaggccagccctaccgcggtgtggtggctgcccacgtggcgcccaggaagagaaaaaaatggcgaggcggggtcggcaggcggaggcggggccaggcgggggcggggccaagggccgcagagcctggcgcggagccggcgagattttggtggggtctcacctgttgcgtgactcccccacagtccggccgcgggagtccgaccctgaatgcccagggagtgttgagagaaatctggacgagtttcgggtcccgctcccttgggagcacgtggcctaccagcctctcgattgcagggttgggtggtcgcg

SEQ ID NO: 2158 - DNA, 2300 bp, Homo sapien
ttcagaaagattatatcagtgttcaaggccaccagtaatgtgtttgtgcacatgtacgtgtgtgtgtgtctcccatctcactaactatacccttgccaacctgcattagcgtttattttttggttttttgttttttagtctttgctattttgattaggtaaacctggttatctctgttctctttttagttttatggattctgtgtgaggtgaagaggccaagttttttttaagtttgttcagggaacagtagccagggatcaatggaagtggcaccagatgcaggtggagaaaagggttcagggtccagaatccagcgtggggagagaagagggaggcagagtttgggaaggatctctgctgtgggagtggtaagaactgggaggagccagacaaacagcattagaacaactgggtgtggggggcaaaggcctcccacaagagggaaaatagggaagagattaattcctgctaatgcatttaattatattcagtgaagtcttagggacttccctccacaagttccctttaggtcggattatctaccccttggcagtggggatgcttgttggatagaccccagaacggctgcaagtgaatcaacctgtgagtgtcaatagagaaccaaggccaaggctaaagcaatggtaatacatgaatactgagtactaactacaggccaggcacagttctaagcagttaacttatattaactcatttatcttaaccaccatataaagcaggtactcttacactcattttacagacgaaatagaagcacagagaagttaggtaacttgcccagtatcagtcaggaagtaggtgaaatctggatttgaacccagacattctggctagagttaaagctcttaaccaccaaatacagaaatgtgggaaggggagccagaattgcagggcacagcctcctacctacgccggccggaagaaaacagacgaccaagtgagattgcaggggcaggacttctgcttaaaatgaatcctgggacaatgataacagctacctttcactgggccctcacttcgtgccaggcactgtgtaaagggactttacgtttaatcttcacagtaacccctttgagtgaggtactgtcattaccccatcttactgatgaggaagctgacgcacggaactggcccaagacccagggtcggctcaggccagccctaccgcggtgtggtggctgcccacgtggcgcccaggaagagaaaaaaatggcgaggcggggtcggcaggcggaggcggggccaggcgggggcggggccaagggccgcagagcctggcgcggagccggcgagattttggtggggtctcacctgttgcgtgactcccccacagtccggccgcgggagtccgaccctgaatgcccagggagtgttgagagaaatctggacgagtttcgggtcccgctcccttgggagcacgtggcctaccagcctctcgattgcagggttgggtggtcgcgacaccggggtcgccttgaggccagtccggctgccgaggtctgcgggagtccacctccggccagctggcaattttgaaagactgccttactttccccatctcagtgccagggcaggggcccttggagtgacttggctggggtctgtggcccgatccccctgccgtccctcaggacccgggctttctgctgtacagacttctcgtgggcagcctcccctcggaactcgggcatcatggcctcaggtgagtgtgtgtacgtgtgttggagggagggtctctgggacagagaagtgctgtggccagagtgacaagagggtgggagtcacagcacagcagcaggacctagggaaggcggtcagctcctcccaggagggcctggggagcagagccagagtgtgcagagacagaggaaaaatccaaagaggctagggtctctgtcccagacccccagacaagggggtctcctggccttcctgccttcctgggaggtagctatttggcgacggtggaattttcccgggacaggcccctccctcctgggctgggattctcggttcttccccctcctcccagagctgggctaccccgggagctgagggtcagatgtggaaggaaagtgggtgctgggttttcacggagtatgcctgccctgccccgggaggactgtgtttgagcttggactcgctcgctgctgaattcctgtttgttattcttttttcttccaggctagctggaaggaccagctagcctggactttggcttctttgcccgggagccctggcatgatggggtgagggctcttggtgggttagtggaga

SEQ ID NO: 2159 - DNA, 2300 bp, Homo sapien
cagaatcagatccatgttctccaaattctagccccctttctcccaaacttattctggacagtttgtcctgtccctgatgataggcttggatcaggggttgcaggtctaggggcctgcgaaccagccccctgagcagctgggcagcggggaagcctcagtgactggcccctacctagactgggccatttccccagctgccagccagctcctaccccagcaaaggccctgtctctcctgagggatgccataatcagggcccagaggacagtggtgagcaacaaggccactgccagaagaggccaacctggggctgtgggtgtgatgaagagcgctgttcccctcctttttctcccctcttactctttggccagccaggccctgcccactcactgtcccctagggcagtggattttaaggaggcttggctcctccctgtcggcctgccctgcccaagtcagcctaccctgctactcccccttaggagcctcacatctggctgggtcttccctggcactgtagaggtggaggccctcttcagttctggagttcgtcttatctcccaactctgatgctccttcccttggtttctgggctcccttgaactcccctagctccgtgctcacggccatctcagggtctcccctgcttgcagctgcacttggtacagcctgtgccagcccctgagggaccggctgcagcttcactggcaaacaggcgggcaaggggcacagggctgctggccggagctgcctgcactctgcaggtagggttcaggcaggggccggggtgcgcaggggacggggtcctggatctggggcaggcccctccctcttccctttgtccagctttgggaccagtcctggagtattgggaaatgggcgcagagactttaaggccggctacctaggcagatcctgtaatccttccctaagccagggtggagggtgctggaggggagcactccttacagccggctgagagaggcagtttgggtgtggaaagcttctcactgaggagctggggctgctgagcccagggagggtccttcggggtaggctggaagccttggcagcccccatagaccagcagcttcacggccctctggtgccagcctcctcgtggtacagatggaaagtctagtcttgatgaagaaagacccctggcttctgacactcccttccccagggccctctgtggtgcccccggtccagatcctggggcctgagtggcatagactgtttgtggcagctccttttggaggggcaggctaaggccaggccacattttggcagccctggggccctgggggacagggcgggcctccagggaggaggtagggttcccttgccaaccaggccctccacttcctctcctcttcccttgagggctcgtccctaggtcagagctgagcagcagctgcggcttctcttgtgctgcacaggtctaggatgtcaggcacagggccctgcccctttgagtggagaatctgctagtccaggggcgggtctgatcctgggttgcctgccctgggagctgcaggctgggggtccctggtgtggccgcctggtccttaccaagcacctggtgtgtgtctctgagggtgtctgtgtgcgtacgtgcatgtgtgtgcacacgtacacacgtgcacctgcctctgggaggtagtcacgtggagattctcatggcctgagggatcaggctctagtctcatttgtggaggtaatgaatctacttgttctaggggcagactcagaatccccaccccaagcctggaatgggtgaggggtccctgcgttagaggtgagggtgagccctttgggagccacacacacaggcctactcctcagctactgaggagggactgccctctttcccgaccctgggctctctcgggagctggcctaggcagggcaggggcccagggctttcaggggctgcccctccaccctttgaccctggcatcactgtctctgcagaggctcggggtggtctgggggcccctccgctgcagtctgcccgatccctgccgggccccgccccctgcctcaagcacttcccgctcgacctgcgcacgtctatggatggcaaatgcaaggagatcgccgaggtatcacctggcaccacccgcaccctcaccccgtgtctccatgccctgcctctgctccccacacccctcacctcaagctgtcccctcacctcacgcttggctgtctcctgatcctcagcctctcccaggtacccctggtcctgctgccctcaccccatccccagactctgtaggagagtgcccgagggcggag

SEQ ID NO: 2160 - DNA, 2300 bp, Homo sapien
tgttggggggatgcagcgtgggaggttgcgttggcttgggagaggccacagggctcggcttgctctcctcacccaagctcccctccatgccagttgctcagaggtggagctgccataccctgacctgcaggaatttgtggctgacgtcaatgtgctgatggccctgattatcaatggccccatgtgagtcccctgccatcccagacacttagctcccctcccagcccagattctccagccccagttctgccccagactcccatcacctggtgtcttgcccttcctagttgctgagccctcgacttccccgcagtctacttccctcttggcagcctccatccttaccctcccacctgctccctctgatctgctacccaagccctccccaggtgcctcccttcagggcctaagtccctgccttgttctcctcatgcccagaaagtcattctgctaccgccggctgcagtacctgagctccaagttccagatgcatgtgctactcaatgagatgaaggagctggccgcccagaagaaagtgccacaccgagatttctacaacatccgcaaggtgggccctcaccccgtggccgtctccatgtcctcatcccacacctctgcccagcctccccttcaagggccaggccccccacacagcatccagtacagagggtcctttcccattgcactgccccaggccccagaccttcctggcctctggtggatcagcagtgccctgttccattccaggtggacacccacatccatgcctcgtcctgcatgaaccagaagcatctgctgcgcttcatcaagcgggcaatgaagcggcacctggaggagatcgtgcacgtggagcagggccgtgaacagacgctgcgggaggtctttgagagcatgaatctcacggcctacgacctgagtgtggacacgctggatgtgcatgcggtctgtgccagtggcgtgggctgtgggactgagtcagtcaggggaccaggagtcacgggtgacctgagccttcccatgtcccccaggacaggaacactttccatcgctttgacaagtttaatgccaaatacaaccctattggggagtccgtcctccgagagatcttcatcaagacggacaacagggtatctgggaagtactttgctcacatcatcaaggtaaggaggcagccttccctgccaagcctcgagcctgaggatctgggggcttttagggggtgagactcaaggagggtaggcagatgaccccctgaagagctctgactcagctcacctcatgtctgactcagctcacctcatgtctaggaggtgatgtcagacctggaggagagcaaataccagaatgcagagctgcggctctccatttacgggcgctcgagggatgagtgggacaagctggcgcgctgggccgtcatgcaccgcgtgcactcccccaacgtgcgctggctggtgcaggtgccccgcctcttgtgagtgtccctggagtgggaggggaacctgcggggtcatattcaaggggtcagggcctgcctcctgccctcctaggatggctgagcctcccttgtccctgccaacccctctgagtgcaaggaagggcttcctggtcccatccatggtctgtccagcctggcccacctgggtatccttgctttcccaatatggttcagatgcgcccctgcgctcttgggccaagctctgacccttgctggaccgctgggtttcctcccactggccctgacttgcacatacctgcatgttgtctcacctgcagtgatgtgtaccgtaccaagggccagctggccaacttccaggagatgctggagaacatcttcctgccactgttcgaggccactgtgcaccctgccagccacccggaactgcatctcttcttagagcacgtgagcaggcagcgcagagctgggtatggggagggcagccggcttcgcatccagctgcagctctggttctgaccccagggttctgtattaggtggatggttttgacagcgtggatgatgagtccaagcctgaaaaccatgtcttcaacctggagagccccctgcctgaggcgtgggtggaggaggacaacccaccctatgcctactacctgtactacacctttgccaacatggccatgttgaaccacctgcgcaggtgcctgcaccaccctgtgtctgcttgctatgccatctctcgcccaacaaacctcactcttggcaccttgggccagggccactagacctctgacccacctgttgcctggactggatgggttctttctctgcccttggagctacat

SEQ ID NO: 2161 - DNA, 2300 bp, Homo sapien
gcaggagaattgcttgaaccaggaaggcggaggttgtggtgagccgagatcgcaccattgcactccagcctgggcaacaagattgaaactccatagaaagaaagaaagaaagaaaagaaagaaagaaagaaagaaagaaagaaagaaagaaagaaagaaaagaaagaaagaaagaaagaaagaaagaaagaaagaaagaaagaaagaaaggaaagaaagaaaagaaagaaagaaaggaaagaaagaaagaaagaaggaaggaaggaaggaaggaaggaaggaaggaagggaaggaaggaaggaaggaaggaaggaaggaaggaaggaaggatacccagaagcttctaaaatgaggaaagcacagataatctggtggaccatccaggaaggataattgatttctctcatacaagatgcaattcccatagtaggaataaaacaagatatatgcagcaaaatttgacagaattgaagggagaaatagacagttctacattaacaatgggaggctctaaaacccctctttcaattatggaaaggctgagacggaaggtaagtaaggaaatgcagaatgtgaacacacaatgaaccggttagatctcacaggcatgcagaaaataacctgacaacagcgtgcacattcttccccagggcaccacttccgcctccctcatccccactgctcccgatccctgtccacagacccacttcccgccctggtgtgatcctcgtggccactgtggcccctactttggagatcctgctggtccagttcttcccgccttccgcagagccgtactcctccttctgaagaagccacctgggacctgggccccgtcttcctggctcctcagagtccttgcaacagcaggcaccgcttctctctcctacactcaacccctctcccactccactgcctctcagtgtgcaaaaacagtaagaagtgtcccgtattttcaaaatctctcccctgtagttcccacctgacttctagtcgtaggtggccaaagtacagtgtttttgaaggattgttttattcccagtgcctggaatatggtaggatctcaacaactgttgtttcaataaaggaatgaccaaatgggtgaatactaatgtaacaatatcaattctgtttctttcataattattctcataagtgttagctttcttaaaaaatcatcttcacaattggacctagacattttatctttcccagctcaagatggataaactcagaatgacaggccaggcaccgtggctcatgcctgtaatcccagcactttgggaggcggaggcgggtggatcacttgagaccaggagttcaagaccagtctggtcaacacggtgaaatcccatctctacagaaaatacaaaaaagttagcagggcgtcgtggcgctcgtctgtaatcccagctgctcgggaggctgaggcaggagaatcgcttgagcccgggaggcggaggttgcaatgaaccgagatcgccctactgcactccagcctgggcaacacagcgagtccccgttccaaaaaaaaaaaaaaaaaaaagactcagaatgacacattcttaatgtcttaatgtataatgagaagtataactattcagaagtccaagcacttgtgtgtgcatggtgctatcgtcttgctgtaggcaaacctacatgggaatccaccttgacacataggccacttcctgagcctggacccagtctcagagctggggaactggcccaatgcaaaagggtcgggagcatctgcaacagagactgagctctatcagcttcggtgacatagcctccattcacgctccccaactcagcagagagagcacaccatcagacttctaagacttagtagccaagaagtgttgaattaaactctctgagacctctctttagtctgaccctggcagcctcagtctcccagagcctgtgggaactcggcagccgagaggcagaaggctgggcgacgtccggagaagaagaaacgggggaagaacttttctcttacgatctggctttactctcacgcgcacagccgagtccctggggacccagcagaggtccgaagcggagcggggcggggcggggctacggaagctggcgaggccgagcccctcctagtgcttccggaccttgctccctgaacactcggaggtggcggtggatcttactccttccagccagtgaggatccagcaacctgctccgtgcctcccgcgcctgttggttggaagtgacgaccttgaagatcggccggttggaagtgacgaccttgaagatcggcgggcgcagcggggccg

SEQ ID NO: 2162 - DNA, 2300 bp, Homo sapien
ttggccacccctaatgggggtgttaaatgcaggaagagtccagtcaagtcattgcaaattggcattgacttttgggacctttctacacacgatagtcaggtagataccttctttttaaatttgacttgttattacttttttttgagacagggtctcattctgtcacccaggctggagtgcagtggtgtgatcacggctcattgcagcctcgacttctcaggctccaatgatcctcccacctcagcctctcaagtagctgggaccacaggtaaagggccaccatggccagctaattttcgtatatttggtagacaatgtttcaccatgcttcccaggctgggtggatacttttcaaaaataagttcagttcatcctgcctagccttgccccagcagctctagaggaattacccactctggtgctgggctcaggctgcctgtctctggaataatgtgctcagagctgcagggtaggcctgctgtctgactggcagagagagtcccatactccctaccctgtaccctgaaagatcaaggctgcccagcctgtccacctggtagaccatttccctgcccaattctccttctctcattcctgatgtgcagcttgatgcctgcagggactgtgccagctgagattgtctctaggtcctcccttctgccagctggtgtccagggaagtgggtcctttggcctgcttcctgccaccagaattttgaggaccttgtttctcccactgcaacttttgacccattcctgggtttctttttcttttttttgagacggagtcttactctgtcgctcaggctggagtgcagtggtgcaacctcagctcactacaacctccacctccctggttcaagcgattctcctgcctcagcttcctgagtagctgggattacaggcacccgccaccaggcctggctaatttttttgcatttttagtacagtcgggatttcaccacgttggctgggttttagactagggtttcttcacctcagcagtactgtcattttggagggcaaaatcatttgttgtggggcactgtcctgagcattgcagggtgttcagcatcctacgcaaactctacccactagatgccatgggcgcttcccagtggtgacaattaacaaagtctccagacagacctacatgtcccctgaggggcaaagttacctccacttgaagaccagtggtgtgctggatggatactaatattaaaataataataataataataatagaaatcataatataactcatgtagttaaggtaagtcctttttgatggaacatttatttcagttaataatatttgtgtatgtctgtcctggtagttttttttttttaactttttattttgatttaacatgagagtttgagaaatttacaaaacgaatgaatacaaagacctctgattaccccagattctaacgtttccacatgggctttctcctccctccccaagtccaccagcccctgctccccacctttctgtctctcttcccacccagcaagctccctaggagcacagcaccacttatgacaaaaacatcattttcttttctctgaggcggtattcctgacgtttggatttaggctgataagtgacagtgagttataatcatccttgcctgtgttgtccttcccacgttaggtctgtcatgccacgtatgtccgcagtttataacaatctctatcatacattgaaaagttttgaaaacttatccagtgaatccctgagcaccaaatgttcttttgtgttatttttctttattaggctattattactttattcagaatctctctgttttagagagagcctttctttcttgcctaacctagagtgcagcggcgcgatcatagctcagttcagtcttgaacccctggactcaaccagttctcccccgccctgggcttctgggcgtcctgatctctctcctgaaacccacggggctgggaggtgggaggagatcctactcctagccccatgagcgcgctccaggcctccagattggcccgtttcgggggcagggcgggccgtggggcggggtcgcagcaaggcttcccctctaccctctctgggcctctcacaaacgctgagccccgccccgctgaggcctgtctgcagaatccacagcaaccagcaccatgcccatgacactggggtactggaacatccgcggggtgagccagggtccgctgggcggtgggacgggggtgcgtgggggcggggaagtgtggagcagctgcaggacgggctctagggacggttcctcttcagggctgtccctgacagcg

SEQ ID NO: 2163 - DNA, 2300 bp, Homo sapien
tgtttactcaaccccaaaccacacattatccaggtggtttgaaacttttttgatatactgggttcatcctctggagtcctaacaatgttttagctaatttacaaaaaacaaaacaaaacaaaacaaaacaaaacaaaacaaaaaaactactttttttgcagcacaacagcctggtttacattgcaaaatgatttctcattaaaggtctatcatctatttccatatgtccattattatttgcaatatcctttaaagcagtcaaccccaggctaatccattgcacaactcttttgaaagtcttccttctaccttgaaagaagaaagttggcaggttggacattgttctcgtggaggttgtaccatgggtcacatatcacggtgtgacttcaaaggccactggagccaccgtctcatactgaagaacacacatgggtcaggagccaggtccaggtccggaatggtggatctggagaggggagggtccctgcctgtggtcctgtggggagccctcaggctcctctctggccaccatcctctgacctccctcctcagcaggacagggttctggcttctctgagggacaggttctgtggcaggccaggcgtcactaacacaggcctccataacaactgtttcagtactgactgagtggtgaagttaaatattaaaagctgaaaaaagccagtacctttatacagaggctggatgtaacaaaagcccaccaagagttttgcttaggcctttcctgggccttaaagcatgacaaaacaatgaaggaattcttaacaggacctatttagaattaaacaagttttattgtgagtctgaagaaactccccaggcctccacaaacaagtttattgggcgtctgaaggaactccccaaacctccgtgatttagcaggagacaagataagggtaatcatcccccgcacctggacccatttagattaaataaatagactgaggctccagaataaggtcctcaggacccagacctcagttacagattaaagaagttaatcacttatgtctttagatgaatgcacacttacttgtagacatataccttagaaggtatatatgctctggaaaactttgtaatattgagttggtctggtggtaatttctaggccttctccctgttaccggttgcagaaataaaacctctcttcctccccatttgatctgcatctcgttattgggcctagagaaatagcagccggaccctcagtttggtccgggaagttcttccatcctccctcgcctgctctctgtggccactgcactcactgttgctgttgctgttccggtctctgtgaggttcacctagtggactggctggacatttctagggggcacctcagatacctcaccaacttgctggatctgatccttggatttcgattcataaattgtgccaaaatacgaagtggctaatttacacagtacttagccagatgaccgaaggactcagtacccgagggcccctaacagaaaacacagaccacatttcctttactctggcccttttcctgggggtccttcctataccactgacactgttcctgtgtaggcggggctagaggggagactaagccctgggagtagctttcggatcagaggaagtcctgctcttacagtgacaggggctgaattaaattcccaggttggggccaccactttttagtctgacccctgcagccggagtctcccagagcccttgggaactcggcagcggagagaaggctgagggacaccgcgggcagggaggagaagggagaagagctttgctccgttaggatctggctggtgtctcaagcgcacagccaagtcgctgtggacctagcaagggctggatggactcgtggagcctcagggctgggtagggaagctggcgaggccgagccccgccttgggcttctgggcgccctgacttcgctcccggaaccctcgggcctgggaggcgggaggaagtcttactgagtgcagccccaggcgccctctcccgggcctccagaatggcgcctttcgggttgtggcgggccgaggggcggggtcgcagcaaggccccgcctgtcccctctccggagctcttatactctgagccctgctcggtttaggcctgtctgcggaatccgcaccaaccagcaccatgcccatgatactggggtactgggacatccgcggggtgagcgagggtccgctggacggtgggacgagggcgcaggggagggaagtgcgaagcagctgcgggacggactctagggaccgttcctcttcagggctgcccgcctcaga

SEQ ID NO: 2164 - DNA, 2300 bp, Homo sapien
atgtctgtcctatgcagttgagataaggactgaaatacaccctggtctcctgcagtaccctcaggcttactagggtggggaaaaacctggccctggcaaatttgtggtcagactggttctctgctcttgaaccctgtgttctgttgtttaagatgtttatcaagacaatacatgcaccgctgaacatagacccttatcaggagttctattttgcccttgtcctgtttcctcagaagcatgtgatctttgttctgctttttgccctttaaagcatgtgatcttcgtacctaccccctgttcgtacaccccctccccttttgcaatccttaataaaaacttgctggttttgaggctcgggcgggcattacggtcccactgatatgtgatgtcacctccagcagcccagctgtaaaattcctctctttgtactctttctctttatttctcagccagccgacacttatggaaagtagaaagaacctacattgaaatactgggggcaggttcccccaatatctggtgcaccaacatggttttctttttcctaagtgcatgtgggaacctgattccctttggtaggtgtggagaaacgatcatcagtccagtcctcagaaacgcttgttcggctccctgatgattggtgaattttctatgtattgtctcgggtaactatgggtcacatggagtctaaatattatgcttatctctgctatattaaactcctgttaaaacagggtggagtttgggtgcccatggaaaatatggtcaccctattcagggtgttggaagaacactgtccttggtttcctgaaaagggaaaattagatgtggaactatgggatcgcgttggtgcaaaattccaggaactgatcccatcaggaaattatgttcccttcactgtttggggtgattgggccttggtatgtgccatcctaacgacataccaatcccgtgaccccctgcagttaccacagttttctgaatctggcgaccttctacctcttccacagctttcctctcccactcgggcttcattatctgctcagcctctcccttcgcctactcctcccccacctaacgatattgaggattcaatatctaactccggtgactttggcttaatgtcacccccgatggtcttatttcttttcatgaagacctgatacttgtagctcccatggccctgactcggacagctctgcaccatatctatgctaactcttcccttttcaaatctttgcaggctttgcctccagagccatctaatggctccagaccaaactacaatttacctgtaattctgcaggccctcccccaccgcagcccctcaccctcctgtcatttcggtccctcaaccagtcactttgccattcactcaacctgcttctctgtacccttcttcacacatggacgcccctgccactctggttgcacaggatttcccaataatcaccagtatgcttctgtctcttctgctcccccaatgcccctttctcacactctcatactggtctgacctcctgaacctcagtttcccttatctacacatacttttactgtcacttctatgccaactccatctcatgtgcctgctcttgaaacttccatgcaatgcttattacgccagaacaaagaaacaagtggattagaggtgtgggcttatccggtcacgctggaacctcccaatgctcaaggggtacaaatgcgttgatatgcactgctcaatcttaccttttcaaaagaattcaaggatgcttgtgctcagtatggtcctgcttctccatatgttaaaatggcattacagactctttgtactgaggtcattttgcttccttcagaatgggaccttttggcgaaagctgttctaactccatctcagcatttacaattctgtacctggtggtcagaggaggcccgtctgcaggctcagctaaattgggttgatggcattctaattactcaggctcagctcacaggctctgataatcactctgacactaccgcccaattagactttgacgctctcaccacggaacaagtaacaaagttgtgtatgagagtttgggataaactaggtgccccaggccaagctcctgtttcttttactactgttaaacagggtcgcagtgaattacatcctgattttttggctaaattacaagatgctgttcaaaatctgtctctgatgattacgctcaaggtattctccttcatatgttagcttttgagaatgcgaaccatgagtgtaaagtggtcatgcgttctgtctaatgacaaaatttacctgatcacgaggtgtg

SEQ ID NO: 2165 - DNA, 2300 bp, Homo sapien
ctaatagggatgtgatgaagtctacctgtttactcaaccccaaaccacacattatccaggtggtttgaaacttttttgatatactgggttcatcctctggagtcctaacaatgttttagctaatttacaaaaaaacaaaaacaaaaacaaaaaacaaaaaactactttttttgcagcacaacagcctggtttacattgcaaaatgatttctcattaaaggtctatcatctatttccatatatccattattatttgtaatatcctttaaaaaaagcagtcaaccccaggctaatccattgcacaactcttttgaaagtcttccttctaccttgaaagaagaaagttggcaggttggacattgttcttgcggaggttgtaccatgggtcacatatcacggtgtgacttcaaaggccactggagccaccgtctcatactgaagaacacacatgggtcaggagccaggtccaggtccggcatggtggatctggagaggggagagtccctgcctgtgatcctgtggggagccctcaggctcctctctggccaccatcctctgacctccctcctcagcaggacagggttctggcttctctgagggacaggttctgtggcagaccaggtgtcactaacacaggcctccataacaactgtttcagtactgactgagtgatgaaattaaatattaaaagctgaaaaaagccagtacctttatacagaggctggatgtaacaaaagcccaccaagagttttgcttaggcctttcctgggccttaaagcatgacaaaacaacgaaggaattcttaacaggacctatttagaattaaacaagttttattgtgagtctgaagaaactccccaggcctccacaaacaagtttactgggcatctgaaggaactccccaaacctccatgatttagcaggagacaagataagggcaatcatcccccgcacctggacccatttagattaagtaaatagactgaggctccagagtaaggtcctcaggacccagacctcagttacagattaaagaagttaatcacttatgtctttagatgaatgcacacttacttgtagacatataccttagaaggtatatatgctctggaaaactttaattttgagttggtctggtagtaatttccaggccttctccctgtaactggttgcagaaataaaacctctcttcctccccatttgatctgcatctcgttattgggcctagagaaatagcagccggaccctcagtttggtccgggaagttcttccatcctccctcgcctgctctctgtggccactgcactcactgttgctgttgctgttccggtctctgtgaggttcacctagtggactggctggacatttctagggggcacctcagatacctcaccaacttgctggatctgatccttggatttcgattcataaattgtgccaaaatacgaagtggctaatttacatagtacttagccagatgaccgaaggactcagtatccaaaggcccctaacagaaaacacagaccacatttcctttactctggcccttttcctgggggtccttcctataccactgacactgttcctgtgtaggcggggctagaggggagactaagccctcggagtagctttcggatcagaggaagtcctgctcttacagtgacaggggctgaattaaattcccaggttgggaccaccactttttagtctgacccctgcagccggagtctcccagagcccttgggaactcggcagcggagagaaggctgagggattctgcgggcagggaggagaagggagaagagctttgctccgttaggatctggctggtgtctcaagcgcacagccaagtcgctgtggacctagcaagggctggatggactcatggagcctcagggcgggttggggaagctggcgaggccgagccccgctttgggcttctgggcgccctgacctcgctcccggaaccctggggactgggaggcgggagggggcttattgattccagccccgggcgctcgctcgggggcctacagaatggcgtgtttcggggttgtggcgggccgaggggcggggtcgcagcaaggccccgcctgtcccctcctgggcctctcaaagtctgagccccgctccgctgatgcctgtctgcagaatccgcaccaaccagcaccatgcccatgactctggggtactgggacatccgtggggtaagcgagggtcctctggtgggtgggacagggggcggaggcggggatgtgtggagtagctgcaggactggctctagggaccgttcctcttcag

SEQ ID NO: 2166 - DNA, 2300 bp, Homo sapien
gtttgtactcttcctttcttctgtttagcaaaatgcccttttaaaaagtcccaaccttgcttcagttgaactgatgggcaaatgtgatttcccacacctgagctaggggatctaggctctcagactgccctgagagctgtgctgcagaggcctggccagaaccctcagagcagctccggactccttcctctgtcactcctccacattcaactagaatcctatgtctcccgagttgaccctgttgcaaatctgtgccccttttcatttgcatgggccctgccgaaattcagaagcttagttcttcccatgactataggggcctcgggcaggtctcttgctctgtcaaggtcaaaacccctactttcctaaattcaaccattgattctccatcttcatcttacttgatcagccacacttgacatagttgatcacttctccctttaaacatcttcacatggcttctgggaccttttgttttcctcctacctccctggccactccttttcagactcctttgctggtttgctctcatttttccctaacctttacatgttgatatgccagagcacctcaaacccttagacctcatctctgctactcgtgctcccatggtgatctcatctagtctctggtttcaaacacagagtgatcactcctgtacttgctgtttcccttttcctggagttctctctgcctcctgcaggtaggaagtgattcgagataagagagggagagaactcttctggccaggatagagggtgattctgagaaggcttcaaggaagaagtgagcatttgagcacggctacttgaggaaggctaggccatggacattagggtgcaggcaggagcagagcaaacatgcttgtaaaaggaacagcaattattctgttttatatttatatcagcccatggtggcccccacagcagagtggcttgatctctcacctccttcaggtctttgtttaaagattaacttctccatgaggccttctatgaacataacctttaaaaacataaatccccttcctactgggactcccccagttcccaccctgagaccccctatctctcttctcgattttatttctctccataggatgtgtatcaccacctgacttactagctatttactatatattagtttatttcttccccattagaatgtaaacttcctgagggcagggattttgtctgttgagttcagttctgtatccccagcacctaaaacagtgcctgtccataacaggcatgttaaacattgttggacagatgaatgagtgaatgaaaaatggtagtacctttcctcctccagtccatcctacacaaagaggcaagattaatttccctaaatgcgtgagcattaggaagtgggagggattggaggaggaaattataataaggaatccataaattacttaagcccataaaacaaaggtaggaaacattcaagataagagacctcttctggccaggatagaggttggttctgagaaggcttcaaggaataggcagacatttcagcaaggctgctgaggaaggataggctgtggaaattaggatgcaggtaggaggatcacagagcaaacactccaaggtgggaaatgcaagtgtgtgtagaaggaacagcaagtattgttgggttgggctggcttatgaagttgtgacgggctgagggagagacaggactggaaaagcacgttggggtcaggttgcagaggtccttgactgacagagaggggagcttggtctgtggggaatcttctgctctgtgtggtcagaggctggtctgactctccggccttgccccagtcttcctatccttcatccagccccggctggctcggtaaaaacggcgcgaatctcgctctccctgggtaactagggtccccactgcctggctagtggtgcttttcgcgtcttcactggcaccattaatgaatgaagtctggctcccacccgcggggaagggaggagcctcaacctcgggtcctttgctctcctgcagcactcctgcccgggtcccgcctcggggtcgccaggccctgaaccccaacgccggcattagtcgcgcctgcgcacggccctgtggagccgcggaggcaagggacggagaacggggcggaggcggagtcagggcgcccgcgcgtgggccccgcccccttatgtcgggtataaagcccctcccgctcacagtttccctagtcctcgaaggctcggaagcccgtcaccatgtcgtgcgagtcgtctatggttctcgggtactgggatattcgtggggtgagtgccgtctcaacggta

SEQ ID NO: 2167 - DNA, 2300 bp, Homo sapien
tggaatactatccagccataaaaaatgatgagttcatgtcctttgtagggacatggatgaaactggaaaccatcattctcagcaaactatcgcaaggacaaaaaaccaaacaccgcatgttctcactcataggtgggaactgaacaatgagaacacatggacacaggaaggggaacatcacactccagggactgttgtggggtggggggaggggggagggatagcattaggagatatacctagtgttaaatgaggagttaatgggtgcagcacaccaacatggcacatgtatacatatgtaacaaacctgcacattgtgcacatataccctgaaacttaaagtgtaataataataaaatttaaaaaaaagaaagtaatgcaaaaactgcaaaaaaaaaaaaagaaaaagaaaagaaaatgggcataacacctacttcctaaagttgttgtgaagcttaaattggaataaattagctaacatacgtaaacacttagatattgcctggcatatgataggtgctcaataaatgttaatcttatacctcaggtgaatttgtgactggccttttgctttcttgggaggagagacacaggcattataaatttcacctgtccatgtggtttgtactcttcctttcttctgtttagcaaaatgcccttttaaaaagtcccaaccttgcttcagttgaactgatgggcaaatgtgatttcccacacctgagctaggggatctaggctctcagactgccctgagagctgtgctgcagaggcctggccagaaccctcagagcagctccggactccttcctctgtcactcctccacattcaactagaatcctatgtctcccgagttgaccctgttgcaaatctgtgccccttttcatttgcatgggccctgccgaaattcagaagcttagttcttcccatgactataggggcctcgggcaggtctcttgctctgtcaaggtcaaaacccctactttcctaaattcaaccattgattctccatcttcatcttacttgatcagccacacttgacatagttgatcacttctccctttaaacatcttcacatggcttctgggaccttttgttttcctcctacctccctggccactccttttcagactcctttgctggtttgctctcatttttccctaacctttacatgttgatatgccagagcacctcaaacccttagacctcatctctgctactcgtgctcccatggtgatctcatctagtctctggtttcaaacacagagtgatcactcctgtacttgctgtttcccttttcctggagttctctctgcctcctgcaggtaggaagtgattcgagataagagagggagagaactcttctggccaggatagagggtgattctgagaaggcttcaaggaagaagtgagcatttgagcacggctacttgaggaaggctaggccatggacattagggtgcaggcaggagcagagcaaacatgcttgtaaaaggaacagcaattattctgttttatatttatatcagcccatggtggcccccacagcagagtggcttgatctctcacctccttcaggtctttgtttaaagattaacttctccatgaggccttctatgaacataacctttaaaaacataaatccccttcctactgggactcccccagttcccaccctgagaccccctatctctcttctcgattttatttctctccataggatgtgtatcaccacctgacttactagctatttactatatattagtttatttcttccccattagaatgtaaacttcctgagggcagggattttgtctgttgagttcagttctgtatccccagcacctaaaacagtgcctgtccataacaggcatgttaaacattgttggacagatgaatgagtgaatgaaaaatggtagtacctttcctcctccagtccatcctacacaaagaggcaagattaatttccctaaatgcgtgagcattaggaagtgggagggattggaggaggaaattataataaggaatccataaattacttaagcccataaaacaaaggtaggaaacattcaagataagagacctcttctggccaggatagaggttggttctgagaaggcttcaaggaataggcagacatttcagcaaggctgctgaggaaggataggctgtggaaattaggatgcaggtaggaggatcacagagcaaacactccaaggtgggaaatgcaagtgtgtgtagaaggaacagcaagtattgttgggttgggctggcttatgaagttgtgacgggctgagggaga

SEQ ID NO: 2168 - DNA, 2300 bp, Homo sapien
ccacttaggacttgccacagagctgggactgcaggaagggtagtccattgggtgtgaggattgagggaggactcccctccctgctggaacacacgattgggagctgatgccttccctgagatgggagcatgagaggggagatggtttgctgagaaataatgaactcagcttgaattccaaggtgtctgtaagccctccagagggatcctagcacctctcacagtgcctagcaggcaggaagccctcaattctacaggaagttgtggaatgaatgaacgaatgtggtcccacagccttttaaccccacaatttcaaggacatgcccttcgagtcctgcttccttcccctccaacctaagtcccagctcctggtgcctcagccgaactcccttgcagaagagctgctgtggcacccggagctttgtgcagaagcttcagttatggccccaagtccccaggtatgggaagcttggcctctccctctttcctgatttccctcttccctcagggggctccacagaagcagatgtccccaatacctggccccaagccccagacccaccaaggccacaaaggctttatgtctgaggagacacacactgctcccaggggcacccctaaagggcactgcagagggcaaggtgctgggaatgccactcattgtttctctgcccctgcccaccttgccccagagcccccccaggagtccctgctgtgctcacactgacttggggagggtcctatgggaaggacgggcctggcctgagctgggcagaaatgaggtgttgcctgagccccaagccagggctggggtgaaatatgactgtggccttcacggagttgggggaggcaacgaggggacaggctgtgctatcccaaaagaagctgaagggccacaagatggggacccaggggaaagaaccccaggactgcttcccatggggctgtggctgggtgctggcctcacaggcacctgatccctgggccccagcagctggctgtccactggactctcccagggacacacacagcccagacagggaaggcacctccctaggatctgacgcatggactccaggccatccagggcagcgttggttgggtggtgatgggagagaaggctgagatatcctgggatagttccagggaagctaaagatgggagtgctccagccctcagactccacaggacactccatcacagggcccagcaccgggaccctgcattctgcccacgagggtccgaggctcactggcactcccccgcccccgcctcccctcctgccctgctccctggtttctgtttatacctggccttgttggttagactgtgagttcccagagggcaggggagcctggcccactctgagtgccaagaaagatttttcgataccatggagtgcaggaagtgggtaggtttatgactagagatagatgcaggcctccgttttccatctttgctgaagctggccaggcgtccaccaggggtctgggcacaagatggggtacagaaggaaagagagtggaagagcgagaaagggctggtaagggggctcctgctggaagggacaacagtagggacagaatgagggccctgccagagggaatctcagcgctccatgtaatgccccaggggcctcagtccccatcttctgtgacaagatccatgtcctgctcacaggcaccacccaggtacacaggatcacacacctatgggtgccacccacgcacaggcatggcacacacgccagcccacagcttcccccaagcctggagtccacctccagccgacctgtgccctcaccacagaacccagactctgggccatgtgtgctctcttcttctggtcccagccccgtgcctgatgctgacctgttccccagagtaggcacctaaaaggcagagggaagagggggccacaccccaaggctagcagtgggggaaacagggaagcaggggcctctagctaagctggggacgccagtcagcacagacactgccgcaggtccaggttgatgttgagcggttagtgaccaggaagcctccccacccaccagagtccaaagagcacaggcgtggctgcctctgtaacctcatcaaaggcaggctctgcctgtggccactagcagagaagctgctgtccttccaccaccagcaccggaccacctgctccaagaccagcctcctggggggaccaggcacccggccttcactggcacccaggtaagggcctggcccccagggaagatcggggcccagcccagtcacaggggatctcagggcaggtgggggcaactcagtg

SEQ ID NO: 2169 - DNA, 2300 bp, Homo sapien
attgtggtgtcattgctttagaacccatgtgagtgaacagataataataacaatagcacttactgtcttcaggccctgtgctaaatacttcacaggccttatctcattcaatactcataacaccttggtcagagagagaaattaacatctctattttatagacatgggaactgagagaagtttgtccaatgtcacacagcaaatgacttggcagagctaccaaggtcaaatcacttgtaagtagtggagtcaggttcaaaccagggtatgtaaagaactccagtgcggggaatgaggacctcaggccttgcaccaacgtggagaatgattacgttcctccagaagctgagcaaagtccaaatgccagcctcagtgaacctgggccagggctgggttggtgaaggaaggagcaagtaaaactggacccctttctcaacaagtctgttggtttatctttctcaggttacttcctctaaccttttatcagtcttaagaactgtggtgtcaacatgttatctgaaatcattattgtacagtgaccatgtcattgttgtatccccagggcccagcacggtgcctagcatctggtagcacatatttgtcaaaagaacaaagtattctctaatggcatcattcaactcagccatcattaacttggtacctattatgtgctaggtaccattgatccagaggtgactgagcatgggtgccacctggaagaagtctcggtctagggtggggacagaatgtaaccatcggtaccaccttaaacacttcgaaaagtactgtggagaatgaatggatggcaaatgacttatcagagccagcattgaggaatgagccaagtccaatgggaacacaggaaaaggaccctttgctctgccaggagagtcacagaaggctttgctggtggaggatgagatgcaatttcagcctgaaatgatgaggagtttgtcttcagccatgtggagaaaggagcattccaggcagagggaccagtctgagcaaaggcattcgggtgtaaaattattgcctaggattggagtgaaggatatgtagcgctactgacaagagactcctcttcaagagcaggccacatatcctttatttcccagggggtggaaacgggcaacctcacagaggaattgaatcataatgaattgaagaaagaaaaatctcctgaagttggcattataattaataggcttaggctcatcctactagtcctcacttagactcattctcatgtagaaacaaaacgtgattaatcacctcagtaagtgcaatttccaaaaacatccagggaaatctagggtccaggtgcaggacctttccaatctgagttggattttgcctccaggagagagcatgggtaccagccagcattttcatcatctaagggtcaggtgccttgaagtgtctgctggcacccagggaagagccccccagcttgctgtcacaggacacagctgctcccttcctggccaggtagctggcctccctcccagaatgggacttgaagctggccgggctgcttgggggctgcagaggaagaagggggctgccggcaaacctgctgactcaggctccacgagggagcaagtaacactggactcctttcggcactccgagaatggggtgggggcgtcttcaaaggatttccctcccttcccagtgcttgtccctgctctcggtccgttttctgctaagatttggggattttcaggcctggagggaaagtcccttgggacgatcatagagcgctagcactgaatcagcctggagagcgcggaaggaaagggtcggtccgcagagggcgcggggaaggcagggtggggacgcggtggagcccgcgctcgtttgctgaaggcttggaagtgcagcgcagaagacagagggtgactaggaagacgcgcgagcggggctggccggccggcgggtgggggaggggaggcgggggaaggcggctgagtgggcctctggagtgtgtgtgtctgtgtcagtgtgtgtgtgtgtgtgtgtatgtgtgtgtctggcgcctggccagggtgatttcccataaaccacatgccccccagtcctctcttaaaaggctgtgccgagggctggccagtgaggctcggcccggggaaagtgaaagtttgcctgggtcctctcggcgccagagccgctctccgcatcccaggacagcggtgcggccctcggccggggcgcccactccgcagcagccagcgagcgagcgagcgagcgagggcggccgacgcgcccggccgggacccagctgcccgtatgaccgcgcc

SEQ ID NO: 2170 - DNA, 2300 bp, Homo sapien
caaacccacaaggatgaaagccactgtgagccttatgttcagagagtccttagtgcaccaggtgtggttcctgacccctagctgaaagatgtcagtctggcaccctcatggatgaacctggtattctggtctccatctctgttcccgttctgctacagtgatgcccctgacagggaagtgtgagtgctcaaaaaagtgagcagatgaaagaatacaaacagttcaagaccaaggtctgcagatgtgcaaagggtgcattcttccaggcacttctacagcccttttcaaacagacagtctcatgaggctaggtggctggaacacaggattccctgactaagacttttagggccctagaggtgaatatttcacactctccccagccctgaacacaaatcagtggggaaaatgccatttcaaaccaaaacttccttcttgaaagggtatgccctgttaaaaacctgggaggtttctggatgttaaaaggtggtcctggccaggcgcggtggctcacgcctgtaatcccagcactttgggaggccgaggcaggtggatcacgaggtcaggatccgagaccagcctggccaagatggtgaaaccccgtctctactaaaaatacaaaaattagccgggcacggtggcgcacgcctatagtcccagctactcactcaggaggctgaggcaggagaatcacttgaacccggcaggcggaggttgcagtgagctgagagcactccagcttgggcaacagagcgagacgtcatctcaaaaaaaaaaaaaaggtggtcctggggaggaatttagggaaagggcactgggaagactggaattgctcagcacagcagaggagaatctggcttcccagagtctatcaaggaaggaaggatgaggtgcagagatgggaagggaggaacaggaggaagctagattagatggcaatgggctagggagcgtggtgggatcttgtggccattgagaaatccccgggtggtaagacagccaaaataacttttcagaacatttcagaaatgtgttcttaaattgtttgctgtgtgatgtaatctctcccctgtgacccacaaacctttattaaaagttttactacatgttacagccttattttgtagttgtttagcatggggtgggggttgaaaggagaagcggctgaattgaccccaggagctacagaaacagtcacaagaccagaatagtgaataaaatgccagacaaggcaaaaaaactagagccagaggtgaccatgaaaatccaagtcctcccagtaatggactttccacaggacatggtaattggagccaatgtcatttgaatctcaaaggacaagctacctcagctgacattaggatacaagcaggttttgcctctccagctgaactaagccttgcaaaacataaaatgcgtcacatgtccttttgccagcagggcctcagcacaggcactgcacatagtaggcccagtaaaagggtgtgagcagtccatgaatgtcctggatgcccactgagagctggaagggtctaatgctttggtggagcaaggaccggaaggccattctggctggggacttctccatcagctctcctggtctccaccctcatacccatcagccctatcccaatgagggttttgtaaacaggcaaggcccagtcggagatggtggtggaggaagtcacaaagcgttgtgcagaaaccagactactctgagtcagttctgccccctatgaagtcaaaaagacaggcacggccccttgggaaggagctttaatccaaagggcctggggctgggccagtgagtgagtgggctgtctcgagccccggacatttcctaggaatcgctgtaggatgtgtcgtgtggggctctggtctttgctcccaaacacccctttcatgcgcctctgaggccttgccaggaaccccgcagcccaaagaccctccgttccgcagcatcgttgcatgaacctcgcgctgctcccagggctgatggtgccacctggtggcacaaagggtcctgctcaccctgggaacttcgctctcgagcgggagaggaacggcttctgtggcccagcccagcgtggtgacgtcacgacagagtgccctttctccccgcctcttccccctcccgggagctgccagtacttgacgtggcgtcaccgccctctaccctcgctttgcgtgcgtgtttgcgtacagcggaggtggcggcgcgggcaggtcggagctcggagctgctgttctggttctcttgtggccgccgtcgctgtccggctgccttgggctgccgaacag

SEQ ID NO: 2171 - DNA, 2300 bp, Homo sapien
tgtatgcattatagaataaacaaacattagagacaagacatacaataggaaaattaaactttttttaaaaaaggtaatactaaatctgaagtagaaatatcaatatgaactcataagtaaaaggattgatttctctctctaccaaaagaacctaggagtagtgcatctctaatagcaattatcacacctcttactccaggtattagcttctaaatactactcccttctaaaagaaaggctcctgagagaaatggttgattccaggtttggagaagaggaagaacaaggtgagcctggtatatcttcttttgtcaaaaagagtggaaggactgtaatggaatcatgtcaaaggacagaagagccagcttgaaggaggctcccactggcccaatttgagacaatatgagtattcagtgcaattaatgtataattaagtgtaatctgttaaatacataaaaatctgaatgacaaagggagaagatttttctttacaaaagaatgccagctaatgtggaagcattgatagaaaaatagaagttgcgattctataaccttcccaatataattggttcaggcaaggattattaacagatggtgaagtcattagggaataggatattaacatgatgaaaaaagtattgccctacaaattaacttttacttgcaaaagagaaaatgtacctttcaaagaagagatctgatgttctcactttaaccaggactcaatcttagcattgctaatagtggaacaacccgacatgtgcctcctgataatgatgcaaggtgaaatatactacataatgcaggaaatattcttgccagaattttaacctttttcaaataaaacctcagaactgaacttccagtttataggaaggaaaccctctgaaaaattcaaaacatgagtgattttataagacaattagtctggattcctcaaagaaaagtcagtatcacaagggggtgggagacattggagagactgttctagattagcagaggctaaaggaacctaacaaccaactgcatttaatgaaccttgaatccatgctgggttggcagggttgaggagactgttgggatataaataaatattcttgagaaaattggggaaatttgaatataatctggacagtctggatatatgaatatatagaataattgttaatattaagtgtgatatgtcatcatggttctgtaggagaatattcttattcttagaagatacattctgaacaatttattggtaatgttcatgtttgcaacctttatttttacaggaccatgtgaaagtatgcatgtgtatgtgtatatatatagagagagaaaaaacctattatggaaaacggaaagatttattctaggtggagagtacaggtgtttattatactatgcttttgaatttttttatgtgctgaaaatgattataataaagttggaaaagtaaagtacaacaatggtgctagcgagtggggatggagggtagggggtgggagaggagactttaatgttgtcactaaagtagtgggtatgttccaggaaccaggatttcttcagtcacctgtactgatttttttttttaaacctagaattgatgataaatcaatatcgggagaaacagagatgactggcatgtgtttatataatattggtggtgggactgagaaaagaagtatggacaggtcaggcaactaggtaggtagtagatagctaaataggcattgaaacagtctgggtgtgtgttacattctgttgcaaattgtggtgttcaaaagattgggaagcccttttctgtcctacttactgccttttttctaacttcttatgtttacttctagttggcagttgcaggcctcgattactcattgactggagcactttaggagataatagtgaagtgaagtcagtgaagtgtttagtcttacaggaagagaggggagtagctcacaagggtcaaactactctttggcagagtttttcaagctgtgtgttccttaccttttaagtgactcagcagtttggggcctggtattgcctcacctcttctcgccgcgagcattgacagaagatctagttgagtcctactttgaaaggagtattgcttctgactgtggaattggattctagctgtgtgtgtgttatatcctgttactgttgagacacagaggcgggagtcggcgggggaagatatgtgctgagattagtcagcctgccctccctctcccccaagaaactcaggccccatctggggagagtgagaacttaagaaacttgagacagggaaggagagccgggagcag

SEQ ID NO: 2172 - DNA, 2300 bp, Homo sapien
atatcctcccctgttagactctggagcaggaaagattcagactactgtaatgtaactccagctctgtttctttttagttctctcctcctgtcttaactctctgtaaataaagtctttttctgttttgtattgtgtctttcccaactatagagcatgtattagaaaattagcatggaaaagaatatagaatcttggcagatgaatacaggagaaaacattagggacatctaatggggcatccaatacaaccttgtcattgtttaactgaagactcattgttaaaagattaagaggttacagattgctattaatgtcagcagagatatttgtaccaaaagccattcattgtcctttgccagaataccttttgcattgtattatcaacattaaggattaacataaatgaaaagctgttatatatgatcctggagtgacagataaaaagtggtgtgtgacaagcaggctaactgtagccaagaaagaagaaaaattaattgtgaaaaattgagttatgagaggaagaacgataaaacgactgaagaaggcttttaaaaagtcttcaaagatcttgacggccatgttacagaaatgtattagagccttttaaaaagcttagtgatatggttaaaatgtcatagtggggaagataatctttagtagtatttgtgttagctggacaggaggaggacctgtacatagaagtcagtcagtgagagagtccaggtatactagcagaaaccgtgatgaggaaagtactcaattcagagaggaaagaagtgatttgagaggtaaggaatgattgttgtatatcctcttgcatatctgtcagataagtggtatttttagcttttatgtgaaaccactttttaaagttgatcattttgacagactttcccagggctatcagtagaaccagagctgtttgccttttgtgccatttctttctttctctattccttgagcacaacttagtgtaaaatcccttgtaagactatcttatcacttttgtctatatccatggttctcaaagtgtgatcctctgactagcagcatcagcaacacctggtaacttgttggaactactaatgcttaggtgccactccatacctgccagatgggaaactggccacagggtctagcaatatatgttttaacaaaccttccatgtgatcctgatagatgcttgaatttgagaaccagtgatctatagaaatagcattccttatctgccctaaattattcttctgtttttgccaggtctggttccaatccagatgggaccaagtacctctattatctgggattactatagctgcaggtttataatcagtggtcccttgtcataggcactaatagcacagtattgttagggtgggtgaaagagctgcaacatggaagtacccacaacagtttcattcataccacctattagaacctagaggagcagaactgagagcgttgtaaaaggtagctccaattaagggtgttcccttaacttaaatgaaagtcccttggggactgcactctgtagagttggggaccactgaggtttttctatccttgtttttttctttcctggctctagctgcatcctacacagatagctctgatgatgaggtttctccccgagagaagcagcaaaccaactccaagggcagcagcaatttctgtgtgaagaacatcaagcaggcagaatttggacgccgggagattgagattgcagagcaaggtaaagaaagggagtgggttaggggaccagaaacaaccctcttgttggccatcagaatccacaaacaacttaagacttgaaagctgacttgaaagtgtactgggaagaaagacagtattatggactttcggataaacacttctctctctatggaacttaagtcttgggattttgttctctcttccttctgttctcagcatgtggtgattacacacagagtagtttctgttttcctccttgccccaccccaccactgtattcaaagatctacatggcagaattgacaagtcctagatcactacgtggtagttggttatatgggatcttactatagctgccaatggcagagacccagattgcccagaagcagctgatgaggaagggttttaaggtaaggatgtggtgacctagagtcttgtttggtcctgagcaccctctgctggagcagagtaaaagtgactgacagttaaatcttggtttctctaccccagccactcccagtaaggtcctctttactcttgtgttgtttacacattgaaggcatgttctatactgagagagaatagagaaa

SEQ ID NO: 2173 - DNA, 2300 bp, Homo sapien
agatcctggatgatgggggagacttaacccactgggtttataagaagtatccaaacgtgtttaagaagatccgaggcattgtggaagagagcgtgactggtgttcacaggtaacagattctggagtagctgccccttgtgtccttgcctcagcaaactctcctggtctctgttaggctttaggactgtgtttcagacttataactaaatgggaatatcttcattagataaaattttgagtttttacttttgaaaaatcaagttgatcctagaaggaagttatttcaggttctagttcatacatttttctctcccatttactccattgagtgattctcaactagtgttgaggggcgggtagggaataaatgtatcttgaaaaactgtattcaatattgtattatcattttatatttgaaatatgaaaaacaatcctattgtaaaactacatgttatacacactacaaaaagtaaaactgggcaaaatattcttggcttgttggaatactgaaaagatatctgaaagagtgtttcttgggggcacattgcgcatgcttactcacacacacacggaaccatatcagaatcattgatagtctttgtttatcagaagtaggcatgggtttctattgaaaaatgctgatcaaaggaaataacactccctataaagggaagagaagtacatttcttcaattgaaaggcttttttttttcttccaaaaaaggggtaaagggagaagaaaatgaaaagaagtgtggagggatgacaaggaaataatcatgttttctaatatccttgggcaataaatgagactgggaagggcagcatggaacttgaagagaattaggcagattttgccacaaattatgttgtgccagctaacttggtttttgtttgtttttgtgacctcttctctctttaggctgtatcagctctccaaagctgggaagctctgtgttccggccatgaacgtcaatgattctgttaccaaacagaagtttgataacttgtactgctgccgagaatccattttggatgggtaggttgaatgtatatatattcaaacttctaggggctctggtcttcctttggctttaaaagtttattagagggaccatttcatactgagctcaaccagcttccaattgatattctcatgggcattggcccacacttttaactttgtgaagagggactgagtttgagctattaacgtttgagttgagcccttgtctgtttccacagcctgaagaggaccacagatgtgatgtttggtgggaaacaagtggtggtgtgtggctatggtgaggtaaatagctgggtctcagtgtctctttctttttgtgtacttattagaaatattgggtaaaggaggcttgtgctgtcaatctagagtcactgatacaaggtttaaatttttttagataatgtatctcaaacaatagcaaaagccttttattcagatttatgaatagaaacatacaaaatgaattgagttttcagattttaccattttgccttgtggaatagatactagtatcatcttccccaattataacaataacctttaatgagacttaattcaagtgaatatatagcattttagccccacaagtgacttgcagtagaattaagggtggaatctgaaatggcatatagttgaatatctccaaactggaataggtcacatattttgttgtcttcagcaatgacccaaagaagttcctgagctacgagggtatccttgagtagattcttctcaagtaagagaataggaaattagaggttgcttagagtaagttgcttttgcttagtcttgtttccctgatgaaaactgctatgcaaagccccagtccttcctatgacatgtctgctaaattacctctctaactgaggttcacaacgtaatctgggtctgtttctgttctgcttgggattggagcgtctgtgcagctgctcaccagatgacaggctatttcatgaaggttaattcctgtctcacaaataacctacctaccctaaatatccatgacttaatgaacctaacgacttgacctttcttttgttctgcaggtaggcaagggctgctgtgctgctctcaaagctcttggagcaattgtctacattaccgaaatcgaccccatctgtgctctgcaggcctggtaagaacagagtgataatactattagattcactctaggtgctttatgttattgagagttcataattgagtatattaatcatttttgcagaaatcacctaggggaagagaaggctaggactgctctgttcttctcactc

SEQ ID NO: 2174 - DNA, 2300 bp, Homo sapien
cgcccgacctttgaagacattttaaaatgtccttagtagagacggggtttcactgcattagccaggatggtctcgatctcctgacctggtgatcggtccgcctcagccttccaaagtgctgggattacaggcgttagccaccccgcccgacctttgaagacattttaaaatgtcctccagaaggaattgtcctgggttgtggccctgagggtacttgtctttgatccaggcctttcttcctcatctggctgtcttgtggcgtagctctccactacaaccaccagatggcgcgttttctcatgtgatctggttgtcagggtctcttgccaacaaaggataataaaatacaggtctggaattctttctctgaatctcctatgttttgaaattgagaatttcccaggtgtttaggaaatagttaaagacacagtatattacataatactttgacttaatctttaaaaaagtttttctgtttagagacagggtcttgctctttctcccaggctggagtacaatggcaggatcacagctcactgcagcccagaactcctgggctcaagcgattctctcacctcagactcctgagtagctgggatgacaggcgcgccacaatgcctaattttataatttttttgtagagatcaggtctcactatgttgcccaggctggtcttaaactcctgatctcaagtgatccctccactttggcctaccaaagcgctatgattacaggaatgagctaccatgaccagctttgacttagtcttttgactaattcatgtttatataagaaagctgagattttataagttaatctgacctgagacagagtgaagctggctggtccctttggaagacagaattaactattagttatctgccctattagttaattaaccaaaacattattaatattatcctcttctcataaccattaatggagagaactccatgtgacacagtaactagagggtaagactggacccacagatgttttatatgctatacagattactttaatactgagcatttcagtgaccagcaatgtatttacagtccagggctaggatggaaattgctagaaacaggctcactctgcatcccagcatatacttaggtatcaatgaatgtgaaacatcttacccagtacctgacaccctgtaggcacagaatacatgccagtttccttctacagagcccaactggagcagccactatgttcttgcaactcctgcaatactagaatggctcaaataggaaatttcttcctccagtctcttgaacaatgactgctcgtggtgaaggaagggcttctcaccttgggtatcacctcttggtaataattctcctttttttaaaaaaacaaaccaacaaacaaaacaaacaatgctttatagttttctcttttctctttctttctttctttctttcttttttttttttttttttttggagacagagtcttcctctgtcacccaggttggagtgcaatggtgcagtctcggctcactgcagcctctgcctcccaggttcaagcgattttcctgcctcagccccctgagtagctgggattacaggcgcatgccaccatggctgaaaatgttacaggaaagggtctcaatccagaccccaagagagggctcttagatctctcacaagaaagaattcagagcaagtccatagggtaaagtgaaagtaagtttattatgaaagtgaaggtataaaagaatggctgctccacaggcagagcagctccgagggctgctggttgcccatttttatgcttatttcttgattatatgctaaacaacgggtggattattcatgcctcccccttttagaccatctgggataacattctggtgttgccatggcatttgtaaactgtcatggtgctggtgggagtgtaaaagtgaggaggacaagaggtcactctcatcaccatattgattttggtgggtttgggctggcttctttactgcaaactgttttgtcagcaggttctttatgacctgtatcttgtgctgacctcgtatctcatcctgtgactaagaatgctctaatatcctgggaatgcagcccagtaggtctcagcctcattttacccagcccctgttcaagatggagttgctgtggttcacacatctctgacaaaaatacaggtgggattattctcattttacagatggggaaggaaaaaaaaaagagaagtgcatgaagacacttctacagcttctactctctactggattgtgcttttcgcaaagtttcctagcaagttagagtagtgagctctcc

SEQ ID NO: 2175 - DNA, 2300 bp, Homo sapien
acacttctaagatgtctgatgagtatctcaaacttgatgtgtccaaaactgaagtcttgatctttcctctaaacctgtttttcttactctcgagcttacttatttatgaaagtgatacagccatccactcagttgcccaaacctagatcaagggggtcattgtttatttcccctacccagctgataagattccagcaaatcctgtccccctacctacacaatatagaaatatcaacccaatgctccactctggtacaagcaccatcatctccatctacatggtcccctaacatgtcttgccttatccactcttgcaactctccaatcccttctccaaaagcagccagattgaacttgtaaacatcacaccataacatctccctggttaacaccctcgaatggttttccatttcacttagaataaaattcaaactccttcccactaccttcaaggccctgcattcttctggtccctgcattatcattatatggctctatcaattactatccctcccttggctcactcaattccagacactaacatcagggcttttgcatttagctgtttcatctgtctgtgtgcccttcctggaactttgcagggcttctcctcacttctttcagaactcatctaaaatcacaccctcaggcctgccttccttgggcagcatgcttatattatagccacattctccgcctccaccaacccctgccccccgccccactgccaccttttaacctctcaatttttgttacttctgacaaagattctcttctttggccaaaactctagtcaggctcctgtgagtcctctgcctactaggactaaccgtttgggcttcctttctgtccttgttgaatccagtttgtgcagggactctccactcttggcgtcttaatccattttttgttgctataacagaatacaaaacactgggtaattcataaaggaaagaaagttattttttgcagttctggagtctggggagcccaaagtcgaggggttgcatttggtgagggctttcttaaactgcatggtagagagcctctcacggtgagaaagcaagagcatgtgtgccagctcagatcactcttcctcttcttataaagccaccagtcccatcacaggggccctaccctggcgattttatctaatcctaatcaccccctcaaggctccacctccaaataccatcaacatatgaactttaggattgagtttccaacgtatggaatttgggggacacagtcaaaccatagcactcggtatctgaccaccctcaacatcttagcaccctgtcctgctttcagcaataatcctgttaggtcagtttagcaagaaacttcttatccttgatgtttctcttagtagttttccgtccactgaccctcatcctgctctttggttataaatccccactatatcttgttggagtcagagttgagtctaattcctcttcttcactgcaagatctggttgtagtggtccctgtaactatcaccatgggctctcttacataaagtctgccttaccatctttaattagtgccatgaacaaattttcctttaacacttttcagcatttatttctctatatttgtctattgtttgtctgacccaccaagcactgttatgtaccgtgactgcagacacttgttcctcattttatcccactgcttggtgcacaggagacatttattaaatgtttgttgaatgaatgaatgacaagcacttgtcacaacggtaactctgtgaagactaggatcctatccattttgttcattacaaaattccgcctaagccttgaacaaggctatgagttataagtgcaaagcgatttagaggaaggaggggtaactaaactgactgaagaagctaagggaagcctcacagataaaattacatctaaactgaaactgaaaggaaggtggaaaactaaaaagatcaacaagggaaggactgcagacagaatatcgcgaggtattggtcagccaagatggcttctaacactggccgccacacttaatatggcggccagggaaatttcctggagaaaatcacgcgagagttgcatcacggcggctgtgcgcgagttaagctgggggtgtggagcagccaagatggagccggcagtcggcggtccgggcccactgatcgtgaacaacaaacagccccagcccccgccacctccgccgccggcagccgcacagccaccacccggggcaccgcgggccgccgcgggcctcctgcctgggggcaaagcccgcgagttcaaccgcaaccagcgcaaagactcagagg

SEQ ID NO: 2176 - DNA, 2300 bp, Homo sapien
ttctggtcctatggcagtcctgaatttggtgagttaacatgggtccatgccattgtgaggatttttctaggctcaggtgtaactggtttcttgccctgcagtgacagacaagaagtggactgagctggataccaaccagcaccggacccatgccatgaggctcctggatggcttggaagtcactgccagggagaagagactcaaggtggctcgagcaattctctatgttgctcaaggtattgagtggacctccccagggttccctggcacctctgcccactcagatgcagggaggggctcagtgagttgaaccctgcattgcaggcacgtttggggagtgcagctcggaggcagaggtgcagtcctggatgcgctacaacatctttctcctcctggaggtgggcacgttcaatgctttggtggagcttctgaacatggaaatagagtgagcatttttgagaggctgagtagggaaggggaggctgggatgggaagggggacagagcttgcagaactaactggctttgagagggttaaatggggcagaagttctggtcccaggctgtgttctgaccacctgggttgaataacggagttggtcacttacaccttgaagattaatggagactaatgacaggtccctgcagctccctgatgccagagtttttacaccagacagtgcaggccctgcccaggcctggggtgctcctcagaaggagactcttcactttgagctctcttttgaacctgcagacactgctgtgttcgccctgcagtttccgccttggcaggaggccaggcacaagactgacatatgggctcaaccagtgcctggccttgcctgtgtcacctttgtccagtggacaggtcagctgctgctcatctaaggataacaccatcaatgataaagctaagacagctcattgagtgcctgtgtgtcccgggcattgttctcagaatattacatgtgctaattcatgttaaggatataggtactactgtcatccccattttacagatgaggaaactaaggcgcagttagagccaggattcaaaccgtggcagtccagtgcatggctgggttttttgtttttgtttttgtgttttttttgtttttgtttttgtttttgagagagagtcttgttctgttgcccaggctggagtgatatggcgtgaacttggctcattgcaacctccacctcccggcttcaagctattctcctgcctcagccttctgagtagctgggtttacaggtgcctgccaccacacccagctaatttttgtatttttagtagagatggggtttcgccatgttggccaggctggtctcaaactcttgacctcaggtgatccacccgcctcggcctcccgaagtactgggattacaggcatgagccaccatgcccagccatggtctggtttcttaaccaccgtgtcctgtggcctcttgtgcagtccaagcacgtatcacagcattttgtttccccattggtcagtacttgtcagggacatcacttatcttccttcttggaggaagatgctgactctcaaaatctcctgcagcaacagtgccgcctgcagcagtgctgtgaggaagcctgccatctccctggctgacagcacagacctcaggtgaggcgagcagcaagcctgggctcctgagcgttagtcagagatgagatcagagcagggtgtgggaggctgtctgtgggtgtcattgctgtgtgtgcttctgtacacatcatctgcatgtgtgatgggctcagtgtgaatgattagtaggaactgctgagggctcgtcctaggtgggactctgggttgagactcccaaaggcaatccagggtcaagtgacttactagagccacagctaagtgtggcctcctactcacactgttactcaggacctggtcgtggggtattttgtatttggatgaaacacttgatggtgttccctggactcccaccttcttgtgtacacagcttgatgctcatcttcattgggttagacctgacagcttcctaatgtttcatggctgcccaggagctcacagcaactgctgaccaccaagatcacccctcagtttttgagggttgaaatctggctctttttatgaatttggaagtttttagactaggtggttgtagtgttgcctcccgggtgttaggatccctgggcgtcacctctcagctcctgctttccatttcctcatcataaaccctgtttttgttctcactgtgaccctgttctgctttgaccctacagctcgctaccacctctgtggtttttttcttttcagg

SEQ ID NO: 2177 - DNA, 2300 bp, Homo sapien
gggtaggaccctggggatcctctctagaggccctgcctggaagctgaggcggaaggctttgggagggtcctgatacctttgtgtcacctccaggctccccgctgtacaacaatgagccatttgccatcatgctgtttgggatggtgaccaaattttgcagtggtcacgcccctcactttcccatgaagaaagttctcttgctgctctggaagacagtattggtgagcacctccttggaggaggagaacggtgctatgggatgggcagtagggagactgttccttgaatatccttttgaatattgaattatgtgactgtaaaactgctttggtaaaaaaaattatttaaaaagctgctaaaaggagatgacaaaagaagggccactattgtcccattgcagccaacgaggacataggccttgagtcagagtaggctgttggctctctgaccccggaagctgttttctgtcatagaacagctctcccccagacaagttgcctctcagcaagcagctctggacctggagtttgtaaagggatttgaggcaaagttacagctgatgtaattggggccctggttggatatcacttaaaggggcaagagtgagccctgagccagcctccattttcttcagggtatggtgtcagcccgactctgtgtctaggtagggagggactgggtgccagagtgggccgtccagcacactgggcttggagcgttgttagcagccaggccatgccaggaggccttcccaggaggagtgacatggggaggcggtggaggtgagttgggcctctgctacactggggctcatccttcctttcagaatgggtcaactctggagccagggctcagtaagtataggatttcttaaaagtcattgacacattttatcttggccacacattctgttcttcataaagccttgctaaggctagagaggaaagctgaattgctcagaaacagtaaaactaagcagtctaaagctggatgttgctggcgtttctgcttcttgggagatgtttagatgaagctttttttcttcttctaaagttgagcaaccaacagtatttctaatttgactttgaaagacttgcatgtacaacttgtgaaacatgagtctcaccaacttttctaggaacttgcagggttaggctctttgcttctttttaaattgaagagtatgtcataggtgcagagttagtgtatctgcactagggtcagtcagcctgcatctccactctttccttgttcctttttctcctttcccttgcggatgtcacggaattctccttgggagtggcttcagtccattgttcaggagttgcctgggtctctataaagacatgggtcatgatgtcatgaatgtttctgagcctgacacaatggtcaggggccagcctgtggacacattgaccctggctctgcttccctgtctgtgatgcagtgcacgctaggcggctttgaggagctgcagagcatgaaggctgagaagcgcagcatcctgggcctccccccgcttcctgaggacagcatcaaagtgattcgcaacatgagagcagcctctccaccagcatctgcttcagacttgattgagcagcagcagaaacggggccgccgagagcacaaggtgaggacgacagaggtccctgtgactcctgagggccctcaaggtgcatgcttgcagcagcacagtccttggaggagcagggctgctggaaatgatctctgatcagccagtcagaatcatgcctccacagcgaggatactttgtccccagctctggtccagtgtatggtgagtgctcagcacgtggtgcttttgagggactggagcaagaagtagttgatggtttggcccccgtcttgactcccactgtggtttttccactgttcttgcctctactggacacctgtatgtgctgtgtctcctctggctgcacttccctggtctgcgtcctcagttggctcttgtctcatctcccttccctggtttcaggctctgataaagcaggacaacctagatgccttcaacgagcgggatccctacaaggctgatgactctcgagaagaggaagaggagaatgatgatgacaacagtctggagggggagacgtttcccctggaacgggatgaagtgatgcctcccccgctacagcacccacagactgacaggctgacttgccccaaagggctcccgtgggctcccaaggtcaggtgagtctcagacctccagagcactcatagttcctgaggcagagccctcacaccctcaggcctgccacctggcctgtgtcacca

SEQ ID NO: 2178 - DNA, 2300 bp, Homo sapien
ggggaggagaagagagcagactctcagcaggcagacaggttctaaagagaaaagagaagggtgaggacaagtccgccctgtgtcccctcccatactctccgatcagagaagggaggagtgagtgtgtggacggggcagagagagatgaggggtgtttcgcaaacccctgtccctccacacgggagagaacattaagagtggggaagaggcatctcccctaacagctatctggagtgaaactgtttttatgtttttgaaatatatttttggaatttgtagtactaagtggtctctctgcagctaggctttttgagtacttgattttgctttcagtttttctcctgttgctgtagctatctgaaaggccatttccctcctttaatttacttttttcttatctaccatgggcttcttactgtagttgcaagaggaaggggcccttttagaaaaatattttggggccaggcatggtggctcacgcctataatcccagcactttgagaggccaaggtgggtggatcacctaaggtcaggagttcaagaccagcctcaccaacatggcaaaatcccatctctactaaaaatacaaaaattagccaggtgtggtggtgcacacctgtagtcccagctacttgggaggctggagcaggaaaattgcttgaacctgggaggcggaggtggcagtgagccaagatcatgccactgcactccagtctgggcaacagaggaagacttcatctcaaaaaaataaaaataaaaaatatctggggtttgggattttagctagggatttttgtggtgacttaatcctctttcagaagactgtgtttgaagacaaatgtgtggggattttgctagagtgcagggagtttggccagagaatgttttccccagcccttcttttcccatctctcccaccagcacaagtacacgtcgattgcagaggtccaggcacagatggaggaggaatacctccgctcccctctctcaggggtaagttggaggtcctcagtccgggcgcggtggctcacgcctgtaatcccagcactttgggaggccgaggagggcagatcatgaggtcaggagattgagaccatcctggctaacatggtgaaaccccgtctctactaaaaaaaaaaaaattagccagccgtggtggcgggcgcctgtagtcccagctattcaggaggctgaggcagaagaatgacgtgaacccgggaggcggagcttgtagtgagccgagatagcgccactgcactccagcctgggcgacagagcgagaccatctcaaaaaaaaaagttagaggtcctcttcagcccccgggatccccagctcttcccaggcattgtgctgggattagaccacaaggttgccccaggccctgccctcaaagagctcccagtccacctcccagtgcacaggctgagacacgtctagtgcagggttaagaatacagactgagtcaggaacctgcctctgatgcctgggtccaccactttatggatggcaacttaggcaagttactgggtctctctatgctttatttccttgtctgtgaaataggaataataatacctttatagggttataataataaggatgaactgagttattacaagtaaaatgcttggcacattgtttgtgttcagggtttgctgttatcatcattaacatcattatgtacatcactgtttacaggttttcctccagccagctaggaagctggctcaggagattgtattctgggctggggttttatgcttgtactcattatgttaaaagggagaagaagaagttgagcaagtccctgcagaaaccctctaccaaggcttgctccccagcctgcctcagtatatggtgagtggtgcctgcagtgggacactcccactacactggccttagagcaggccctgccgtcctcctgccacctgcagaccaacaggaggactgctcagagcttaattttgaccctgggctctcagacctgtgtctgaatggtctactcttcccagattgccctcctgaagatcctgttggctgcagcacccacctcaaaagccaaaacagactcaatcaacatcctagcggacgtcttgcctgaggagatgccgtgagtatcattctgtgaatgaagcaggtggggcagaagatagatggagaagggcaaacattttcctcttgtcaggttggttgttgttggcccagctctacaggttaaatgtaggtatttttgacccaaaaaaaggaaactacgagattaaagagtttcactggttggggagatggcttggtcctgttg

SEQ ID NO: 2179 - DNA, 2300 bp, Homo sapien
ccagctcttcccaggcattgtgctgggattagaccacaaggttgccccaggccctgccctcaaagagctcccagtccacctcccagtgcacaggctgagacacgtctagtgcagggttaagaatacagactgagtcaggaacctgcctctgatgcctgggtccaccactttatggatggcaacttaggcaagttactgggtctctctatgctttatttccttgtctgtgaaataggaataataatacctttatagggttataataataaggatgaactgagttattacaagtaaaatgcttggcacattgtttgtgttcagggtttgctgttatcatcattaacatcattatgtacatcactgtttacaggttttcctccagccagctaggaagctggctcaggagattgtattctgggctggggttttatgcttgtactcattatgttaaaagggagaagaagaagttgagcaagtccctgcagaaaccctctaccaaggcttgctccccagcctgcctcagtatatggtgagtggtgcctgcagtgggacactcccactacactggccttagagcaggccctgccgtcctcctgccacctgcagaccaacaggaggactgctcagagcttaattttgaccctgggctctcagacctgtgtctgaatggtctactcttcccagattgccctcctgaagatcctgttggctgcagcacccacctcaaaagccaaaacagactcaatcaacatcctagcggacgtcttgcctgaggagatgccgtgagtatcattctgtgaatgaagcaggtggggcagaagatagatggagaagggcaaacattttcctcttgtcaggttggttgttgttggcccagctctacaggttaaatgtaggtatttttgacccaaaaaaaggaaactacgagattaaagagtttcactggttggggagatggcttggtcctgttggcctggattctagtgtagactctaccactgagcaaactcctgagtgaattggggaaagtcatttcctcctctgtaaaatgaatggggccaccctggacatttccccaaagccccactctccagctgtgattgagacacccaggatgaggagggttagtttgtagacagcttgccagcaacagctgaacctgtgccaggtatagagacatcccttttcgccagtgattgggcacgcagaatgctggcaaatgtctcagggcgatagagtgagattcttcagagctcttctgccctgtgccctgtacttgtctttcatgtgagagtccagattgagatcatgttctactttgagaaggacctggaccttgacctgatcttctgcctgcctgggccaccagccctgagcccagctcctgggtggctgtggccccggagtatggcagtgatggccggctgagggaggaggcaggggttggctaacaccagagggaggatcacagaacactaggccatcatgtgatggtccttggaaaaaaggttctagagtcaaatactgtatatttgattcatggatttctcttataaggaggaattcctcttacaaagatgtacaatgagaagtcctgaattaagaaaccaatgtaactcagtgcttcctaaatttatcttactccaaaaccctttttttccatgacatgaaacttgccaatatcctggtattccacagaacacatttggagaactcaggttaatatggcagcagaagcttaggggagatcttggaaaggagaagaagttcatttttggaggaaaggcagagaaacagactgagaatgtatttgagggcatcatggggaagaaataaattgtgcgaggctacattgcttgggaggtggatgggggagccctcggctgacttctgagatgtccttggggtgagtggggaggtaggagtctttgcccagggaggctccggagtccatcttttctgtgggcacctagaaatgaggtactgcgcatgctggtggcttacccaggcaattatgtttccagcaccacagtgttgcagagcatgaagctgggggtggatgtaaaccgccacaaagaggtcattgttaaggccatttctgctgtcctgctgctgctgctcaagcactttaagttgaaccatgtctaccaggtacccacagggctttccctcctgtcctgtgggctggggcctcgggcactgctgctcctccagcccacaagaacgggggccttggcctttgacccacttgaactctgcatgaatgttctaagacatggcccttcagccaaggcctttca

SEQ ID NO: 2180 - DNA, 2300 bp, Homo sapien
aatgagacatggcctctgcctgtggagagcccactgtgtcaaatctgagtctagctagtcctgccccaggtgacttggtctgtgcctgggcaggagggttttcatcccaggatctagtactttcctccctgtcccttctgtactttttttttttttttttgaggagtccatgggctgcttgctgtctctaaggggctcggccatgtgccttgtaatgccctatctgctgactcttagcccctgctgttggcctggtgccagctgtgcttgacattacttgctcgtcagtgtgatataccacagggcgccggccagaccctgtctccagaaaggtttggcataaattagttgccctgagctatctcctcccccgccccacattgattgctgtgggggaagctgtgagggtctcttccccttacaagatcaacaagctggcctctggctacaggggtgctttacaagttctcttgtaacagatatttcctcatcttataggtggggaaactggggtgggacacatcaggtagattcctacttctgctccaacaagtgagggaggaaagctgggagctggctcaggcacggctgctccaccaggccctgggcctttgctcatggtgggcatctggttcctctcccctctgcagcatttctgtcctggattaccctcactgcgtggtgcatgagctgccagagctgacggcggagagtttggtgagtggctgggctctcctcagctgtccttttggcaccagggtcagtgggtagagagcctgcctaccccaacactgcaggaatagaggtgtctcccgcaggtgaaatcactgtggagtgcccggcttttaaagcactgtaagtgtacagaagggccaggaggagggctcttgcagagcagagagatttggatttagggattagtcagggagtgtggtcttcaggggctgctgatccagagctcacctagtagagggcttctctccctcaacactggactcggcagtaggagctctggggcagcccaaggccacagctcccagtatcatggttcatatttcctgcaggaaaagtctagggagcctccctcttcccctagtcccctgccagcttctgggatggagtcctggggctgctctgagagcaggggattcctggtagaggcctggagacccggctgtcctgagatcatgtgtgagggacttttggaaactgctgcacacactgcagccatgagggctgattgttcctgggtttaccctgcaggaagcaggtgacagtaaccaattttgctggaggaacctcttttcttgtatcaatctgcttcggatcttgaacaagctgacaaagtggaagcattcaaggacaatggtaagtgagtcagtgtagtcagcaggcttggaacttggagctcaaagaagagtgctgggagcagggagtccccagggtggggctcactgtgccttctcacttaactttgctgtagccgtatccttgcattttaagggccaattcccagttccttgatgaattgaactggaagctggaagaggcccagtcatgcactgaaacaaatctacatttatagaagaactttttccatgtcgtcttaatcttgattggtaacataatcagggttctgagaatcttccttaactctgggtctgtggatgcctttggggtggggaggtccttgaatcctctgataactgtgtgtacatgtacaccggaatgtttctggaaggaatccatagctttcttcagattccaaagtgacacatagttagggtgaccaaccatcctggtttgtctggaactctactggttttagcatttaaagtcctatgtatcaggaaactcttcagtccaagggaaactgggatggtttgtcaccctgacagtaacttccaaagggttaagcagcagtgtgacctgggatgtatgcatttatttttgtcttcaacttgggctgcttgcttgtttcccttcccagatgctggtggtgttcaagtcagcccccatcttgaagcgggccctaaaggtgaaacaagccatgatgcagctctatgtgctgaagctgctcaaggtacagaccaaatacttggggcggcagtggcgaaagagcaacatgaagaccatgtctgccatctaccagaaggtgcggcatcggctgaacgacgactgggcatacggcaatggtgagactctgcactcagccagatttgggtgggagtgtgtcgggaaaagtgacatctttcactccctgcccgtggtactcaggtacttctctgccctgagcttcc

SEQ ID NO: 2181 - DNA, 2300 bp, Homo sapien
cagtgatggaacccactggagatggtaatcaccatcatcatcagcatctattaaattaacacagtgcatcaaaacacgaatgctttgcaaataccctacttccatgtgtggcccacctttctgatgaggaaactgaggctcagcaaggttgtcatgggaggcagaagactcagcctttgatccaggctgccttgtttaaattgttggtgacattttcctgggtgatattttcatcctccatagtaaacttcttgataactgttgaatagaataggtatcctaaattgatgtcctcctagaaagtcaacaatatccaatttcgcaggtatggggaagagagaaaagaaaacaatatccaatcaacaactattgaaaaaccttattaatgggcaaaggtgatcggttcaaattggttgcccagagctggatccactagatcctggagaaaggatccctctggtgaggccagaagggaagcttaatttcaagccgagcctccctcttgactagaaataccagccccaggtgctcccatctctctggccagtctgcattccgtgattaggggccctaatggccataatgcctccaaggtggtgttgaaaccaataagtcttcagagaagttatggtatgtttaataacggcttaatgactccttgtgagatgcaaggcttctggttcctgtttggtcttgatttacagcccaactctggctgaggagccaagaaaccccttctaagcccccagcggaagagggaggtgttcacaccaggcctcttggattcctttaaaaattgagaattcaaatgaaatacaaatgatgtttgactccccacctctcttgctagtctccgggggcattgataataaaaacagtttaacgcagccccacgggctcctcaatccatgggaagtgagcagggtcctcgggtccttgggtatttctccccagatcttaggtagggtggtggttatttctcttttctgaaattctaagctactgctctaatcctgtctccttttggttggggagactcagctcttagaagatgcagttctaccctcatcccttctgaatcgtcaggcctgggggagcacagccctgaggtccgagctgcagacagtctctccagtgggtccccagacacttgggtcatctgcccactgaaacgcattcactccaagctgctgccagaggaaacaccagcccttctgctcatcctccacctgttccaaaggctgcccctgcaggacactgttcagtcctgagctgcccatgggagtctccctgtctgctctggccctgtctctacttctgaaacacacctcaaatacatagaaagacccagggttggcttggcccgacctccacagtcagatgaggacactaatgattggcgcaaggaaccatagctaattaatgatagtgtccaggtccaagctccccagcaccccattcccagcttagatctgcttccacacaacactcccaatagctcctttcactgtgagaaacaagagatctctaagggaggtgttttttgctgaggcaacattttgtccagctcctagcggagacctaagtaaaactgcagcctaaggcctgcctgtctgcccgcccaggccctcatcccaggctgatgtccagagtccaggcccaaaagtgtttgggggggatgcccacacggcctcacccctctaggggcaagtgcctctaggctggatatcaggaccacgggtgctgctctgagcaagagactcacctggatgggtagacaaagggatcctgccctagagaggaagctgcttcatcctctcctgagctgcctgggactgggctctgggtgaatggggggagggggttcccgggctccgaggggttaacccgcacggggccacacgtgacgtggatggttccagcattaagtcagaggcgcggccccctcccctgccccccgccccccgccccccgcggcgcgcgccgctcccgggggctccgcgcccccgcgcccaggtccctcccccttggcgggcgctcacaggcggcgcgggcagcgcgagccccggagccccggaggcctgtgcgccctgagccggcatggaccccgagcactgcgcgcctttccgcgtggggcctgcacccggcccctatgtggcctcgggggacgagcctccgggcccgcagggaacccccgccgctgcgcctcacctgcaccccgcgccgccccgcggcccgcggctgacccgctttccggcctgcgggcccctggagccctacctcccagagccggccaagcc

SEQ ID NO: 2182 - DNA, 2300 bp, Homo sapien
gagtgcagtggagtgatctcggctcactgcaacatctgcctcccggtttcaagcgattctccttcctcagcctcccgagtagctgggatattaggtgcgcgccaccacgcccggctaatttttgtatttttagtagagacggggttttaccatgttggtcaggctgatcttgaactcctgacctcacgatctgcccgcctcagcctcccaaagtgctaggattacaggcatgagccaccgcgcccggccccatgggtatcttcaccagctgctcttggctgccagcttccaaagacagggacagagcttgcagccacctttgggcggagttcagggctgggtgctgtggaagggcagttcaggaaagtccaaggatgttgacaacagcatcatgccactgtagcttccaggcaggtggaaaaggaaaggaggttaggtgggagggagggagaaggtgagtgagaagaagggcacagtcgagcacagagctggtgagagttgaggggatccctgacaaaatcagcccactggctgcgagacgttattcaggtcttctccaaagttgctcagttctaaaatgagacaatactttcctcccaggctaaattgtgacaacatatataaagggcttgacccagaaggccttcagcaatgtgttgcactgaaaactgccaaatgctgcagaagttgcagacacagaggaggcccaatcagtgtcctttttcatattcacctttgagccgggggtgcctgctcagggcctgggccacaaaaggcactgagcagagatttgtttaggaggcaacatgaggtaacagtgaagacaagagcaattctgcctgcttgctgtaggatcagccaagcctccactttctcctctggcagatggagatcatggcagtgcctgcctcataggttgagaggattcaattaggcaggcctgtgatgcagatgctgtgggctgtcctgccccatcccctcagcactcacattcctgagggcccgatggcttcctacttttctgtggtcacaggagcatgctgcttaacacctgtggaccagaagtgccaaggaggtagcacttctattagccaaagacaggagtcagagcataaagatgcaggttcggccaggtgcggtggctcacgcctgtaacctcagcactttgggaggccaaagcaggcagattgcttgtgtctgggagtttgagatcagcctgggcagcatggagaaacccatctctactaaaaatacaaaaattagccaggcatggtggcgtgcagctgtagccccagttacttgggaggctgacacaggagaattacttgaacccaggaaacggaggttgcagtgagccgagatcatgccactgcactccagcctgggcaacagagtgagaccctgtctcaaaaaacaaaaaaaaaaacaaaaaaaccacacctggtgcaactcaggtgtgttccatgcaacctcccagaactccccagcaggataacatactagttgcccacaatggcaacctgctcatgaatgcacgttttgatttccctcccgtcctcatctcacatcctcactcccctcctggtgcctcctgggatcacctcctaattgagtacttgttctcaaatccctgtctcagtgtctgctgctggaaagcccaatccaaaagagcgtgtaaagtgcttgacagaaagaggacgcttgataaatgctagccagctcactagtgtgaaagtgtcatgaaggcagaagtcatccatctgaatatgactgtctccccaggtccaggtgctggcacagaggtggcacctaatacacatgtgttgaagaaatcaatagacatgctcctcccaccaccctgtcctttccctccctccctttccctagtctcactctcatttcccccagtcccacattttctttcctagtgctctttttctcctctcgtggaggaaggatgctctgggcccaaatacccctttgctgtcccaaaagttccactctggaaatgagcccccccgcagcattgtgacatcaccgtgcactagccaatggctgcctgcctaagctgggtccctggtctcctgggactactagccctttgttgatagggagaagccaacatctcccgcaggaccccctaatcttcagggcagctcccagagcatggatccctcctgattccactcagcccgatgttcctcacagtcaagctgctcctgggccagagatgcagtctgaaggtgtcagggcaagagagtgtagccacgctgaagagactggtgtccaggcggctgaag

SEQ ID NO: 2183 - DNA, 2300 bp, Homo sapien
gaacatgttatcagatatgataacagatattttactatttttttttttttagagaagagcacttgctatgttgcccacgctgggcttaagcaattctcccaacttggcctcccaaagtgctgggattgcagctgtgagccaccgtgcctggccaataacagatattttagaacaatcatctcatgatcatcataacaaccttatgaggtatgtaccattcattttacagacacggaaacagaagttcagagaggttgtgtcactagctcaaggtctctagtaaatggcagtcaggatgaaaacttagatctatgaggctccaaagtccttcccctttccatgaccacaccacctgtaagttctcttgccttaatactgcctatctctgataggttccttcctcccacctcccataccacgtcaattgtcacattctatttgttcatctctgtcctgtctcttgctacttcctgccatgccactccaccccatctgcttccctggttgcttccaccagaatgtaaaccctataagggcagagattattatctgtctcattttttgctgtctccttagggcctggaacagtgtaaagtaaccattaggctcactaaataattgttgaaagaatttttctatcaggagataattctctatgggtttattgtgttcccacaagtcttgtgggcagaggcactgatggcttttttgttcccattatcttttagaggatggttgcatagcaaacagcctccaacgatagcgtctccctctagtggagagcagttctgtttgctgtccagtataataaagatatgtctaaggcaaatgtcgggcaagtttgcttgcagcgcattataaaagattgaggtttcctaagcttggagtttctcagtgtgtgtggtccagtctcatgtcccacccataggacttcagagttaagggaaggtgatctgaatgtgaagctcttgcagcctgctgtgccatgagtaattaaagtcctttgtgtctggcccagagtttcctgtcttctgatggcatccatgaaactggcagggtaacttagattgtaagtgtaaaatctcagactcttcagagttcttgacaatggcccttaccacctttcactaagacaacctccatctcccattcctcccaaacacctcccttggatgccaaaggcccccttagtgttccctagaagagagataattcatccagactctcataacagccccccaaggccctggcaggatggctcctgcctccctgtctaacttcacctctcatcatccccacccctgctccagctcaggcaaccaccaccccaccccacgcatacgtttctactctcttgcatctatgcccttgccatgctgtccactccacaggggtcatccttctccccttctgactgtccatcctttaggccaggatcttccaagaggcctactcagagaccagtcagaatttccctgtcactgtctccccactttactcatcttgtacggttctccaatcctttcgctttgtactgtaaagacctgggtcaacccacactgcctctccaggaggttccctcacgtctgtgatcctttcagcctctgcagcccctggcatacagtaggtgctcaacagatgagtgatgtcctaagagttgacctgcacagggaacggccttgcagaatggtaggatggaaggacggaggagtggaaggacatctagaggaaagggaacagaagcacggaggtggaaatgtctagggcaggggaaataaccacatgaattgagattgagttcattaaagaaggccaaaagaggtgagtctgaaaagaagaaagtgaggcccagggtccaggagggctttaaccattggggccccattcctctccgagggcagaagccctggcgagggctccagggtctgcatcccctgaccaggggcctcaagaagctaagcccccttgcaactccctctcccgccccacgcccaccctctccgcctacgtcggccatcagagcctcgctcgctgcccgagagcctcgcattgacgccggcccgcgcgtgagtcaagcctgcgtcacggcgccccgccgccagggtggcctttcggaaagcgagggaacagtgcgcgcagcgctccgcccagctccgttctgctccgcagagccggcgctgccagggcgcagggagggcggcactcggccccagtcttcgcaatcccgcgcgctctctccgccgtgggacctgggtccccgcgccgctcccctgagccccgagcgcgcggcgggcgggagc

SEQ ID NO: 2184 - DNA, 2300 bp, Homo sapien
atttgcctttttctcataaaaataaacagaagaaaaagcaaactaggaagatgtcaacatttcgtggagctaaggagagtgttccagagtttctgtccagaactatgcaaagtttgattacatcgactatggctcaaaagcacagactcaactctcagaccaaacagctgtctccttcctgtgataatttgcctcctcctaaaaaatatttaagacaacttgatatagactctgtctcaaaaaacaaacaaagaaaaacctgtaaaaatactggacagttaaaggtagagataaaaagggattgcaggaatcagagaagatagaaaaaggaaggcaggaatgtggaatggaaagctcagaattctgagagttgacaatgcttttcctctagggtagttctttatgtctggtgccatggtgattggtgtcactgtgaacaatcagactgtggcaagaacactgccctgggtgtgagtgcttgtgtgtggcatagaaagggattctggaattcatcaccaagtgcccaggcagaactgatcatctaagctagaaagaacaaggttagaagttcccagctaagtcctccaatgccacacgtcctttgaagtcattttggttgccttggagctcttctcaacatctcacagggcataaagaaaccatatacttgtatatctttgctttgggctagtcttacatcaactcagttaccatgccatgcaggccacaagctctgattgacagttacttattaaaaagtaaaaaagatctttcaagcaaggagaccatgcagctaatataacatgctatgggggaaagatggaagcctttggcctaattcaatcacaagagttcaggtgggcattctcactccctgcccttcaaaagaaactggaaaggagaagcctcccagccaaatgtggccttctaaactagggaaagatgcatcctggagaggaggggactgcgtctttggaaaaggttacatggcaagagttccacaagcaaggaaggaaggactggggtaaaatgcctgccaagctggggccacccaacaggctggagcatgccatgccaggcacagggactcaggagcacaagagctcttgctagttgactttcccaggaccagaggtctgggcttgcaaaactctttgtttccagcctattggggttttctttatttttagttagttgatctctggtttcagggaaagctgcctttggacaattcctgggggctggaagtggtggtagtggtttgataccaggggcaacatcctcaagagggattcaagcctagggggcagtgtgaaggcccctcctacccggaagcaataggtgtggaggctaagtgcccaggctctgggcaagcctgtccaggtttgcatcctgactttatcactagctgtaaccttgatcacccacaaccttgaacaagttatctaaccaatttgtgcctcagtattgtagtctgtaaaacaaggatgataacaactccttcatataaggctgttgggaggattcgatggttgaatcacataaaattggtgctttgttgttctaagatgctcaaatatcagcagtttcaggcacttagccctaatatccattaagcccttagaacagtgcctagtacctcataagcatttagtaataatggccaacaggtgctccttaccgtgtcaggtagcgtgttgcccattctgcacgtaaagctcatttaatcttcccaactatcctatgaggcaggagctactattattttcattttgcagatgaggcacagagaggttaagcaatttgtagtaggtcccaaagttgattggcagggctggaatctgaacccaggcagtctggggccagagcccactttcttatcatgtcctgtagtctcttggtagctactaaccatcattatagctattcctgggctgtcttactctggaatcctgagctccaacctacaagggctccagttctgcctcagcaaaggggtgttcttttttacccctcatccccggcctatttgcaggggacccctgatgcaggcagagctgtctcttacctcctccatttttctggcacaggtaggggaacctccagatgttgccgaggcccacagagaagccaatctgggccaggatgtactgcagcttactgttccaggccggccggtcctctgcatccagctcctcctccaccgccttctgcttgccgcctgcctcaccagccacattcagtacactctgcttatagtccacaggctcctcgagggccagcaggtcggccacggactc

SEQ ID NO: 2185 - DNA, 2300 bp, Homo sapien
taggttctggacttaacaaaaacaaatgaatctggaaattgctcttgggatagggccagtaaagtcctgttggtgcctacgttttgggtatggcagcttctcaatcacttagcaaacaggttctcagaggcaggcactgtgggagctatcaagatgaaaaagcacaatgccgcctgcaggagctcagggttagggaggggagaggagacatatacacaggcaaagtcaaattgtaatgggtagaataagagtagaaacaggaaggggtcatgaggcaggacacgggcatttcctatgtggaccccagagcaatgacgagcaaaggctttaactaatgacttttcagggccacccacccactccacatccataaaacatttcgcgatgaacacagccagagctacggtttccttccatccggcacaagaagcgcttctctgcccaaggccaccccgtcctccattccatcgcggggactttggtggctgggacagaggcggagagcatcaagaccatgggtgtcttgggctacgttgggcctccgaggcgcaggatgcggggcggggtggtcagaaggccccaacacggtccctgggaaaggagagggcagcctgatcctcgcgacagcgtctctaccctctttcttccttggccttccgtcagccgcagtgaaacggcaacagtgcgaccagcttggcggggagggggcgagggacgaagcaagaagagccgggcggaggttagaggtcaggggtcgagagcgcttcggtgtcagcgggctgcggtgggaggagctgcgggcccgggggaggcgcggagcagggctgaggggggcgggaggggttgccggcggaagcgcgcaggggcggcgcgctgggctgggcactggcggcgaggaggtgacgcgcttggttggggctcggctccggggaggaagactgcgctcggtcgccagggcctgcagtgagtcggatcggccccgcgctgcgccgcgccccgcccaccccgccccgcgaagggcgcgtctgggcgaggcggggccccggaggaaaaggcgccactggggcgtggcggccgctgccagcgccggagggagaccatgagcccctagggccccagcccaccggcgccgaggcgccccctcccctatgccacctcgcgcccgccccctgccgcgcgcgagccaaggccggcgccccgcccggagatgggcagacgcgtagatggcgtggctcccagcgccgccagatcgcaggaaccaggcgccggggcgttgcgctgaggctccctctccgcgcggcccgggaagcctgcaggtgtccttggccgctcggccgccgcccccggtacaccttcgccagtgcccagagcccggctccccagagcggccccgccccccaggctcggcgccgcgcaggacgccccgtctgaggcacccccgccccagcgcggcccccgcagcgctgcgcccggtccggcgcagctcccagccgcggacgcaggacccgaggctcgctcctgcgggcgcgcttgttttccagctgccgcctcgccctgcgcagcccccgcccgcccggccgccgctctctgctctgccccgcctgccttcctcgcccggcgctggatttatgaatggggggaagaggccacatgccgccgccgccgcctcgtgttgaccgcaagcagcccgggcccacggagctccggctgccgtgagagtgtcggcctggccccggcagccgctcggaggacttgttgctgctgcgctgccgccgctgcggggaagccggctattccggggcttggtgcggtcttggagccggagggtggcccgtgtgagcgcgagcgccccggaccttcgcggtgcgcgtggactgtgcgcttcctcgtctttggtcggggtgaaggcgggggcgtgtccccggcccagagcgtttgtgtgtcccgtcgtagcgggggaccgcgtgtgtgcttgcttctacttccccgggtcctccctctctgcgcctccctctctccggagcttcctgccctaaccccaaccacctgtgtaccggagaaatccaactcctcccgctccgcgtcctagggggataggcaggggcaagcccaagccgcagagggggccgccaccgcctcctgcctcctcttcgtctcctccccctcccccgtctgacgctgcctcctcgggaagggtgtttggagggcagcggccgccccaagccggagccccgcagcgcttcttatgatcagctcggtgtgtgtctcctcctaccgcgggcgcaagtcggggaacaagc

SEQ ID NO: 2186 - DNA, 2300 bp, Homo sapien
ctttcttccttggccttccgtcagccgcagtgaaacggcaacagtgcgaccagcttggcggggagggggcgagggacgaagcaagaagagccgggcggaggttagaggtcaggggtcgagagcgcttcggtgtcagcgggctgcggtgggaggagctgcgggcccgggggaggcgcggagcagggctgaggggggcgggaggggttgccggcggaagcgcgcaggggcggcgcgctgggctgggcactggcggcgaggaggtgacgcgcttggttggggctcggctccggggaggaagactgcgctcggtcgccagggcctgcagtgagtcggatcggccccgcgctgcgccgcgccccgcccaccccgccccgcgaagggcgcgtctgggcgaggcggggccccggaggaaaaggcgccactggggcgtggcggccgctgccagcgccggagggagaccatgagcccctagggccccagcccaccggcgccgaggcgccccctcccctatgccacctcgcgcccgccccctgccgcgcgcgagccaaggccggcgccccgcccggagatgggcagacgcgtagatggcgtggctcccagcgccgccagatcgcaggaaccaggcgccggggcgttgcgctgaggctccctctccgcgcggcccgggaagcctgcaggtgtccttggccgctcggccgccgcccccggtacaccttcgccagtgcccagagcccggctccccagagcggccccgccccccaggctcggcgccgcgcaggacgccccgtctgaggcacccccgccccagcgcggcccccgcagcgctgcgcccggtccggcgcagctcccagccgcggacgcaggacccgaggctcgctcctgcgggcgcgcttgttttccagctgccgcctcgccctgcgcagcccccgcccgcccggccgccgctctctgctctgccccgcctgccttcctcgcccggcgctggatttatgaatggggggaagaggccacatgccgccgccgccgcctcgtgttgaccgcaagcagcccgggcccacggagctccggctgccgtgagagtgtcggcctggccccggcagccgctcggaggacttgttgctgctgcgctgccgccgctgcggggaagccggctattccggggcttggtgcggtcttggagccggagggtggcccgtgtgagcgcgagcgccccggaccttcgcggtgcgcgtggactgtgcgcttcctcgtctttggtcggggtgaaggcgggggcgtgtccccggcccagagcgtttgtgtgtcccgtcgtagcgggggaccgcgtgtgtgcttgcttctacttccccgggtcctccctctctgcgcctccctctctccggagcttcctgccctaaccccaaccacctgtgtaccggagaaatccaactcctcccgctccgcgtcctagggggataggcaggggcaagcccaagccgcagagggggccgccaccgcctcctgcctcctcttcgtctcctccccctcccccgtctgacgctgcctcctcgggaagggtgtttggagggcagcggccgccccaagccggagccccgcagcgcttcttatgatcagctcggtgtgtgtctcctcctaccgcgggcgcaagtcggggaacaagcctccgtccaaaacatgtctgaaggaggagatggccaagggcgaggcgtcggagaagatcatcatcaacgtgggcggcacgcgacatgagacctaccgcagcaccctgcgcaccctaccgggaacccgcctcgcctggctggccgaccccgacggcgggggccggcccgagaccgatggcggcggtgtgggtagcagcggcagcagcggcggcgggggctgcgagttcttcttcgacaggcacccgggcgtcttcgcctacgtgctcaactactaccgcaccggcaagctgcactgccccgcggacgtgtgcgggccgctcttcgaagaggagctcaccttctggggcatcgacgagaccgacgtggaaccctgctgctggatgacctaccggcagcaccgcgacgccgaggaggcgctcgacatcttcgagagcccggacggaggcggcagcggcgcggggcccagcgacgaggccggcgacgatgagcgggagctggccctgcagcgactgggcccccacgagggaggcgcgggccatggcgccgggtctgggggctgccgcggctggcagccccgcatgtgggcgctcttcgaggatccctactcctcccgggccgctagggtgagtggcaggagcc

SEQ ID NO: 2187 - DNA, 2300 bp, Homo sapien
ggcctagggagtttccaaatggacctcagaccttgggatttggcatgtgttttgtgtggggcttccctaagcataaagatgtgcctttatgagggcaaagtgttgaggccgaatttctctgtcctctggctgggtctccgatagcttcccgaacatcagatctttggagtgagtattccacccagggtagggtgtgatgggcagtacatggggctgtatattagatgccctggttttaaatccaatcttggccactgtgctgtgtgccctgaggccagtcactcaccctctctaggcacctgtaaaatgggaataatatcatatcctaccctcaagactttgagagacccaaatgaatgacagatatgaaagtactttgggaagtcagaaccacattacaaatgtcaggtactgtcaatattagccagtgagcagggcagctgttcttccaaggtacatcaacacatgaatcacttctttgcaaacgttcgagtctggtatcttggcctaataaatgtgataacgtaatagcagtgggaggctgccttctgttcagcacaagctagattgagtcctgggctcagggtttgacatgggatggaaaggaactgaggaaggagtggcccagacagtgttgggaaggggaggaacatggaagaaactgatatctgtgccctggaaggggagagcctgggcatctgaatcctgtccctcaaggatgggaaaggccatcccaagaaagctcatctccgcccctgaatcaggagttgggaaatggaaaactgcttaatccccagcaatgtgaacttcggttggagagagggaaaggcatcctgactgttatgtgtaggctgggctcctgggaaaggtatggaattcctggtatggggaggtggactggagccaggagactaaggctaagctctggggcaaagtgggactgaccctgcaggagaggcgcctagcttgggacactcacctatggcctttggcatgtgcctatcatacatgcccgggtccactcattcccgggggtcatgtcaggggcctgggtcttccgaaggccttgatagaagagcatccatcaggcttcccatttctcccccaccaaagtggcactgcttcctaatttgtgaatattaatttcccggggaatttcagctgcactctgaggcccattcagggtataaagagaatcccagtattaaaacgtagaagtccttaggtcagctcctcaaggtacacttaactgtggccctatcagccttgcccttagcctgaccctgagagcagccacagtaagggcatgcctggccaatggcagggccactgtcttcagatagagtagcacccccttctccagatccaagggcccagcttcacctgtgctactgcctgacagaggcaaggggtggagactaagcccacagcacttgagagctgcgtcggagcttttctcatggtatcctccccagacaaaggtcagccctaattgcggagggctctaggtcttttgggcacaggactctggcctagatgcctagtgaacaagaattactgtcacccagggagaaagcatggacgccactttataggtttaacccttgccgtgccacccctcaccgctagcaagccaggtattctccacgggaaagcagactcatccaagagtcagcctgagccagacccaaggaggaagtagagtctgcggactgctttgggctgatctcctggggcagccgtcagcaggcagatttggggagtcactgctgtagggcatctgcactgtggcttcatccctgaggagagaccctaagctgaggctgggagggaagtcagtcttcacaccaagtgtagcatccctgccttttgccctctgctccccggctctggcaatgctgcctctcaggtagatgctaggcccctcccaaggttgaggaagtaacactctgggtctgggagaccccagatgacccatgagcaaggctcaggtcgcccctcatgcagcctcctttctgtgtgcccccttcagactctaagcagaatggcgatgccaacgcagtgctgtctgatgaggagggagctggcctcacccaacccctggcctcctccccgacccccgaggagcgccgggccctgcgacgctccaccactcgagacagaaacaagaaggcagctgcctgcttcctgctcagcactggggactatgcctgcgccgatggtagtgtccggaaaggtatggcttcccaagctggacaggtggggagcccccacagagctgagtctcccgagtcccccac

SEQ ID NO: 2188 - DNA, 2300 bp, Homo sapien
ctcttggctccaggcagatttccagtccccctaggcaagcctttgtactatagccagctgcaggcagtagcttccatcaagctccctggtatttgaagtggcaagccactaaacttggcatgcctctggtgcatgttcacacagactgggtgtctgtttatctccctgaattatttctctcaaatcttgtgctccctcaacccctatcttgaagtttggaaaactactgatttggtcattatctttttctttgatcagtgagtcaccttagcaggtctatttaggttaaaaagtcactctggtgcctggtttattatctcgattggttattacattgagtaatcagataatggcttaacttcaatttccatttgtggtctattaatataaccttgaaacagatttaaacccagctataactttttatttcatgcttttacaaataatgtgttcatgtgttttttatcctccagcatccagatttttatctttaaataccatctcccactaaaaggaaccagagctctctggagaaatggctgattccacaactggggcaggaaatgtatcaggtaagtctggaagaaaataatggagaaaagaagagtgggaagagtgatgcagatgaaacaagattgacatgatttgataattgctgaaatagggtgttgggtacacatgggagttctttaaagtattcttttatatattttaaactttttccataaaaatagtttaaggaaagttaaaaatgttattttttaaactgaaggagtaatagcgccctttgtagaaacaaaagatttctacaaagaaaagtaaagtctccctcctactccagaccctcgcacacctcttcagggcaatcctagtaacaatttcccgtgtatttgtcaagaaagtttccatgaaaatatattttttaaatgtacatactcataaatacaaacatttttaaaaccacaaatggtagcgtattatacacattattttatgccttatgaagttttatttcccattttaatacaatgaagatgtctacacattacaatattgtggatttttatgctttacaattgagcttcttccttcgagtttctttgatctaatcaagagatagaaggcctccagcttcacattcctcacgattatttacaaaaagaaggatggctcagccaaggctaaatttaggttacagtccctaatcttaacacagtttttaagtttaggtttcagcttttgggatattattgttaccttgaaaaatgtcacgtttaaaaacacctcacaccctctactatagattggatcttgggaaatagggttgaggaccggatcaatacaagaatcctcataacctccgccccggcgcgaacctgggagggctgcagacagtctaaaggctgtggtgacctcagcgctgcgtccctccagcaaccggcgagtgctggggcacaggccatacccccctaagctcggcatcgcctgcacctctcacaggtgctctgtccgccacagtaacgcactatggaaaggaaagttgtacggcgaacgactgaaggagccaaacgaggtggatctggagcggccgcaaggtgcctgtgctgctggcttttaacacacaataagagtgccaagggatacaagaagccacagggggaaaaacaagtgacatatctgcatggagcctaaatttcgcttggtgattttcagggtagaagcattacatattaaaaacactgctattttaggggaatacagaatttaaaaatccacacagattcgcaacataaaacatgccgcccaaagacacgtccgcggtgtcccgacagttccggctccgcccgcgggccacgaggcggggagcgacggtcactcccctcggttacccggagtacttgggcgggaacgggtagctcgcgggagagacgggctcctgggcgagggctgcgtcttagtcgccctgcttcttagctctcgaggtcccgcgtgttacgtgttagcaccgcccgggggcgtcagcatgacccgaggctgcaggaaccgtgaactctctgccccgcgggcccaggtgaccgcgggcggcgctctcccgcgcgcggggggcggggctccccccggctgttcactcagctaccacagcgacgtaaaatggtgtccgctaggcgtcccaggacggcttcctgagggactggagggccccgacagccggaaagcctgccccgccccttggccggcacaggtacgacggcggggagctcagaagtttcgaactccaagggccgaagcacagccaaaca

SEQ ID NO: 2189 - DNA, 2300 bp, Homo sapien
aagaaaagtaaagtctccctcctactccagaccctcgcacacctcttcagggcaatcctagtaacaatttcccgtgtatttgtcaagaaagtttccatgaaaatatattttttaaatgtacatactcataaatacaaacatttttaaaaccacaaatggtagcgtattatacacattattttatgccttatgaagttttatttcccattttaatacaatgaagatgtctacacattacaatattgtggatttttatgctttacaattgagcttcttccttcgagtttctttgatctaatcaagagatagaaggcctccagcttcacattcctcacgattatttacaaaaagaaggatggctcagccaaggctaaatttaggttacagtccctaatcttaacacagtttttaagtttaggtttcagcttttgggatattattgttaccttgaaaaatgtcacgtttaaaaacacctcacaccctctactatagattggatcttgggaaatagggttgaggaccggatcaatacaagaatcctcataacctccgccccggcgcgaacctgggagggctgcagacagtctaaaggctgtggtgacctcagcgctgcgtccctccagcaaccggcgagtgctggggcacaggccatacccccctaagctcggcatcgcctgcacctctcacaggtgctctgtccgccacagtaacgcactatggaaaggaaagttgtacggcgaacgactgaaggagccaaacgaggtggatctggagcggccgcaaggtgcctgtgctgctggcttttaacacacaataagagtgccaagggatacaagaagccacagggggaaaaacaagtgacatatctgcatggagcctaaatttcgcttggtgattttcagggtagaagcattacatattaaaaacactgctattttaggggaatacagaatttaaaaatccacacagattcgcaacataaaacatgccgcccaaagacacgtccgcggtgtcccgacagttccggctccgcccgcgggccacgaggcggggagcgacggtcactcccctcggttacccggagtacttgggcgggaacgggtagctcgcgggagagacgggctcctgggcgagggctgcgtcttagtcgccctgcttcttagctctcgaggtcccgcgtgttacgtgttagcaccgcccgggggcgtcagcatgacccgaggctgcaggaaccgtgaactctctgccccgcgggcccaggtgaccgcgggcggcgctctcccgcgcgcggggggcggggctccccccggctgttcactcagctaccacagcgacgtaaaatggtgtccgctaggcgtcccaggacggcttcctgagggactggagggccccgacagccggaaagcctgccccgccccttggccggcacaggtacgacggcggggagctcagaagtttcgaactccaagggccgaagcacagccaaacaccccacggaacttaacaaatgtttgtggggagaacgccgaaaacgcggggaggcggggctggcgcacagtcaccctctcgcgacatctaagtgacgtcgcacagcaagcacgtgttctagtctttcaccttcagtcagcctcctccgttatacaggcctacccctttaagcgagtgatggacagttatttcagcctatcaacttccttgccgacatccaatcagatttaaacttcttttagccgccggaggagttggaaaaagggggtcgaaagagggagcttaccgtctctcgcgatatcgctgtgagcctgcctctctggaaaaaacgccgaaactgatggcccgacctcccaaatagtggtttaaaggacgggtttataagccaatgaaagggataaggaggtgggttgctgctgtcactgagcaagaagtaccgttacagggcagactttttgtccaatcaacacctcaacactttgggtcacgtgaccgcagagtgcgaggggcggagctacagtctggcgcgaggaaccgttaagatagacaacaaatgtaaccaatgaggtactccgactagggggttgggaacccaataacagtggttgggcgggcgccttcctggagcgcggggagatgtaaagatagacaaataattttcccaatgagactgtagaagagagagcaattggccaatgaggactgcggggcgggaccctgtgccgcggcggagtccaagatggcggcgtgcggttccgctgtgtgaaacgagcgcggggcggcgggttactcagctccgcggagacgacctc

SEQ ID NO: 2190 - DNA, 2300 bp, Homo sapien
ggaccaaccatcccgcctgcgatctaggctatccagtggctcgtaagcaggcacagaagtagctgcagtccgagtgctgcgttctcggactgggggtgggggtggcacccaatcagagtcaggataaaggtccctatcacgatctctgtatagtaagggtggtgtcctatcccgagcacccctcaaagggtctggtgcccgatgtccaaaagcatctgtcaccagctcataatgagtcaagggcagaggctgcagatactgctgctggtaacgatgttcggtgtcggcaaagtctactctaaggcgtcgatctgggccaccaagtgggaagccccgcatatgggtccaggcagcatgcgctgcatccaggctttcatactggatatatgcccaactatcaccttttcggtagtctatggtgcgtatggtgccaaatcgatcaaattctcgtgccagggcagcaagaggaacccaaggtcccaggcctcccacccagaggcgggtggtgggtgtagctttaccataaccaattttgataggattccgaattataattttgccagacattgctaatttggcccggtgagacatatctaagttctcaaatttgagaaagccgtaagtactagtctggccgcgagaaggcctcttgatatctacttctgtgatgactccaaagcgatcaaacgcccttcttaaatcactctccgttacagtgatgtctaggttgcccaagaagagcgtccggttagctcgctgatcatcctcgggtgaaatctcatccacttctctgaaaggagcagcacctgctccagctcccacccttggctcaagactgtatgcagggcgcactctctcatagaacgggtagtctctttctctctccaggtctcgaggcaatggtggcggaggtggagggggcaggcggccaagagccaactgctgcagccggtagtctctgtatcccaaagcagcgccaccaggggaaagtgatctctggcctccaccacctccaggggggtgccggtgaccacctacagaggccccgaccacactggctgatggaggataagtatctttgtctaaaggggagcggctgcggcgccggctcacatacacagcttctatcttcagaggccggtcatagagcaccaggcggcctctggcatgcttggccgcccgcgcgtcctctggccgccggaagttcacaaaggctacccgctcatccccgctgccagaacccgacagatgactgattttcacacttacatcaccgaagcgtttgaactcatgaaacaggccgtcctccaccgcttcgtcactaagctgggaccccaactcgcttatcttcagagtcttgtattccgcgccgtccccgccgccgggagctgaggaggcggccccagaggaacgtgactccccgcctccaccccgggagctgctgcgcgattcgcccccgcccgaagaatttttggtgctcggggagctataactatgcaagcggctactggagctgcccccaccggtatcatactcgcggctgccacctcgactgctggacttgtccaggtggagactccgccgcgacccaccgccgctatcggtctttccgctgctgctcccattgctgccaccagagccccctaacttcttgctccgctcaccgcgggaagtcgagtcctcaccaccacgggagcgtttggccttcactggcgagcgctcttttcccttcattgttgcgggtcgtcggaggtcgtctccgcggagctgagtaacccgccgccccgcgctcgtttcacacagcggaaccgcacgccgccatcttggactccgccgcggcacagggtcccgccccgcagtcctcattggccaattgctctctcttctacagtctcattgggaaaattatttgtctatctttacatctccccgcgctccaggaaggcgcccgcccaaccactgttattgggttcccaaccccctagtcggagtacctcattggttacatttgttgtctatcttaacggttcctcgcgccagactgtagctccgcccctcgcactctgcggtcacgtgacccaaagtgttgaggtgttgattggacaaaaagtctgccctgtaacggtacttcttgctcagtgacagcagcaacccacctccttatccctttcattggcttataaacccgtcctttaaaccactatttgggaggtcgggccatcagtttcggcgttttttccagagaggcaggctcacagcgatatcgcgagagacggtaagctccctctttcgaccccctt

SEQ ID NO: 2191 - DNA, 2300 bp, Homo sapien
attcgtaaacaagcaacgtttttacagcagtaagtcctcctgcatcattaaatcatgactaagggtaaaggccaaggttaacagcaaatgtcaaaattttaaaggacataaaggctataggtcccaaatccataaccaagattttaaaactttggctcccacattaaaagtatttttttaatgttaaaaataaatttaaaaatatcaagtagaacaaaagttctgacctgaaatatgacacttcggtgaaggaagctagtaatggcagcagagtgccttaaggcttccatctagagaaacagacccaaaacattaaaagccctcaccctattaattataatgcattttgacctctaaaaaccctcttacctgtttacaagagtttatacagctgtttgccactggaacaccaccttgcagagtataaccgtggcatcctttgttgataatcacctgttgcctagcaatcatcatcccgcatggagacagacagcactagggctcttccatccgaggttaaaattcaaaacaagcccaacaagcctgcatttcaaggtggtcttcgtctgcaactagttaagtttaaaactggcaaacaacaacaatggtgtctgaagccaatggtgcagcattgctggcttcctcttgaactccagcgttgtcaccgtgcactgaagtctcctgctgcaaacaggggagttgttctcctgtactgggaacaggcttccaaaactcaggagcccctctgtacaggataatgcaggaactaaaggcaaacatttttcctccttaaggatgcctccatctttttcctcacaatctgtactaccaaccgaagtgactgggcctgagtgtgcgttcgtacctatgaaaccgtcacggtgcatgcacatccaaggcatgtggaaccaaaggtcaaataaggcacagataccaagtaacggttctaattacaaacgctagctctcaggaactcttcatccattcagaactaaacccatcactgcataactctggtaagaagcccctggagacggaggagctcctcaaatgtgtcaggaaaggctttattaacatcatcattaacatttaaaaagcaaacggagcatttctccttcttttggcaatttggtgcaaatgttaagtgcaagataaagcaatttcaaacttttcttcaaattaaaaatgaaactaaggccaaacgtgatgggtgaacaaaataaatcaaaacttaaatttcagcaactccagctcttcaaaccagcaaaagcccccgactcaggcactgtggtgaggcttagggtgcctgccccggcttcttgcgtgccagcaaacagcaccatttcctcatcacgttgagaaccgagaagcaaatgatccccttcactgcaaacaaagggggtcaacagtaacactagtgatccttcagaattgacacaccgtgatagtcaaaatgaaattgatggtctccctgcttcttgctcaagacatacaagatctgagcagcagcaagcaccccctcggctgcaaacaaaggggtcaaaggtttgccgtcaattcacttccaggcagaaaaacattttcctcaaaagaaacaatttatttagaataaaacaaaagcagctcaactgtgagcgcacgtttgagagacagctactcttaagctgtgtgagccataaaaagggtttttctttacttttccagaaatcttgtgtacacagcacaaatcaaagaggtcattttttttccacttaaaacaccggcattggcatcacaatagcagatacacaactttaagctgccattttagtaaaatgcacaaatactaaacagattagctttcttccatcagaggcccatgtaaactccacataagccacaacttctcttcaaaaaggtccattagagctttgaattccatatcttcatccgctgttcaaccagttttgcttgcggagggggggaaaaaaaggttattcagtacaaatgtttacaatattaaaaatatatatatttcccctatgccattatagatgaacataacattaacaagaccttcctggatggttcacctcaacttcaaaaagcaccaataatacccactggcataaaccttgaaatgaatttactgtatgaatagacatataacaagtagaacaatagggtgggtttttttaaagactgcaattgaagataacaggactgaaaatatcctttaactcatgtaactgagtaaaacatgttgaaaaaattcagaaaaaagtttcacaatcaatttataatctatcaatatattctaa

SEQ ID NO: 2192 - DNA, 2300 bp, Homo sapien
aggtgcctaccaccacacccggctcatttttttgtatttttagtagagatggggtttcgccatgttggccaggttggtctcaaactcctgatctcaggtgatccgcctgcctcagccttctaaagtgcttggatttcactcactcttagaatgctgtttctgaaacattaagtattaaaatatagtcatgtggcacataacaggacaaacctcatgaggttatgatatgcatttttactgtatctatgtttagatacatgaatactttgtttggatacacgagtatctttctatgtttagatacagttgcctacagtactcagcacagtaacatgctgtatagatttgtagcctaggagcaataggctctaccatatagcctaggtgtgtgtaggtatactgttcatatgacaatgaaatcatctaacacatttctcagaatgtatccctgttaaataactcatgactatatttaatatattttcttaccagggcggggaattgtttagcatgttttagaattatttctatgtatttccatgcaaaattaggtgaaataaaacctggatgaaataattgttgtaaatttgtttctcccagtcatatttgatcattgagatatttgtattttttagattctaaattaagatccaattgccattcaataggataatagtatacagctgagtatttagttttaggatgctgtttatactagcaaatatgaggtaaaatgtaggatgcagaaatatacatatgactgattattttatgaaagtattagttgttaaaatcaagcttatatttaagtggctactaggttagttaagttttgagcttcgttgctattgaaacatctactttatttgattggaataactagccattctctactgctgaaagtaaaaggattggccaggcacagtggctcatgcctgtaatcctagcactttggaaggccaaggcaggcagatcacttgagcccaagagttcaaggccagactgggcaatgtggtgagaccctatctctacaaaaaagaagtaataaattagctgggtgttggccaggcgtgacggctcatgcctataatcttagcactttgggaggccaaggtagaaggatgacttgagcttaggagttcaagaccagcctgggcaacacagtcagactttgtccctattctatcaaaaattaaaattaaatttagaaaaatattggaaaagaataaagaaaaagttaaagaaaaaaaagccaggtgtcatggcacatgcctgtagtcccagctactcaggaggctgagttgggaggatcacttgagcccaggaggttgaggctacagtgagctgtgattgtgtcactgccctccagcctgggcaacagagggagagcctgtctcaaaaatttaaaatatatatatatagggagagagaacgagtgtctgattttattagatctctgtatttttttggtaacaggatgaaaaatctgttcagatgcacttcggaccctaaacggtttaatgcttctaagtaaatttttgttttttttgagaggaatctcactctgttgcccaggctggagtgcagtggcgcaatctccactcactcccagctccgcctcccggattcacaccattctcctgtctcagcctcccgagtagctgggaccataggcgtccgccaccgtgcccggctaattttttgtatttttagtagagacagggtttcaccatgttagccaggatggtctcgatctcctgacctcgtgatctgcccgcctcggcctcccaaagtgctgggattacaggcgtgagccactgcgcccagccaagtaaatatttttaaaagaaagtattgttgatagttcagaagccactgtattctcaccattttaaatggaagcacacacataagttgacattcaaaagactagattcctttgtggtcatagcataagcattgtgaacgtcagagaaagacaagattacataccagttataatctaggataatgtgcatgtatctgaatgttcactctatgcctggtattactgtatgtagccagcactctgaggaataaactggcagctgatgcagaattattaagctgaagacctctgtaagcatttccttggtgtctacaggctacctgcgtcagatttacctgagatgcatgttaataatgcagattcactggattctgtcaagcataactccatcctgggtggcactcagttgattcttacgcacagtaaaattattatttaacaataataattattgtatttgaagttactagtc

SEQ ID NO: 2193 - DNA, 2300 bp, Homo sapien
gagtctacgggcttaaaaactgacaaaattgagattatcaccaagcctgcatttctgttcatgtgcctctatgaaacatatgtttgaagttcatctctgattactttgctgtcctcttggcctctatgaatgacttgctgttctgccgcatttcaaatctgaccccaggcattagcatcagagttctctatcaatataaagcctattataagacaaagatgaataggaatatatacacacatatataatgtattgtttacataggttaggcacaatgattcactattatcatttaaggaatggtaggaaccctcctgaaatctaacttcccagttgtatatgttcctatatgtatatgtgtgtatatatatattcctctgtgtgtgtgtgtgtaagaaaaatatatatatagcctagcatcatttcatcctgtgattagaattatggatagctggctccttacagtggtttatgcctgtaatcctaatactttgggaggtcaggatgggaggatcgcttgagcccaggacattgcaaacagcctgggcaacagagtgaaacccccatctcttaaaaaaaaaaaaaattaattagctgagcatggtggtgcatgcctgtagtcccagctactcaggaggctgaggtaggaggattgcttgagctggggaggtcaaggctgcagtaaaccatgattatgccactgactccagcctgggcaatagagcaggccctgtctcaagaaaaaaagaaatcatagatagccctgctttaaaagagcaacaagcgtgccaccaaaaaaataaataaatcagtcttgtttactaaaaaatgttttcaggctggccacggtggcttacgtctgtaatcccagcactttggcaggctaaggcaggcggattgcctgagctcaggagtttgagaccagcccgggcaacacggtgaaaccccgtttctactaaaatacaaaaaattagctgggcgtggtggtatgcgcctgtagtaccaggtacttgggagactgaggcaggagaatcacttgaacacgggaggcagaggttgcagtgaaccgaaattgcaccactgcactccagcctgggcgacagagtgagactctgtctcaaaaaaaaaaaagttgtctagagtgtattcataattacaaacagctctctgaaaagcatttatttgccttctctctttgggttttctccttctgttgaatgtttatttgatccttgccaccagcatcatgtaactgcataatccttccatgcttacacttacagggcaccctcccaaaccactaagctgtccttctgcaagcactttaatcaaaaagtattatagagtttgattttaagaatctgagaagcctcttgcttcttaaaaaggaacatgcataaatatgtgcagattttccagataaaactaaaaacacatcctttcgtctaaaatatactctggtttaaaatctggaatattggtgtgggagacgaaagacaatttcccatttgacttgtttgttttgttttgttttatgtggagggtagagggaggaaatgggaagagaaagttgaattatcccagtaattttctaggggtctcagccttaaccatttccaaaatataataaaaaaaatctcattaaaattactacgagcatacgtcttttgcaggaggtggttgaggtaatcagatctcaaaaatgcaattaaaatggggtctgaaaccccaaattagtaaccagaatctttagtcaatatacaaaaggccacacgaatgggttgagcttactgaagatttctgtttgtggcccaggaaatgcctctctcaccacccatccaggagttttatattctcctgtaaaataagcatgttgtgagaagttccctgaggaaatttgaagacaagtgtatgagagctctggagccccatccccctgccctgagcatagtcgccaaaaggactttccacttagtttacttcatgcttgcttttgagcctgcggcaaaaaattctaccttctgagtgactgtgggtggagggagggcctgagatgacatcaaatcacagtctttcctcctcccctcaggaagtaaagtccactagcaggagggcctaaatcgtctgagccctccttggctcttacaatgctcacttgttttcacaatgcagcaaaatgaaatgccttagaaaaagagtaacattccagaaaacggtgtaatttatttttcttccttaattgccccatctgtggaggatttctttgctgaacaccacatcaaaggtaagatgggaatggg

SEQ ID NO: 2194 - DNA, 2300 bp, Homo sapien
aactgctttttctaaaacttatatggcctgtactgtgttacccctaacttaacatgaataatttctctagagcaggagtccaagacccctgaattataacattcaaactggaattttggctgggtgcaatggctcatgcctataatcccagcactttgggaggctgaggtgggcggatcgcttgaggtcaggagtttgagaccagcctggccaacatggtgaaaccccatctctactaaaagcacaaaaattagccacgtgtggtggtgcatgcctgtaatcccagctactcgggaggctgaggcagaagaatcgcttgaaccaggaggcagaggttgcagtgagctgagacggcgccactgcactccagcctgggcgatagagcaagactctgtctcaaaaaaataaagaaataaacaaactggaatttcaaggaagctgcaagcttcactatgacagctgcggaataaaaagggactctgaatgccagtgcagtgtattggactttggttcaataccaaagtctggtatcttccgatctgggagctgggccccagattggaaggtaggctgtgagtaaaaagctggaggtgacagagttggaagaaacttagtgcaaggaatgatccacagagggggtgaggcttaccaatttgagtaaattagcaccactttttcgggaggcaatttgtaagtatgtatcaagagtcttaaaaaatgatcatgtcctttaacccagtcattccatttctagtaacttataaggaaattttaaaactgcacagatatttagctatgaggatattcaaccagcattgtaatagctaaaacaaaaaacaaacaaaagcaaaaaaaaaaaaaaaagtccaagtacagtggctcacctgcaatctcagcgctttgggaagccaacgagggagggtcacttgagactgggctacacactgagactccatctctacaattttttttttaattagctaggtggggtggcgggtccctgtagtcccagcttcttgggaggctgaggtgggaagatcgcttgaacctagaaggctgaggctggactaagccatgatagtgccactgcactccaaccttaatccacaattaagatacagctataaaatggaatattttgcaactactacaaaggatgtaagtgaaaacttgacatggaaagacatttattctaaactctgtaaagaaggccagctacagaattgtacctccagtatgtatgtcaattttgcttacaaaacaaacaaaacaaaaaaaaccatgctaggcgtggtgactcagcctgtaatcacattttgggaggctggagtgggaggatctgttgaagcaaggagtttaagaccagcctggacaacacagcgagacccccatctctacaaaaaaacgtaaaaattagccagacatgatggctcgaggctgtggtcctagccagtcgagaggctgagaggtgaggatagcttgaacccaggacgtccgggttgcaatgagctataatcgttctactgcactacagcctgggtaacagagcaagaccctgtcccccaaaaaatttattttaaaaaggcaaacgaaaaaacattaaaagtatacatttacaaagacaactatctgaaaggatattctccaagaagttaaaagtcgtctttggacagtggggccatagatgttttcctatttttaccagctttataattaatttttaaaagttattttcaagtagtcctacccagtcttccttacgagttaggactcaaatgccactctcttcccctaaactgtcctgagtcccctcaccataataagcaccaatgtcttcgttaaaatcccgacactgccaacactcagctagggggttgaaccttgctccatctcgtcctttagtctctgtgtgcgtctttccccctacaagcctactgaccccctccaagaggtcccgtgtcttccccgtacttgccccacaggctagatcagaccctgtctgacccctgggttattgtaaaacttaagatctgtcccctaggtctcggagtcggttgaactagggtccaaaggttaaaaaacactgacacaaaatgccaggccacgaactgaagcactgaggcccggctgcagacctctcccgagaggggaataatccgtgccggccggttccgccatggagccaggtgcaggtcacctcgacggtcaccgcgcggggagcccaagccttcgtcaggctctgtgcgacggaagcgcagtgatgttttccagtaaagaacgcggacgttgcaccgtgatca

SEQ ID NO: 2195 - DNA, 2300 bp, Homo sapien
cctggaactggccaaaaagccctgccacagggttgttgcactgacttttcatccaggctctgtccagctcactccttcactttatcagtcatctgcacaagtgccttctcagacagacccttaccacatctaaaatatcaccacttgtcaaggtctgttgctttccctgcctttctccccaccaccttttttttattttttgagatggagtctcgttttgttgcccaggctggagtgcagtggcgcgatctcggctcactgcaacctctgcctcccaggttcaagtgattctcttgcctcagcctcccgagtagctgggattacaggcgtgagccaccacagctggctaatttttatatttttactagagatggggtttcaccatgttgaccaggctggtctcgaactcctgacctcaagtgatccgcctgcctctaccttctaagtgctgggattacaagcatgagccactgcgcctggccttcctttttaacagtgctcaacacaactggccattttattacaaatctgtttatttgtctattacccgtctccttgactatagtcaaaattacatgaggacagggttttgttttgttcactgctatattcccagtgccaagaacagtgtcttctatacagtaggctctcaataaatatagtcaatgaataaataaatagatgaatactcgcaaaatcgtatgatgtaaatgctattcttatcccatgttatagataggaaaactgaggcttggagagattagcaatattttcaaggtcatgaagccatcgatctgaatcaaagcatctgcctctgggggcttagctcccagctcccgtgctagttaaccttcctctctgcactcataaatgcctatcagcgtttcaatgtggaaaccctagacccctgtgacatttgataagaaaggttttgtggatgaatctgcttgtgaaatactacaaactgcatttcccacttggtgtttcaaacacttattagcatatgaaaggccctgaaaagttctgcaaaaaacaagccggtttgtgtttcccaaatttttgactgtagaagtcttttatttgtttatttgtgtattaacatattgcaacacataccttgggaaatgttggcttttattactgtggagagaaggcagatcatctgacaaagcactgggagctctctctgggtcgtatgacacagagagggctggggtcaggggcttccctcacaggcggaggggccatcccgaaagtcaacttcccaccagactggcatctgagaccaccgtgtttatacactcacggataaggccactctcatgctcacccctaaaactggaaggccagtggtgtggctctggtacctttcagccacagcccataccagctcggctctgcagggtactgagagagtgtgtgccctgtatgtttgctggctttctgcccttgggtcattgtaccaagggacacttgctggtgttcatcctgagcccatgagagagcaaatccttatgtgtgtgtcacttaggaacatcagccccacaagtctggtctttttttcctcactgtcttatggctcctcactataattttaaccttttagagaaataaggataccacctcaccctcttctgtcttctcagctacctctgtgttgagcccatggtaaatgcctagataagtcttggtgtgagtgagagggaaccaataatcttgtatgttgcatagtttggtgcagggaagcataaatggtgatgttgcaaatcccttaattcattaccagaggctttcctctgccccaagtaggatagaaggatacccagaggcagaaaagaacattgagtgaaatatacataactgtctgaatcactgcgttcttgggagagttagagcaaccgtcaaagccccccaagtatccatttttattggttttgatgttgatttgatgttgttagagattcaggtctcatcttcgcttctgagatcatctgagtaacatcggtgttggagaagggaagagcagagatgaggcatccacaggcagccctggatcctgagtgtaaacatctgggaggaggcgggggatgcaggagagcctggcctccccagcttgccaggcacaaggctgagcgggaggaagcgagaggcatctaagcaggcagtgttttgccttcaccccaagtgaccatgagaggtgccacgcgagtctcaatcatgctcctcctagtaactgtgtctgactgtgctgtgatcacaggggtaagtcgcctaacattctctgtgccttgggttttggg

SEQ ID NO: 2196 - DNA, 2300 bp, Homo sapien
ccgtggtcagcctgaggtaggggcaggggctagatagcaagatgaccccacccccttcccaaggccttgtgagggttgaactactataaaggtgtgacaaagtccgatcactatatttggggtgggtgaagcagaggggacaaggctagctatgacatagaaaacaaaggcctggtcaattgtcttcccccgatgggaaaaagactatctaaggcagggggtgcaaagaaaaagggaggagggctggagagcagacgcatgcagctcccagcagagcactgtccaaggagtctgccaagaggactccaagcactgtgatctccccaagagctgtccacctccctcccaaggtagctgaggggccttagagtagcatcactgagaaaaacttcctaaagccacctgaatccccttgtgtgacccggtaatatttggatttcctgcgtggctctctcccaggagaatgtgcagggctctgtgagcctgggcactcacaggaactctgaacactggcatctggctttgacacatcagcctctgaaagccaggttaacacgaacctgccatcggcaatggcaccgctctgaccactgccagggcctgagcccctgagcctgaggatgggagtctggactgtggctctcccccagggtggatggcagcctaggactcagatctttccccatgctccctgctcactctttcatctggcttcttccaacagcactgaggcccctctcttaatacagcagaaccttcctctccaggggccaagtgttccctttacatccccacaccaccatgcccttacctctcattccccaggaacaaatgggtcttatcgtgcgagggtctcccctcttgtgccctttgcccagaaagctctagagtgaaggacaggtaggtaaggcacgccttggtcttccctgacctgagcttgaaatagtcattgccctccaggtagcctccacccaccaacccttcccaccatgtagttcctgctgtgcccacacaccacctggcagtcacatccacccccacaacggcgcagagcttcagccccagtgacaacaagggaagtcaggctttgcagaaatgcggtgtttattgggaaccatctgcctgcacatctcatctatgtgcgtgtgtgtgtttggtcacattgaggtccatggccagtgatgcaatcagacagccttcgccagccccacacggttattggtcctgtcaaagacactgtaatactcccagatgaagacattccccaggatccactgctgggaactatagtcaccctggaaaccactggtgcagaagccctggtcctggggaaggcaaggcagagatgacgctggtcccaatcccatttgctgtgcctaaagataggcgtttatacctcacccacaactcctcctcttctgtgacgtcattttatccttgaaatgaccttcccagataaacaagtattggattcatctctcaacagatgaagaaattcagattcaaaaaataaaatgacataatctaggatcaccgggtggggttctggcatcctgagtcctgtcctctgcactggactccactccccatctctcgtcctccccagcccctgcctcctgctctcagcacctactgccctgatgaccagccagagcaggcctggggggtggaggtcagtggtcagtggggccaagggctgagccccacaaagcccaggctagctaagcaaaccctgcacagagctctaggccccgggacttagaagcttgagcagcggagggaggttcccatagggagatgtggacctgcctaccccaccctccctgacaccttggcacaccgcccctcctgttccccatttttcccaggatgaggctgaagtggccacaaatgaggccccaggacaacatggcccactcagaaaggccggttggtccaaacgcatgcccctccattctctgtggagtccataccacttcttatcaccaccatcactgcctcaccaggggcccaactggggggtgggggaggaagctggtgaagaagaaggaggaggaggagcccgggcttcccctctgagactcatacctggctggtataggcggagggtggcagggggtacttcttgccgtggatctcgaagacagccgtgggaatgctgctcaggcgcccgcagtcgatgtcaaactaaagaaccaagggaggccctcttagaagcggcgagtaagtaagctgactgaaggggttccggaagggcccagaacccctcctgccaccccatgagccatggggtggggaga

SEQ ID NO: 2197 - DNA, 2300 bp, Homo sapien
aaatccaatgatttgctttaaaatatacactcctaagtggtggggcagagcctcacaccaggtccttgtcctcaagacggttctcttttctctttgttttaatgattaacatttgctactaatggggcaggtggagccgcctgcacagcacacttctgtagaccacggaatatgctgtttgaccttggcactgtctgccacctcctcaccatcagaccctcatcaaacaccctcctacctgtcacttgacctgggggtggaagtgacaaagaggaacctaggaggcagggagaagggaaatggcctggctcccaaaaaaggaagttaattatttggccaaagaagctctccctaatccccaaatgctttctgctgctggcctccagagaagttcctgataagggtcactctagccttggctagaaccatggaagtggttcccaaaccttgcccaaagctcactgatggtactcattcctctcagaaagcgggactgattcacacctggaagataatcatcagggagcaccatctgcggtccaagaccccaaaggagaaaatggtgctccgaagacatgagatcaacacagagctggagtcccccacccacagccatccagctgccaagcagttcaggacaaggcccccaaatcatcatgcgaattactgtgaagctacatttctccagggctttaccatgtacagagccaggatttgaactcgggtggactgattctattctcagattccatcctgcctcccagccatcctactgctcaccgagccttgcagagcaggctggcacctggcatgcttggcagtgggtacatccttcctcattccacaactgaggaagcagcagctccgtgaaattaggccgtttgcaatggccacatactcctgagaggtagaatgggtactctaccagtgctgaccaaccagacttgagctcatcattcaacacatggcacctgaactgagaaaaggggtcatgggatggaaagagctctggacccctgacaattctgtggccctagcctacagctccccacaaggctcagctcctatatagggactccatggtctagtgggaaaggccctgggccagaaggccatggccaggtttaggtcaggactctgtagcactagttatgtgaccttaggaagtcactttgtccctgtgacttggtttccgcatctgcaaaacagagataacatctaacctcacgtgattattgtcatctagtgagataagtgaatgtggaatcactttgaaaagactacaacactacactgcaggatagccttgtcgcctgtaaaggaaacctctccaaggctgtgaccactacagattttgcctgaggttaagtcccttacttctctcccactcccacccccagcctgcctgggttcagtgttcttaaattgaaactgaagctagaatgaacctgaggaaagaaatattagtctatgtgtatagatgtccaagcccactgggcatgatttcctaaccccacctccagcgtgcgcgcgcacacacacacacacacacacacatatacacacacacacacagacacacacaattatttacttccttcccacctaaaatgatttctcaaaatgaaattacttcctatggacaccttggactcaggccaaaaaaaattccaattgctggtagtttctaaagtgcttgttatgtgggaaagttgacaaaaaacaatagctataatatagtgatctttctttccaccaagcattccatacgtgttatctcatttgaggtaccttcaaaacaactctaggagttatttccaggtgaggggtcatttagaggacattgtcgattggccaacccagcgtcttgtttttccttccctaaagaatccccattgggttcatagatctggttccacccttcaccacttggtccagaagcaggggtggaagtgatgcaaaatggttgaattctagatatattttgaagacatgaccaaaaggatgtgtgagggactggctgttggtgtgaaagagaggcattacgaatgagattgggcatggagacgtgtttggtgagacagaaggcttcatgcaaatacaagatcatgctttttattattaaggaatgttaacttcctcttttagtatggcccctctgccatcacatatggagaccatcctttgctggggagaatctccccttctttgccaggatcctttttttgcaatttctcctagttattagtttatgcaaactcaggggtacaaaatgattttaagggaagcatgctgccaaa

SEQ ID NO: 2198 - DNA, 2300 bp, Homo sapien
caagaaaggggtctgcagatcctgtctggaggcaccacaataatagcaacacgtctctcccggggctggatcccgctgtgggcctggggtagctgctattgattatctcctccttgcctacttcattacgttggcaggagcctctcaccagtgcccctcaacttctgccctcccccatctccccggcccggcagcacccagctgagctctcctggaggttctggttagtaagtcgggctctgccaaagaatgttttcctcgcggggcgggggctgaggcccgggggcccaacgaggtgacgagctcggtggcggcggagggcagcttgtcgccccggccccggccccggcccccgccggcccctttaattcgagttcgccgtcgagccaggtgcggcgctgcgtggcgcggtgcggctgcgggcggcggccgggagctccgtacgcgccgcccgcgggactgcagagccggctcccggctggccgcccgcaccccgccgccgcccgctgccggggttctgccggcgctggccgtaacctaggaacatggaggccccggtgcccatccggaagggtaaatccgtgtcggggcgttgcgcggcgcgtgctgccttccctgcccggctgcggcgcccagaggggctgcggggcacccggcggcgcagcctgcagcgcagcaggcttgggctgagtccgcggcggcaagcccttgccgaccactgccgtctgctcggcaggtcccagaccggggagatcaaggggaacttgcaccctgctcaagaagagtgcacagaatgggctcgggaccctctggggtttgcgtggcgcggggcggagggcacggagaggagctggtgggtggtgggaagtgcagctggcagcataaccatgtctggtaaatagcgcgggttggtaggacctgaaccacttgggacggccgggctgcattcgcctcttcggcacagaataacaaacggctttgctgcagagagggctttccccttcgctggggccgtgggctgccgccgagcccccgcgcttaaaaggaagctgagatctggggcggcagcctggcgcaggctactccccacccccagagatcaggttccgggattttgggttggacactgagcctcggcggtccctcggctggacgccgggggcttaagagctgaactgcgcttgggcccgcagcaggagccgaccgcgcgggcaggagggggttaaggtggcgctagcggccgcggccagcgggagggtctggtcctctgcgcggaggcgagcgctgagtgcgccgaacggaatcccggccggagcccggggcgatggggagagggcccagacccctccccgccctggggccggcgggattgggtcggcagggggccagtccggaagccggcttcctccaggctccccctctcgctgctgccaagccgcctcgcagctaggcaggcggagcgtttattctgtgctccctgccgaggagatgtgagggattttctcttgggggagaaatcagtggtcgagcgcctgcccagctcaaatgccacccggctcagagggaggcctgcggcccagggatcccggagggagagtaagttcatccagttttcgtacagtgcagactttgttgtgtggggtctccctagatgcgctctgaaggagtgtgtgtgctggggggtggggtgcttcttttccaggactggctgaggtcagagcttgtagacaggctgcagtgagctaagccctcctcttgggagctgctgtgtcctgacatgtgggggtaggagtgcttcttccagagtccttcctgagagcagctggggactagcaacctggatcaacccagggaggcccctggagaaggcaggcccagccaagcctgagtcttgctccctgggagaaaatgcttcaagctgatgggaagcctgcccagaagaggcaaggaggctgagggatagtcctcaggcctggcatcagaatagaggatgggcatgggggcctgttacctcccatgagggaagctgccagaccctcctaaatcttggcaccagctggttcaaatgccctggttccaccttgctgctgtttttttccaggcaacgtcacacctcctgaggacagccaggactccagcttttgctgagctttgcatcttgcctccttccttcaaaaggctccaggcccatgctcggctgtcttcaagtcccgcatgcccctggccaggcacctcaccgcccctccagcccagcccaatcctagagctcacctccaggacccagagtctgcccttctgcc

SEQ ID NO: 2199 - DNA, 2300 bp, Homo sapien
tggtctctggcatgtttttgataccttccacccttgagcactgtcttctctccccagcctatcagtgtcctgctgtcagcactcccaccagtccagtagcccagaacccttaggcattgctttaagtactttcttgcaagatttccaactccagcaacccccttcctgctccctcaccagcacagtcccaccctgcatcaataacatggtggccttttcactcctttacccagtctaggggtcccaatagggaaaatcccatagccacaaggagaggaagtactgccacgtccttccttttcaccaggatctgggcagagttcggtctgtcttagtgaagacctttcagttccaggtgcctgaggaccctaacctcagccagcctctgtactctcagccaaagccaatcccaatccattctcacctcctaccatcaaagaagtgtcccaggtctgggccaggcgaggtggctgacacctgtaatcccagcactttgggaggccgaggcaggtggctcacctgaggtcaggagtccaagaccagcccggccaacatggtgaaaccccatctctactaaaaatacaaaaattagtctggcatgatggtgggctcctgtaatcccagctgcttgggaggctgagataggagaatcgcttgagcctggaaggtggaggttgcagtgagccaagattgcaccattgcgctccagcctgggcaacgagagcaaaactccatctcaaaaaataaaataaaaataaagaagtgtcccaggtcttatctgagcatggcccctccacctgtgctctgaatcccttcttacttctgccctccaggaattctctctccttattttcctgcatcttcaactactcattttgtatctatttctctccataagtttcttccatgttaaaacaaatgaaaaaccttaaacaaataaaaccttgtttaatcctacattcccttcacctaccacctaatttcatcattttatttacaatcaaatgtcttcaaagagtacctataagcccgttcctgcctcctcattgcccactcactcaacccatggagctccgcctctgcccaacatggctccactgagactgtgacctccgtgttgcttcctccaaatgacacattcagtctcttcttgcctgacctctcagctgcctttgagccagccttcatctgtggcttccaagacatcactctcccctgattcctcctctatctatggctgtaccttctccatttccttttctggctcctccttgtctttaggcttttaaatgttcccacttttctctcttctcttctacatgcacccctaccccctgcataatctcatacatctcagaggcctcatccgtacagacttctagatccagcccaggcctatctcccaagctccaggcaggaacatccaaatcccactgcactccccactcaggtatcccatggacccctcagactcaacaggtctacagggcttgtttagcctactgactccatccctgcagtatctcttttcagttcatacccacatcttctctgtctggaccactgcaacagcttcccggcaggtggtctccctacccctgcagtcattgccccctcagcagtccatcccccacagcagccagagtgatcttccttaatagaaaaatccagtcatgtcacctctctggcttaaaatcctttaagtttcccctacctccaaagtaaagtccaaataacgttggcagagccttctagaccttgtaagatctggtccctgctaccctctccatacacttctcttttattgcttgcacactgagctccagtcataatgaattacttgtacgcaactcccttcgccttccctgttgtctcctgccatgttttccaagtgctgattgctctttctaactctgcatggctaacccacccctgctagtctgcagtgctcagtttctgttttaagagaaaaacccgttcttgcactccctggctggggtgacaggaaacacctgaagattgttgatgaagcatcatgcaaccaggtcacctagaacctgaaaccctttgagcgctgaccaagaaaggaagtggtgatggggcacatagaagagtgagccatcatctggtttccagcgccaagacttctgcaggagagcctccgctgggctttcaagttggtgagagaagaggaggggcagcaagggtgagcatgcatgtgtggacataacaggcagggaatgatgtgagcaaagacagagaacaggaggtgactggtaggccattgctggggtgcagca

SEQ ID NO: 2200 - DNA, 2300 bp, Homo sapien
aacttctctgggccccaaatacaaagtaaggactttatatgtgtcctaagaagcacataatcaaagtcttccagacaaggcaaatacatgaaagggaatggaaatagtcacttatgaaggaaagacatttcacagctgggagaagcttgtgaccatttgtcacaggactatcctctgctctggtcttccttgccattgattaatattaatttcagtactaattcctgcaaaagaaggaataaatcattttctaagtcagacatagaagtacatgaaacatctggtctttaaaaatagggtctttgcctttccatgagctatcattgcagcaagcagtctgtctcattctaagatttaaatatatgaatgattgattatactgctactctaatcaccagctcaaaatatatacgcaaaataatgaggtggctgtcacattccagtgttctggagttttgtaagagaaagagttttacgtggttgcccagttttgccattccacaacataagtgactgcctgcattgtctggcactgaccaggaggtgaaacggaagatgaagggacaataaaaggacatgggtgcctgttgtgcccaggagagccggaggtggaaatcctatggaataaatgagcagtgttttctatggtgagctcagtttttcctcactcctcatcctaggaatcacagcagcatcttgggctcaaaaagaagaaatgttgaaactccagagcagatagcaacgcaaagagacactccttggggaattcaatctgacaagtatgtaccaagtctccaccatttacaaggcactttggtagttgctagaaatataagttggctaggacctactctgtgccctagagaaccccatggttgggagtggtggtgggaagtattgaccacaaatcacttacttaaaattgaattgtcagctaactttgggtgggtgaggagctgtctagacaatagttcctcttctgtaaatgatttgaatgatacaataaaaaacagactttttaaagcctagggttgagttatattagattgctaaaatttctggaaacaaattgtgttcaaagtaaccacaataatttggaaaaataagtttaaagaagatacatgtaagttatctctgggcccagatcaagcaagaggtacaagttgcagaatgaatgtccttccagtttaacaactagagcgctgcaaattccctaccacaagggcagtgccaaaatattaagtaaaaagtctaggtacaggtcctgctctcatcccttccacgacaggcttgagtcataaagctggactttctaaccacacaacttcgacttcgtgaatttcctttcccatttttcctcttatttccccgccaacaggaaacctgtgtagtggataaagaccaggctgtcactgctaatcccaatcagaaacttggtccttgattcttcccagtggccgacatctccgctgcgaaaacgggtgtgaactattcactaaagcagcagggcccgaacgcctttaacaatccatttccttcggactccgtttgcgaagcccatcagcacccattactccctttggcttcgcatcctagcagaagctaaattgtttaaacccccgctcctccccagggtttggcggtcctcgaccctcaagggaacctgggatgccggcgccaggcttgcctctggcccagggcgcccgcctggcctgcactccctccctggacactgggcccgcctgccctccccgggctgtacctaggggtgtggaggccagggggccggcgcccgcggggccgcggcgggagctctcccggcccacgggccgaaaaccctggcgactgggacgcggccaggcgggccgggggcgaggggcgctgaccagaagcgggcggagcctaggggcccgggccggcagcctgactccccgtgggccggctctgctgggtgggcattcccgcggggcgccgaggtacaacatgagggctctttcgctgacaccgaggggccttgagggctgcaagaaatgcaggcccggcggctgcccccgagagcgggacgcgcgcccgcgcggtgggcgggaatcctaaggggacgcggaggcgggcgcgcgccccgcaggggagggggcggagagcgcgagaaggagggaggaggcgtccccgtgcgggagcccggctgaccgcgccagacccagacagagcatcgcggctttggctgcaacaggcggtgggctcggctcgggggcggaggcggcgaaagggcggggagcgcgaggaggagcgacctggcctca

SEQ ID NO: 2201 - DNA, 2300 bp, Homo sapien
gaatgtaaattagattagccagtgtggaaaacagtttggaaatttctcaaagaacataaaacagaactgccttttgacccagcaatcccattactgggtacatatctaaaggaatacaaattgttctatcataaagacacacgcatgtgtatgttcatcatagcactctttacaataacaaagacacggaatcaatctaaatgcccatcaatgatagactggataaagaaaatgtggtacatatacaccatggaatactatgcagtcataagaaagaatgagatgatgttctttgcagcaacatggatgcaggtggagggccttatcctaagcaatttaatgcaggaagagaaaaccaaatattgcatattctcacttataagtgggaactcaacactgagtacacatggacgcaaagaagggaaaaacagacactagggcctacttgagggtggagcggggaaggagggagaggattaaaaaactacctgttggtcactatacttaccccctgggtgatgaaataatctgtacaccaaaaccctgtcacatgcaatttacctatataataagcctgcatatgtacgtttgaacctaaaatgaaagttaagaatgatgttctacagcattttcttcaaaactttactcttagagcccataagcaaaatccaatgtactactagttaactttaatctcccatttgaagtttccaatcttataattctcacaaaatctatgcctcttaaactctaatatccttatatacttaaataactctgaaataaacttggaagttctatctgtattctcatatttcaacagtgattatcttccaataataaaacagaactactcacttagaaggcttttgaaaaaggcctaaatgggggctaaatacaaaatgtctatgtgagtatttgtctattcagaatgtattttggcaaatacgactgcacagtagtagagtactcataatttgtattcccgctattcgtctggccaagttcaagtttcctaaactctcagattctattatcatctatgatggtgatcaatataccccgtattgagaagaccaagccatgagtctgagcttctgctaaatgccttttctaatttagttttttcaaagtttttgagcgttcttttgggttattcaataacatggggtttcctgatattgtcttattctctatttgtttttgttcttgtccctccaaatgaattctaaatatctgatggtcagaaacagaattaattctcaataaaattttataggtatgggtataagtgggcacgttgttctctaccaaacccctaaacccaggaaacagccacctctagttgtccggcacttggaacaacccttcccagtgaaatgatggaaagaggcacattcaaggaaaaatgttctgcattaaaatggtcacctattttgctgtgaacaatttgtcttgagatagtcttcccgatattcctaagattcccccttatttatcacttctctctctgcagatgttcagtctacctatctctttcttctccttactctctctgcctgtcccaaatttctggttcccctaacttgcaggcctcacattacctgaaactattcaaatatttatagaacacctcttatgtgccagacccaataccaggcactaaaaatacagtcatgagcaagatcacccaacatacacagagtaacacagaacctacagagctttcagtctagtggggaaaacaatgaaaaacaaggaatgacagagggtggaggaatgcctgtgggcaatgggagcagagagcaggagtaactgttcctgcctggagggctttctggtgctatgatgggggatgagtaaggaattaagtgaacaggtgagaggatattctagagagagctcgtgagacagaactagattgatttgtttaagcaactaaaaggaattccatatccagtgttacccagtgtgaggagatcttgggggtggggccggggaagaaatagccggctgagagttttaagctggggagtcatgtgattaaatttgcattttagaaggctctcctcccttcttcctgaggacagactgaagaaacatccaaggtggtcttgaaggacactgggatcctgtaacacaggtaaaagataaagactaatgtaatttctatggggttggagagaggtggtctggtttgagaaatatttaggcaaaagcataactgacaggacttggtggctgataataggtggtggtgtgggagagagagtagcttaagaggacacctggtttctcat

SEQ ID NO: 2202 - DNA, 2300 bp, Homo sapien
gcaactaaaaggaattccatatccagtgttacccagtgtgaggagatcttgggggtggggccggggaagaaatagccggctgagagttttaagctggggagtcatgtgattaaatttgcattttagaaggctctcctcccttcttcctgaggacagactgaagaaacatccaaggtggtcttgaaggacactgggatcctgtaacacaggtaaaagataaagactaatgtaatttctatggggttggagagaggtggtctggtttgagaaatatttaggcaaaagcataactgacaggacttggtggctgataataggtggtggtgtgggagagagagtagcttaagaggacacctggtttctcatgaacgtggctgaaaggccagtcaggcctttcctggatggtggacatggtgggaggagcaggcttgagtgtggggatgccaagttaatcaaactgaagttggatattggatttgaggtgcctgggagagagtggagctcaaaggagagatcatggcatctatatagatttgtgaatctttggaacagacagatagtaattagagccatcagaatgggtgagataattaggaaaatatgagttcagccagaagcctctcctcagccccaccacttcagggacctgtaagcatggcagcagctctgagtgagggtcagtgattccagccgaggtgcagagactttttaatagcattccctaaagtgtagttacactgaaaaattgttccccaagagaaactacacacacacacacacacacacacacacacacaccacacagttccatgctcagataagtttggagaaatctatatattatttcccctgcttagagaatattaaggactgacaagttctgcagtaaagacctttttaccttcatttaattcagttttccccacaagacagccctggctggagattactctggatctgaatgtctcagggtgaaggaagcgggagacagctagctttcccagaggcatgcccgcaagtcagcaccgcagagtgcatctatctgttcatttataagatgaaaacattggggcccagtgattgcttccaagtttcatagttagctagtgatacatttgggttgtcacatactcctttgacccaatctaagaaaattccagtgatgcagcatagtgaaaccagaaacacatttttcaaaatatattgatcacagtgtttctcaaaaggccttctctgtgaccttgaattttaatcctacctctgacatgtcttagttgtatgagcttgggcaaattttctaacctctttgagcgcctgttttcttgtatataaataaggatgtaacagtaaccagtaggattattattaggtgttaccattaataaactgaggctgacagattgagacttgctcaagatctcacagctaaaagagataaagctggaactgaaactcagatctttggctccaaatgtggtgtttcctgtactaaccaaatcatttctaccagtgcccctgggattatgccttggggactcaccttaagacagtcttgctctcgagacagagaagtctgcaaatggtgtccaattcaagtctagagactggctgaagccagacagagggagtatgaggagggggcagagaatcttcagaaagacattccaaagtctcgggcctagaaaatgtttagaaatattggttcctgtgttcccctccagtctgtctacctgaatgggaaactggtggtggggccaggcatacttctttttgaacaaatacacagttaattctgagatgccaccttgattgagaagcactgtccttttctaagcaaaaatcattgccaaattaccctagaatccaccactgctcacagatctgtgcctgaaccaacttggttttgaagttttcttttgtttcacaaaactagtttagggtgggctgtgagaggaagcttctaaaaagccactgggaaagtactaaatctctgagactaaagagggcggactcagcctcacttcctccttcttctcatctgggcttcctgtcgtcacagcatgatcatattttttcacccttcacttctccttttacacaaatagccccggatatctgtgttaccagccttgtctcggccacctcaaggataatcactaaattctgccgaaaggactgaggaacggtgcctggaaaaggtaaggttgatgacgttttaacttggcttgctgtctaatgtggggtagggcgtattcttaggggtctccatatacctctctagtaaccataaaatctccggc

SEQ ID NO: 2203 - DNA, 2300 bp, Homo sapien
ggcctacctcctttcttttaataagtctttctccaacagtgagaaacctggctcttattatctacaatatatgtacttagttgttcaattctaatgtacatgtaaaggtagcttcagtagcactaattcatacccctgcaagaaacccttttactaactagattacagcactttagtaccattctttttgtcattagccttttattgcccagaaaagatacttagagttacctagttattttcttcctcacttgcttaactgtggttgttattcattcttaatacatttactttcatttgttagtatttgtattccatttagggtttcccacacttcttggttggttttatcatttatttatttgggattatgtgaagggtatgtgagacataattatgattccaagagtcagagctacacagaaagatataatcaaagaaatgttactgtacttcatccttgctaacctcatttccttctttattcctttccctctaggtaatcagccttactagtattttatctttcctgtatttcttttgaacaaatgagcagataactatttactttctatatcctttctttcctacatgaaggtagcatgctatggatactcttttgtgctttgcttttttcatttgacagtccatcttggaaatcactccatattagttcatagagctcttcctcattcttttcttatacctatttaatattccactgcatgacatgctatagtttattaaatcactctcctgtggatgggaatttaggttgcttccaatactttgcaactaagaacaatattgcaactaataaacttttgcattcccatcagcaatgtatgaatgtacctattttcccacagccttcccaacagaatgtattgccatatttttacatttcatggagtctggaaagtgataaatggtatctgagtggttttaatttgcatacgcctagtttcaagtgaatttaaacattttccctatgttttaaggtcatttttatttttttagggtgaattttctctgtgtatgtttcgtttctcatttctctattgagtttttggtcctttctccttccttaaattttaacaaaatcacttggctattgtgctgaggacaagctgtaggacactggtagaagcagagagacagttagttgattattcaataatctagatgagagatataatgcaagctaatcacagtagaggtggtgagcaatggtcggattccaggtataatttgaatgtaaaccaagagaatttcctaacagactggttgtaaggcacgagacaaaggaaaaattaaggtggactccaaaggatttccacctgatcaagtggaagcctgaatttatcattaactaagatacagaagatcttggttgaggcaaattttgggtgggtaataaccagaagctgattttggcctgtgttgattttgagatgcccattagacttccaagtagaaatgtcaagaaggcaattggatatacaattttggagtcaaaagaggagttcctgaatatagacggtattttgatccatgagaactaggtaagatcatatagatgtaaaataagagacataaaaagattgagctctaaataactccaacattaagagatcatagagaaggggaggaactagccaaagagactaagaagaagcagtcaacgaggtatgaggaaaaaaaagattattatgtccctgaagcagagtgaagaacaaattgcagtgaagacaaaatgatcaaaagtgtcaaatgctattgacaggtcaagtaagagactaagaattgaccattagatttagcaatatgatagttattggagaccttgacaacagcagctttagaatgctcttgcagaaaagataaaactctaatttgactgaatttcagaataaagttaagtaagagaccagcagcattggacaaattatgaagaataatgttgtgaagtattcaaggcgcatttcagtatcatgaaatacaacatcagaagaaatacaggtgtttgatgactttcatgagcagcaaagctttaataaggagcagaaaaataaaaaaggaggctaaatttaagtcaaaaaaggtagatgcaatatatttattaggatttatttaaccaaacattgatgattactacgtgtcaggtactattccaagtatttataaatataactaatttaatctcttcttcttccagtctttaaaattaactaaaatcatttttttaaaaaagaggccacaattttttcttttctgtttatactacttcctaagtactt

SEQ ID NO: 2204 - DNA, 2300 bp, Homo sapien
ttgagcccaggaggtggagattgcagtgagccaagattgtacacctacactccagtctggatgacagagccgggccctgtctcaacagcaacaataacaaaatgtcaatgtaatattttgacccactctcacgtgtccaaaagacttttaaatttttgtaaggatataataatgttattcgggctgcagaaaggtaaaccaaatttctacggatacatagaattttgggtattgatttttattaatacctgagagttttaaaaacatacctttatgcttttgagaatcctaattattatcgttattatttgcccttgaacttttgtatttatttgatcttagttatctaagaccatgctaggtctatggtatatggatgctgcactcatattggtagaatataatatgagagacagtctatagacaaacatattaatatatgatgacaatctatgatatataccatgaaggaagctaacaagcataatgttatggattaattatgaaggaaagacaaggataaagtggtcagaaaatgtatctcttgagaaatatcatttatgccaagacttgagctatgtgaagagttgagttgggtgaggcgtacctaggtagagtgatagtatgtgtgacatgaaagctcaatatttcccaggagctgaaaaatgttttagatataaataaggtaaggtatttacattcaagtaatctccaaataactaattatgcaaacagagattagtatatattgatttttcttaagattagacagtctatactaagaaataattcaaggcatgggggtcagaattgattcagttaaaaaaaattgatttccagtctgttccacattgattgaaaaccattcagctgaaattgcagtggtattatatgtatgggttgataggtgattgacaattgactaatataaataattgctataccagagactatgtagcactaaacctcaaatgtgctgaaacagtaatcagaagaaaatgattcctatgtaaacagttcagtgaaatctatagcacaaaaatgtggcaaactaaggtaacaccatgagagatagcttaggcaaaagaagaatggctggcagaacttgtgagttattgaaggaagaagacagaacagattgagggggaaaagagagaaatggaataagagtaaggggagagggaatgagaatcttcagttagagtagaggaggaggacaagaggaaggaattcagggaaagggggaagggaggatgctaatattttaagaggagcttactttagtagtataattttatatagggcaaaaccttagaaatgtctacttttagtcttaggaataaatgttattatctcatacccattgcctaatcatataagcagttgactatatcattatctcttctacttcaaaatatttgttttgcagtctttcactttaaaaactcaaaatggaaaattatatactttattttaatatttacaaatatttacaaatatttatttttaaataaaatgtatataccatgtagtatgttgtatttatttactcaatgttcttttaagtgtttcaggctgcatgtaccaagtagttcagacgattggctcggatggaaaaaatcttctgcaattacttccaattcctaagtcttctggaaatcttataccactagttcaatcttcagtcatgtctgatgctttgaaagggaatacaggaaaaccagttcaagttacttttcagactcagatttccagctcttccacaagtgcatcagttcaattgcccatttttcagccagccagttcttcaaactattttcttacaagaacagtagatacatcagaaaaaggtagagttacttctgtgggaactggaaatttttcttcatcagtttctaaagttcagagtcatggtgtgaaaattgatggactcaccatgcaaacatttgctgttcctccctcaacacaaaaagactcatcttttattgtagttaatacccagagtcttccagtgactgtgaagtctccagttttgccttctgggcatcatttacagattccagcccatgctgaagtgaaatctgtaccagcgtcatcattgcctccttcagtgcagcaaaagatacttgcaactgccaccaccagtacctcaggaatggttgaggcctcccaaatgccaaccgttatttatgtatctcctgtaaatacagtgaaaaatgtagttaccaagaactttcaaaacatttacccaaaacctgttacagaaatagcaaagccagtaatactaaataccacacaaa

SEQ ID NO: 2205 - DNA, 2300 bp, Homo sapien
ggaatttggatgtataagcctaaatttcaaagaagccacagatagaaatattgaaattgttcatgcgtaagtgataatttaattgaagttatgcattgagaagaaagcatctaacaaaagagtacagaataggaagagaaggattctttctaagctttggtaaactcccaacatttgaaagttgattcaaaagtatgagttggcaaagaagactgaggagccactacagaggctactgttactcttttgatttttaaaaatcaattaaaatataagaatgcacagaaacagagtgggccagattaggcccagaggctacagcttactgacccttttttcctgatgagcctggtgcttaacttaaaacagacacttggtaaatttttgtgtaatgacttaatattgaatatgttcttatccaggtcaaatgtgcttttcttgtggtgcagggaggtaataaaggtagatttttcctcttaaaaccctgaaagcaagaattcatccttttctttgggtttattctctttagaagttaacttttaatttattaaaagtcagtgtgtgaccagcctggacaacatagcaaaactttgcctctataaaaaatacaaaaattagccgggtttggtggcgtgcatctgtggtctcagctacttgagaagctgaggtagaaggatagcttgagcccaggaggtggagattgcagtgagccaagattgtacacctacactccagtctggatgacagagccgggccctgtctcaacagcaacaataacaaaatgtcaatgtaatattttgacccactctcacgtgtccaaaagacttttaaatttttgtaaggatataataatgttattcgggctgcagaaaggtaaaccaaatttctacggatacatagaattttgggtattgatttttattaatacctgagagttttaaaaacatacctttatgcttttgagaatcctaattattatcgttattatttgcccttgaacttttgtatttatttgatcttagttatctaagaccatgctaggtctatggtatatggatgctgcactcatattggtagaatataatatgagagacagtctatagacaaacatattaatatatgatgacaatctatgatatataccatgaaggaagctaacaagcataatgttatggattaattatgaaggaaagacaaggataaagtggtcagaaaatgtatctcttgagaaatatcatttatgccaagacttgagctatgtgaagagttgagttgggtgaggcgtacctaggtagagtgatagtatgtgtgacatgaaagctcaatatttcccaggagctgaaaaatgttttagatataaataaggtaaggtatttacattcaagtaatctccaaataactaattatgcaaacagagattagtatatattgatttttcttaagattagacagtctatactaagaaataattcaaggcatgggggtcagaattgattcagttaaaaaaaattgatttccagtctgttccacattgattgaaaaccattcagctgaaattgcagtggtattatatgtatgggttgataggtgattgacaattgactaatataaataattgctataccagagactatgtagcactaaacctcaaatgtgctgaaacagtaatcagaagaaaatgattcctatgtaaacagttcagtgaaatctatagcacaaaaatgtggcaaactaaggtaacaccatgagagatagcttaggcaaaagaagaatggctggcagaacttgtgagttattgaaggaagaagacagaacagattgagggggaaaagagagaaatggaataagagtaaggggagagggaatgagaatcttcagttagagtagaggaggaggacaagaggaaggaattcagggaaagggggaagggaggatgctaatattttaagaggagcttactttagtagtataattttatatagggcaaaaccttagaaatgtctacttttagtcttaggaataaatgttattatctcatacccattgcctaatcatataagcagttgactatatcattatctcttctacttcaaaatatttgttttgcagtctttcactttaaaaactcaaaatggaaaattatatactttattttaatatttacaaatatttacaaatatttatttttaaataaaatgtatataccatgtagtatgttgtatttatttactcaatgttcttttaagtgtttcaggctgcatgtaccaagtagttcagacgattggctcggatggaaaaaa

SEQ ID NO: 2206 - DNA, 2300 bp, Homo sapien
aatcacgccactgtactccagtctggggtgacagagtgagaccctgtctaaaaaagaaaaagaaaaaaagaaaagaaaaaagaaaaagaaaaaaaggaaaagaatcaaggattttgatccttatcataagagcaatggggaaactgatttttttttttaatgcagtgagatgacaccatcagatttgtgtttccatatggtatctctggctgcagcatttacaggaatacaagagtggatatgaggctcacgcctgtaatcccatcactttgggaggctgaggcggggagatcaggaggtcaggagatcgagtccatcctggctaacacagtgaaaccccatctctaattaaaatacaaaaaattagctgggtgtggtggcgggcgcctgtagtcccagctactcaggaggctgaggcaggagaatggcgtgaacccaggaggcggagcttgcagtgagctgagattgcccactgcactccagcctgggtgacagagtgagactccctctaaaaaaataaataaataaaaaaggagtggatatgagggtatccgttaaagctttactagaccaagtaagcttgctctacagtagtagtaatagaaatataaagcagacttgtaagatatttagaagataaaatctgcaaaagttggtgaattgtatattttggaataaaaaaaggaaagtgttaaggatgacactgggatttaggcaactttaatggaaggaagttatttctttctttctttctgagatagcactgataaaagaaaacgtgtagtggggggaagagaagcaagtcataagtgtggttttgaacatgtttcatttgaaggggcttttaaaatagcaaaaaggatatctcaacaattcacttgaacatccaggtatagatctcagagaaatcagaactgggaacataaatttatgagtcacacggcagcataatgcagtagtacatggtgtgtttagccagacaacctggatttggagcctggctccatcactcacaagctctatgacctctaaaaatttgttcaccctctctgagcatcagttacttcatctgcatataataattattttattagctgttaggagtaaattaattttgtaaaacacttaaatcagtgccaaggacatacatgtgtttggtggtaaaataatgggtggaggtggtaattcaatccaggagcatgaataaaaccacgaatcgagacaagacagtttgaaaacataagagaatcagtgatcaagctgaaaggaactcccttgaaaagggagatatcttcaaaagagattgagaaggtgtagacaaaaaggtaggagcaaaaccaggaaagtatattgccaatggcgtcaagatgagggactaattaatagtgctgcgaggaaaaattctcaaatagtgtgagataaagagcatcaactgcaatggacagctgaataaatgatttaatgaatacaatggatgttctgatgcaactcccagatctcccttcagaaataaaggtctatatgacaataagtgatagtttcgatgaacgtaggctggaggaaagagttaagtaagtctagaggcaaagcttcaggaaagaggagtaaatgggaaaccttcagagaagcagcaacaataatcgctggccacaggcaggcgttttaagttttctcaggccagaagtgcatgactccaaaaaagcgcgccgatgtcttttaatgcactgacgggagagaaaaacgtacgctagcggcgagcacagaagcagaaaatttatgattgaccccggaaacattttattttgcgtaggtgtcgggagagctttcttttgcgatttgttccttgatccggaagaaaagatagcaaatatcacttgccattggattgcatcataagggttgggctttagcgagccagtcaccttggcaaccggacgtgacgaccccggaagacgcccgaccgagctttgctccagctatcggcttcagtgggcggggcggcagagccagactgacgcagtcttcagcactgaccaggctctgttgggggtggtgccaccaaggccacgccccctgcgcctgctccggcggagtctggagagttgtcgtaggctctgagggcggagactcacgccgattctctctcagcgtagggctgtgagggcgcagtccaccgccaggagccttccggtttctgcgcggtgcgcgacctcgtcccgaagcctggggatacaccctctcgagagcccgctgtcgccctccgttaaggtcgaacccctcacagttgctgtgggcaactc

SEQ ID NO: 2207 - DNA, 2300 bp, Homo sapien
ctagaggagttatccaaggttatagagaggaagagactcaaaactgtcttgaatgtaagctccgcgagggcaggggctttgtctattttacttatcactgtgttcccgtttctgaaatggtgtctggcacatggtaagtgcttgataatacttttaaaaattgatcagtaggtgaataggcgttaattgaatacagacatagtcaacaaaaggtgcaaaaaggcagttgtgaaaagcctgtggtgtttagggaatattctggtgggacagataaatccatctgcctgaatgatggtaggtcaataacatagtcttaacataccaaggacagctttttaaaaatcaatatatattgatttctactatgtggaagagaaataatcttaaaatgatgtgagtaaaaggtgaagtaggcagatatttgtgaactcaaattgtcatgttctctgtataaaatgatatgagttgaactcatggatttataaaagataagaggtttgaattaactcctgatattcttatcccttagaagaaatatatgtgtttatctagtatgagaaatccacataccttcctttttttctttcagtgacactggtacagtagctccagaaaaatgcttatttggggcaatgctaaatattgcggcagttttatgtaagtaatgaaagtgattttaacatgataatagccaaattgctacagtattttcttctttcaacactggagtgttacttgttttactttctagttatacttgagagtatgttatcactaaataattgatcataattatgctccttttaaaagaaaaacacttttctagaaatgcggacttatgggaataaacctttaaaaaaatatgtgtcggattattctactattcattcaaatggaagttgttaagtctaaccagatattccttgaggactgtagtggacttcttaagcaaccagtaaggaacaaagagttgtggatgcagctgaccaccgctaatcctaactaaattcctttgggataaacagtttagatgtttgagaataaagatggaaccatgttttgatttttgagcaacattctaatgctaaagggatagagttgctactgaagtatttcatatccctgtttattttgaaccaaatttttattaatggtttactcacataatatttttccatcaagtgtgattgttttaaatatttgcattcttctgtatgtttattatttgcttaggtcaaaaatagaaatcaggaagataattcaacttaaagaagttcatttcatgaccaaactcttcagaaacatgtctttacaagcatatctcttgtattgctttctacactgttgaattgtctggcaatatttctgcagtggaaaatttgatttagctagttcttgactgataaatatggtaaggtgggcttttccccctgtgtaattggctactatgtcttactgagccaagttgtaatttgaaataaaatgatatgagagtgacacaaataagcttttgggttttttgcctacgcccattttatctatattctataactagtgctgattctgatgctaatcataaaaacattttgtgttttatataactgtttgtaaatatgagacccatggaaggcaaatgatttgcttagtcactggagggatcagtagttccataatacaaccttaaggttctccaacatccacagcatgagccaggcacacaggtatgtgcctacagtcccagctatctgggaggctgaggctaatggatcacttgaggtcaggagttggagtccagcctgtgcaacatagagagaccccattttttaaaagcaaaaacaaaactacagctattttgtttttttttttctttttattctctctgattaattttaaaaggaaaatctgtgattctggatagcagtgacctttgtgaactcttcattggcaactttatttcttgattatttattactttgttgttttttggattatcttttcccaggcattgctaccatttatgttcgttataagcaagttcatgctctgagtcctgaagagaacgttatcatcaaattaaacaaggctggccttgtacttggaatactgagttgtttaggactttctattgtggcaaacttccaggtttgtgttttagcccagcataggtattttccttaagtacataaatatatatattaaaagggaaacctgaagcattcagttacatgctgttgttatttctttaccttagcaaaatagaaatcacttcctttaaattatttgaccctattagaaatagc

SEQ ID NO: 2208 - DNA, 2300 bp, Homo sapien
tttcctggtcccaggcaaagcggagcggagatcctcaaacggcctagtgcttcgcgcttccggagaaaatcagcggtctaattaattcctctggtttgttgaagcagttaccaagaatcttcaaccctttcccacaaaagctaattgagtacacgttcctgttgagtacacgttcctgttgtgagttctgggttcagatactttggtggctggagggagcgagggggaggggagagtttgaaattacgatccctggtgaccttgtgtttacacgaagctcagtcttctgcactcaattctatcgcagcgggtgggtcccacacagaaaggaaattgctggtcctgggtatcttcacaaccgtgctttcaagtaggatacatctgaaaaacacaaaacactgtagaaataatctttccagttctcccaaattttaatttataaatcagtaaccaaatgcaactctgtattttgcattgcattatcggattgtcctcatttctcttaatgtaacatttgatgcagcttataaaaaaacttaattttctagactctttaggatttaaccattaggagaatattatgtttgtcaggaggccaagttagagtttagaaaagtaagtatttttaaattatattttgatttgagcctgatggttctgtgcatctctaaaagcagcttagggctttctgaccgttcacttggaacttccagaatttcctttcttatttcttagcattcaccacttggcgaagacagcatgaggaattcattttattaccacgggtatttaaatatttgttaaaaaattgtaatcacagttttgattcatagaacttcaaagagagcagagaagataggttaggttagagatgcaagactttttcttttctttttttttaatggagtatcgctctgttgccaggctggagtgcagtggcacgaccttggctctctgcaacctccgcctcccgcgttcaagtgattctcctgcctcagtctcctgagtagctgggattacaggcgcccgccaccacgcccagctaatttttgtatttttagtagagacagggtgtcaccatgttggccaggatagtctcaatctcctgacctcgtgatccgcccgcctgggcctcccaaagtgctgggattacaggcgagagccaccgcccccggcctgcaagaacatttttataaacattcttactgccctgtgaaatttattcctgcatactctcaattattttgaaaggctttttgaattatgaatcattgaaattctaattttgttggtttggcaattactcagcaatgctttcaggtttcaaaggcaaaaacacattgacaattagtcttcctcacctagtccatgcatttaaattcctcagttgtcattcgcaaactggtaaaccatttcaagccctgcttctataaactgtcagtttaaacaactgggactctcaaagcctaaggagatacgaatccaagataattcgtacatagaaaaaaatcatacataaagttgtactccatacctgtggccttatgactacataattaataaatcagctatcattattatattgtatgcttattctactccactccaaggaacaactgtttgagtactgtaactcagaagctaagtaaattgcctgaaatcatagagttgggtagtagtaaaggtaggacttgtgtttagagatatctcatctcacagctgtgttctttacatcacatggacttgcaattgctttattttgcttaataatctattatttttttcctcatgtctctctataggagaagacgcaatgatatttcttttttcctctttaagatagtgaaggtgttggatgtgagaatgcatatgaaaatttatatcctggaattaaaacattatttaattccagatggtacaacatcattgtaaaaaactcaagtgtcaactcatcaaagaaaaataacctgttaacaatgctgtagcctagtattctgcccatgaacaatattggcgtgttgacttaaaactgtacatgtttaaaattgtgtggattgagagaaaaacttcttattttctttgtgtcggttttaggatttacaaaaggtgcaggtatgagcaggtctgaagactaacattttgtgaagttgtaaaacaggtaattcatttttcacattataagaggaacaagtacatactgatcatctctgaaaataagtatcttatttaatccttgaataaacctctatgaaatgggtattattttatactatttaacagataatactaaaagctaccat

SEQ ID NO: 2209 - DNA, 2300 bp, Homo sapien
tttacaacttcacaaaatgttagtcttcagacctgctcatacctgcaccttttgtaaatcctaaaaccgacacaaagaaaataagaagtttttctctcaatccacacaattttaaacatgtacagttttaagtcaacacgccaatattgttcatgggcagaatactaggctacagcattgttaacaggttatttttctttgatgagttgacacttgagttttttacaatgatgttgtaccatctggaattaaataatgttttaattccaggatataaattttcatatgcattctcacatccaacaccttcactatcttaaagaggaaaaaagaaatatcattgcgtcttctcctatagagagacatgaggaaaaaaataatagattattaagcaaaataaagcaattgcaagtccatgtgatgtaaagaacacagctgtgagatgagatatctctaaacacaagtcctacctttactactacccaactctatgatttcaggcaatttacttagcttctgagttacagtactcaaacagttgttccttggagtggagtagaataagcatacaatataataatgatagctgatttattaattatgtagtcataaggccacaggtatggagtacaactttatgtatgatttttttctatgtacgaattatcttggattcgtatctccttaggctttgagagtcccagttgtttaaactgacagtttatagaagcagggcttgaaatggtttaccagtttgcgaatgacaactgaggaatttaaatgcatggactaggtgaggaagactaattgtcaatgtgtttttgcctttgaaacctgaaagcattgctgagtaattgccaaaccaacaaaattagaatttcaatgattcataattcaaaaagcctttcaaaataattgagagtatgcaggaataaatttcacagggcagtaagaatgtttataaaaatgttcttgcaggccgggggcggtggctctcgcctgtaatcccagcactttgggaggcccaggcgggcggatcacgaggtcaggagattgagactatcctggccaacatggtgacaccctgtctctactaaaaatacaaaaattagctgggcgtggtggcgggcgcctgtaatcccagctactcaggagactgaggcaggagaatcacttgaacgcgggaggcggaggttgcagagagccaaggtcgtgccactgcactccagcctggcaacagagcgatactccattaaaaaaaaagaaaagaaaaagtcttgcatctctaacctaacctatcttctctgctctctttgaagttctatgaatcaaaactgtgattacaattttttaacaaatatttaaatacccgtggtaataaaatgaattcctcatgctgtcttcgccaagtggtgaatgctaagaaataagaaaggaaattctggaagttccaagtgaacggtcagaaagccctaagctgcttttagagatgcacagaaccatcaggctcaaatcaaaatataatttaaaaatacttacttttctaaactctaacttggcctcctgacaaacataatattctcctaatggttaaatcctaaagagtctagaaaattaagtttttttataagctgcatcaaatgttacattaagagaaatgaggacaatccgataatgcaatgcaaaatacagagttgcatttggttactgatttataaattaaaatttgggagaactggaaagattatttctacagtgttttgtgtttttcagatgtatcctacttgaaagcacggttgtgaagatacccaggaccagcaatttcctttctgtgtgggacccacccgctgcgatagaattgagtgcagaagactgagcttcgtgtaaacacaaggtcaccagggatcgtaatttcaaactctcccctccccctcgctccctccagccaccaaagtatctgaacccagaactcacaacaggaacgtgtactcaacaggaacgtgtactcaattagcttttgtgggaaagggttgaagattcttggtaactgcttcaacaaaccagaggaattaattagaccgctgattttctccggaagcgcgaagcactaggccgtttgaggatctccgctccgctttgcctgggaccaggaaaagacgcgagagacggaactcggcatcaggcactgcttggggcaggaggagagtaggggaaaccaaggaagagaacagaaaggtagggcacggggagctgagcccagctgcactcatccccgcccccggaaacccccgcagctcccg

SEQ ID NO: 2210 - DNA, 2300 bp, Homo sapien
agctgatttattaattatgtagtcataaggccacaggtatggagtacaactttatgtatgatttttttctatgtacgaattatcttggattcgtatctccttaggctttgagagtcccagttgtttaaactgacagtttatagaagcagggcttgaaatggtttaccagtttgcgaatgacaactgaggaatttaaatgcatggactaggtgaggaagactaattgtcaatgtgtttttgcctttgaaacctgaaagcattgctgagtaattgccaaaccaacaaaattagaatttcaatgattcataattcaaaaagcctttcaaaataattgagagtatgcaggaataaatttcacagggcagtaagaatgtttataaaaatgttcttgcaggccgggggcggtggctctcgcctgtaatcccagcactttgggaggcccaggcgggcggatcacgaggtcaggagattgagactatcctggccaacatggtgacaccctgtctctactaaaaatacaaaaattagctgggcgtggtggcgggcgcctgtaatcccagctactcaggagactgaggcaggagaatcacttgaacgcgggaggcggaggttgcagagagccaaggtcgtgccactgcactccagcctggcaacagagcgatactccattaaaaaaaaagaaaagaaaaagtcttgcatctctaacctaacctatcttctctgctctctttgaagttctatgaatcaaaactgtgattacaattttttaacaaatatttaaatacccgtggtaataaaatgaattcctcatgctgtcttcgccaagtggtgaatgctaagaaataagaaaggaaattctggaagttccaagtgaacggtcagaaagccctaagctgcttttagagatgcacagaaccatcaggctcaaatcaaaatataatttaaaaatacttacttttctaaactctaacttggcctcctgacaaacataatattctcctaatggttaaatcctaaagagtctagaaaattaagtttttttataagctgcatcaaatgttacattaagagaaatgaggacaatccgataatgcaatgcaaaatacagagttgcatttggttactgatttataaattaaaatttgggagaactggaaagattatttctacagtgttttgtgtttttcagatgtatcctacttgaaagcacggttgtgaagatacccaggaccagcaatttcctttctgtgtgggacccacccgctgcgatagaattgagtgcagaagactgagcttcgtgtaaacacaaggtcaccagggatcgtaatttcaaactctcccctccccctcgctccctccagccaccaaagtatctgaacccagaactcacaacaggaacgtgtactcaacaggaacgtgtactcaattagcttttgtgggaaagggttgaagattcttggtaactgcttcaacaaaccagaggaattaattagaccgctgattttctccggaagcgcgaagcactaggccgtttgaggatctccgctccgctttgcctgggaccaggaaaagacgcgagagacggaactcggcatcaggcactgcttggggcaggaggagagtaggggaaaccaaggaagagaacagaaaggtagggcacggggagctgagcccagctgcactcatccccgcccccggaaacccccgcagctcccgccccaaccagcccccctctggcgcctggcataaggtagcccccggaggcaatgagggccagcaggagtctcgcgcgcctgcgacgcgggtaagggggctccaggctgcgcccacttccccgagctgccagatcccaccctctgacgcacccttctagagggagcgggctgcaagcgctggggcctgtcccttctcccctacttcgacttaccttaccagaccgactagcgctggccgctggcgccgaagcccctatgctaaaaggagacagggctgggccacggggcgcgctcccgagcagaccggccggccccggggcgcgctcacggcaccgaggagcgcgcctgcggcgctgctcgttcaaaccttgttcccctttacggcaatcgcgaaagtgtcgtgaacgtgctgccgccgatcagtcacccagtcggctggagtcggaggcgatatttctaggggtgtacttgttggggtcagggtaaggctgcggagcgcggtcaccggacgtgaaggatttgaagggcgttgtaggggccagtggagagaggactggatgctctggggcgggtcattaggatata

SEQ ID NO: 2211 - DNA, 2300 bp, Homo sapien
ctaggaaaacacatacggtctgacaaagaattttctttgtgcaagcataaatatttatgtggaaaatccaacaaaggtagaaaaagtataatcagagatatttaattaatacctttactaaaaaagtctatcatgcaaaacggctgcatttatatcagctgaggataatggcatatgggctacattattcctgtgtggactttagcatggggaatgtctgacaagtatcacattaaaaaaaaaaatctctaactcctgagcagtgcataaggtaagcttacacaatacacaacctgttgtgtgaaattccagaatttccatccccgccatgtctaagggtgccaagttttgatctgcactgattcagcagtatgtttacagtcttttcacaggtaattggctacctaaagaaaaatactcatggctacactagcagaaaggaagggcaaattataaagaacaaggaaagaaaggaagaaaaaaaagaaaaagaaaactaataggatcacaggattaagttcagcattatttaacaagtgatacatagagcaagtttacaaaaacaaaagccttttcagcagacttggaagcaaaaacagggctgtgtaacacaacttagatttagcgttttgctgaagtgaaatattgcactccttaaaagaggaaatcactttcttcccccttaaaaaaacacacacacacaacataaaaatcagcaaaagcttggtattttataggttatttttctagccccttaaaaataaacacagcatgaccctcaaaaagaacatcagcacctttaaccagcttaaaaaacaaatctaaagcctagaaaacaaagaaattgtgcaataaaatgtaattggtgttaatataaggtagatttactaacttatttcttaaatgtgttggaaagacaagttgtgcagggggccttaactagtttttctcagcataaaacgaagaggaaactaaatgcttttagaacctcaatctcgaattttatgtgaatggcaatggctctaaattagtaatgctctaaatgcccttaccaaagtctaacttgtgttataagtcgttcaactcaacatctacggactggacatattcctaatagttcgagtaggaaataaatctttattctttgtccacatacaagacgagacactaacatttgttgaaagacaactatgaatttgcctactgtcatactatggatttactgattaaaagacttcaagcaaaattatatattcaatactaatgatgcaaaatggcaaaaatgacaccaaaatgccaagcactgaattggagaaaacaagttaaacatggctaaagatcccgttcatgcagtgtttctgggaatactggcaaacaccagcaactcttttggttatttctccttgcaagaatgctgctgaaataaacgccagctagcaatctcacagcttatcaatataggctgaaatttccagaaaagttgctgaccagaagcgcgtcccagccacaaacatcagcaccgcattcctaaggggagacaaacccggcagaggatgccacacggtgtgtggacttgccagcattcgggcaggagggtgtggacctgacaagcaaggtccgttcggcacgggtagcgctcccagccctcggcccgctcagcgctggccctccacggttcttcccacccctaccttgggctcccacacaacagccccccggctcccgcgccggcgctccgccaccccaatgtctccacagaggggcaagggggcagtctccacagaggggcaagggggcagtcgcccctcgcctccccacaaccccgcgcgcgaggccaccctgcgccaggaagaaggacggcgttcgcctcgcgcgagtccatacacagctatatcctaatgacccgccccagagcatccagtcctctctccactggcccctacaacgcccttcaaatccttcacgtccggtgaccgcgctccgcagccttaccctgaccccaacaagtacacccctagaaatatcgcctccgactccagccgactgggtgactgatcggcggcagcacgttcacgacactttcgcgattgccgtaaaggggaacaaggtttgaacgagcagcgccgcaggcgcgctcctcggtgccgtgagcgcgccccggggccggccggtctgctcgggagcgcgccccgtggcccagccctgtctccttttagcataggggcttcggcgccagcggccagcgctagtcggtctggtaaggtaagtcgaagtaggggagaagggacaggccccagcgc

SEQ ID NO: 2212 - DNA, 2300 bp, Homo sapien
ttctggccccaggacagttgtgtattaggagggagtgtgtgtgtgtgtgtgtgtgtgtgtgtgtatcctggtgacaaggagtgatgtggtggtggtcctgggttgagagcagctgagctggaagggatgggccagcttcccagatcaaggttccagaaggtcccctcacctatgttctagacagatctgggacttcagtcaggtgtgtgtgggagaggctttctggtggaggaacaagtgtaaccagattcctgacttccctagaaagggtggctccctcctcaactaaaactctgaataataattcctttctagggcactggagattaaatgagatgccttatatgaaacatgagtttgatggaggttagttttctcttacgcttttctctcctgtggataacaccttttgaaagaggggagaaaacagtcttttgctgcatttcttgggcctcatcccaaaagtctaattactttcttttgtcaatgatttattaattttgctattctcttggcttgcttgataaagcagaagaaaatgatctgaaaacgcagcccaaaggatttagggaaaggcataatttcattagaatctggaatgatcagtgataagattctgtttctcaatgtcctttgaaaacctctgtggggtatttgatgtcaaatgcatccagaaggcaggagcatggatttggagctttcctaatccccattcccaacaaatcctgtcaattttaatagcctttgaattactttatgcctcagtttccccatctgtatcaggaagatgcttgttcctcaaacaggtggtaaggcttgtgcaacaagtctgtgcagcttgcaagtaaggtgtggtgccagctccaagtgttctagttcgctcttctcacccattacagcatttgaacatctttctttactgtacatgagtttggccgtgagtcctggctttttctagtcccacagaagccaggtctagagctcttaggagcaaagcagctgttttccctatcctagcaccccactctcttccagaggggtgcttattcttagcaggagtggcaaacactggcgtcaaacccttttgccccctgctttccctttgaggcagcttcctggtaaaagccttccctgtatttactcattcaggggtttctgtgagaatccaaggtgatttttttgctattccttctctcttacctagtctccagacacagcagtgggctagcagctgtgcctgtagcttgggcagaacagctgacctggcctgacccggaggaaggctgagcaggcgtgggggttgggtggagatcacccagatgttttccactgccatggaatcaccctcaggctgctggtgcaatcagtcccctaccttatgctggggacagtcttctgagccagtgcttcctatttgagaagagggactctgctggaaccctggaacaagtgccagtgacagaactctccagggggtgaaattcaccattgtagctatttccaaaatatcacgaactctgggcttagagatggattttgctctctactgcaccatcaggaaagaaggctattgggtattgacttccagaactctttcttttgttggaagaattaatctatttggataattattaggccaagtctatttatcttaatcaggggagggcagtgacatcctggctgcagaaagtgtttggccatgtgctctaggtcgggaagtcctggaagttctagaattcagcaggtggccttgctggggtttttgacttccgttgaccaagttgagaagtgaaaggtcagcaatccaagtgttggaggtataggatccctatcctgagaccagccggtttccagtgcccacagtctgacactatcaagcattgtccactgttctaaggttgtaaattaactctctgcacaatctgcagcccagattcaaaacccttagcccataagtagccaggcctttccggctactttcagccagaggtgtttgctcatgaccttttctctcgccacaccctggggctcttgggaggagctgagatctgcgctgcagtgccaggatgctgactctgttggtgctggcttctgctgccttcctgggtcccgtcacatccttcttgctcaaccactgggtgcacaggatggaaacttctattccctctctggaagacagcgcgtggcttggcttcacagagttgtggctggagaccgaagcagcccctttctcaggcttactgtcaccagtctgtctgtgttaggggagaggggagtccgctctgtcctgaaggcccaga

SEQ ID NO: 2213 - DNA, 2300 bp, Homo sapien
aattctcattgctatacccataatatgctctcatcttcgccatcttaacccatcactttaaacccaaattttccactatggatcaattaacttgttcctattattatccacacttctcaaaaatgcagattatacttagttagctccacttcctcccatcccaataatttctagttttattctgaactaacttcttcctgtttcattaccttcattaatgtcaccctaacatcctaacgaatactttaaaaatctttttaaagtctcatatacatatagagaagtgcttaagtgttcactgcaaagaacgatcacatagtgaatacatccatgtatctatcacctggttaagaaacaggacattatcagcatcctagaaacactatggtattctcccaatcattatttcctccttcctccctaaaggtaacaccattctgacctctcataccatagattaatttcacctgttttaaactttatacaaatggactcttacataatgtactcttttgtgtctggcttccttttctcaacatgatgtttgtgcaatgtagccatgttattgcatgcagcagtggtttatttatttttactgctatgtagtacttcattatgtgaatatactgcgatttactcactttactattaatagacatttgaggttatttccagcgtgagtctgtttcaaataagactcccttgaacattcttgtacttatctttttggtgcacatgtacacagttttcctcatctgtttttaaagaaaggaagttagtttggttgggaataccacaaaatagatcggggaagttaaggcacaataatattcaatcaattggacaagtttatcatgagcaacgactgttcttacacagagatgcataagacatgggttcagcccagaaaaggtacttggggaagggaagtgtacttgtgtgagggaatacacaaagaatagggaacagaaacagactgtaattaagtgcaaaattgcatacggccggagtaaagtcaacttttagaacctctgggctaagaccagacagttaatactagggctggattcccaattccggctctcccatggtgactggagagtcacctggaggccatggaaagagggctgtaggtctgggagtcaggccaacagattccagacgtatttctgccagagtcccttcttccctctgcctacctctcctgaaaaggaccctaaaaccttgtaaaccaagcaaccccagatggactctgcacttcccagccctacagataatgtcctgagagggagcggggaactagggcagatctcccaggaggaagtgggctgagcagacccacaatgtcatggttgatacctgaagtttacagcctggacgtatttggaagtcaatgaagatgtgaaaagggaggagcggaaaggctgcattgaaattcaggattagaaggggagaggggacagctgcaacaattatgacaataacagtcccttaaatttgtattatgtaacaacctacaaagagttttctattcctgaactttcacatttctgtggaatggcaggggttacccccattttgctggtctgctcaaggccaagtttgaatggaaggcagcgacaggtccctaatccgcatctccagttcctcctcaggaactccgagagtgagaggacaagtagggcaagagacctggagatggtcgaagggctaaagcagttgcaaagggagaggtggaggggttggagaggtgtgaggactgaaaactctgccccttttgggattcgtttggggccacctggaagacggtgatttcagccaggacatgcgcttttgcggactgcagggtgttcgctaagtcaagcctccccgggagccccacggagggtgggaacgaggtggcgccgcccagtcccggacgcgcgtcgagcgccctcttccaccccacgctgccctgcccagggcgagggcagagcgggcccgcccaggtgcgcccgggggttgggccggagtccggaaggtgcgccgcgccgccccgaacctgtcccctaggcctccccccgcgtgaaagtgaaagtgtcggacccgcggaggtcaaggataggggggcggggccagcgcggagctgggagcgggagccgggcactccaggggccatggatgggctcggccgccgccttcgagccagcctgagactgaagcgcggccatgggggttagtgccggccggggagagcgcggggggacggcgtgggcaccggggagccggggctagggctggcggctggggcccggtggagg

SEQ ID NO: 2214 - DNA, 2300 bp, Homo sapien
agtcctggggacaagtttatcattttctagaattaaaatgtcaggagaaaaaagatacatctctccatccaccaacataataaggcgtaatgtcaggaaagcagagataaaacattaatgcctttctttactgtactctcagtgccaatctggtcatctgattgaagtacggagatagacaactgcaaagcaatgccagcgagagcgaatgcacaggcacactgtgaaatgctacatttaccttcttcagcagggcaggaaatacctaccaaaagatgaaaagatctcagttcaaactaacaaagaataccatgagtgctttctttttcttttttcttttttttttttagatggagtctcgctctgtcacccaggctggaccatgagtgcttttttaaacctcattttaaatctgaaagaagaatgaatacattggtatgcataagaagtttagtatgaacccatactgtgttttgttatcaacaaagaaacaagaacaaaattggcaccctttcagtaagctcagctgaggtattttcacactgaaggttctgcaggcttctggagcccttgagaactgagtaggtaggttcaggcagctgtaacaaaataccacagactcggtggcataacaacaaacgtctatttctcacagttgggaggctgggaagtttaaaatcaagctgcacacagatgaggtgtctggtgatggccctcttcctgatctgctgaaagccacctacttgctgcatattcccatggtaaacagagatcatctcttctgtgtctattcttgtaagggcactaatcccattcatgaggactctaccctcatgatctaattacccgcaatgccccttctccatagaccatcacactgggacttagggcttcaacatgtacattttgggtgacaccgaggagtcagttatgaaaaaggcactgggagataggtagggagatgtgcaaggccctgaggatctgagcctttgagtctggagtgcaagtccattctcacaggttaaggcaggatcctgaacaaacatttgttgaggtttttctttttgtgtttcacataattctttatttttattttttatttttttgagatagagtcttgctttgcccaggatggactgcactggtgtgatcgcagctcaccatagccccaacccctggggctcactcaggtgatcctcccacctcagcctcccaagcagctgggattatcaacatgtgccactactcctggccaatttttccttcgcatacttcttgtacttgcacagtggagacacagacaccaatacatcacaatacactgtgaaggaatgaaaggaaatagaatgcactgtaggcagaggtgccagctcgtctctgcttgggggacagtgggaagagctacagagaaggtgtcattgtaggtgcctggtaaacaatagctgttgtcgggtgtggtggctcacacttgtaatctcagcactttgggaggccaaggcaggaggggcgcttgagcccaggaattcaagaccagcctgggtaatgtagtgagaccctgtctctacaaatttttttttttttttttaattagcaaggtgtaaggtgcatgcctgtggttccagctactctggaggccaagctgggaagatcctttgagcccgggaggttgaggctgcagtgagccatgatggtgccactgcactccaactggggtgatacagcaagagcaagatcctgtttctaaaaaaattaagcaagccagaggtggtgtgaacacagagagaggtgggggcaagaagaaggagacagattgggatgatgaggaaggagattcagggccgagggtgataccaggaggcagagcctgagtatcacctccttcccttctccaggaccgggtcccttttaggtgagactagatgaaaagggctcttcagcagctgacttcacagcaactaatttctgacaggtcagagttggcattgctcaaatctgggcttcatttccaagaagtttcacaagtctgccaggggaagtccctggacttcttgcttctttcgtgtaggacaggctgtcgaaacctcagtggataaaagacctagagaatgtgtatcccagaagaagctggccaaggatatgggagcaaccaccatggaccagaagtctctctgggcaggtgagcatggggttgataattcagcaggaaatttggtgaggaaggaagaggtaacaggtctgtagaagaagtaatcttcctcctttcctgggacttcagtctttccgttgaccttagtgtcaaa

SEQ ID NO: 2215 - DNA, 2300 bp, Homo sapien
gggagcaaccaccatggaccagaagtctctctgggcaggtgagcatggggttgataattcagcaggaaatttggtgaggaaggaagaggtaacaggtctgtagaagaagtaatcttcctcctttcctgggacttcagtctttccgttgaccttagtgtcaaaaaatttcaagccaatgcaactgttgtaggggaaccacctgatctttcctgaatggacaaaaatgcagcagtagccagaaccctttgcactggcaggatgttctcagtttgtgcagaggtccttcttgtccacattagaactggagctaagacaggaaagaggccaagctttcttagtctcttggtgtatgagcgttgtattgcgagtcacatctttcttgggctctgctgtggttatattttacaacttttggagagccccacatttctcatctgcagaatggtttattgaatttaatgttttttaaactctccctttcaactctaaagttctgatccaaaactctggcttttgtggtggctgggaattgggatgagagtggggatgaggctaaataaacaaggctatgagtgaacgggggacgtttaccaggaggggaggggagggaatatgtctgctggaggaaagaaatcatttatttgtgtccatacctctttcaccttgtcttaccctctcaagccatgaagcccccacttggcaagagccttttgggttccctgttgaacttagctgagccctggactgacccttgacagggtagagcccgtagggaggccacactttggagaagggcctggaggctgacctgacagtggatgtgccacagagaatttctctgaccatttacttagtgagtgtgtggagaaccagggcctaacctccctgcctaaaaaaacatgtgagtcatcaagagagaacagtagagccctgttttccagccctaagctctgcaggggaggaatcagctccagcagctgtgtcattgaaagttttctctcctttttggctgcccctttcttcacttttggacccgtaaaggtttcagagtgaacaatatccccaggctggggggattgcagttccaggagtcttgtccattgggcaaagtttctaggatccaggggtctgctctttttttcctttaggaggatgtgttaagtatagaataatctcaccagtcttcctagggtagatgtcctatggagaagagactgggcataatttcaaacatataagtttaaagcactaccagggccagctcacactgcttatcttgttctaagagttaattgtttatacatagtgggaccatctcaatttgcctgagatagttctggttcaagctatcgtcctagggaaattattaataatgttcctttttactctttgaagggtctcattggacaataaactatatggtcaccctacctatattcaactccagactggactatgagctccttgagtgcagggaaggcattaactgcattataatttccccagtgtcctgagcaatgcttagcacagagcatatgattcaataaaactttgttggataaatgaatgaaaaaataaattcccagcttggaacatgtttctgcctaggaatgtagagacacaaggcaccccagggctggggacctcaaggtcctataaagaaaccacaggccgggcgcggtggctcacgcctgtaatcccagcactttgggaggccgaggcgggcggatcacgaggtcaggagatcgagaccatcccggctaaaacggtgaaaccccgtctctactaaaaatacaaaaaattagccgggcgtagtggcgggcgcctgtagtcccagctacttgggaggctgaggcaggagaatggcgtgaacccgggaggcggagcttgcagtgagccgagatcacaccactgcactccagcctgggcgacagagcgagactccgtctcaaaaaaaaaaaaaaaaaaaaaaaagaaaccacagcagctgtggctggggagcccagatgaagtgtggctctatcttgtatgtgagcacacccacattttcactgccattatctgggacagcagaaccaggtttggctcaacagatttctctttccacccatctattgcaggtgtagtggtcttgctgcttctccagggaggtaagtagtcaataagtcactaccgcctggatctcctggcttgggtgctttcatttttgatgtacagtttctttttctgctacatgctttttctcttgattactctctccggttctgccactgacatatttatgacactgagtttttatt

SEQ ID NO: 2216 - DNA, 2300 bp, Homo sapien
gaatgaaaccacttaccttcctgcaggtgctcctaacgtacacagtgcctcagtgcctctgtcttatggctatgagctttacagcaatctttctcaaactgcaaaaaggcctaactaaaatccatcttgcaattcctagcacttgcgttaaggtaggcagcatgtctacacatccttctgtaggatgtaggtttaaaaatatcagaagattttttacccaaaagatgcccttgtgccagcctgctttttcatgtgtaaaatacaacaattactgctactaaaattaatttatttggtgctcagtgaatgtttatttagaagccctattttgcataggaaatagactttaggtacaacatgggaattaacatgggtttgagtagtattgggtttttttggaggactggtattcttaaggaatttttaaacagaagataaggcacatgtgcaaatagtctataatgattattatttgtggagtgtttattatgcacctgattctttacaaatatttcatttaatgcttacaactgccatgcaaagtaggcatttgtatcccaattttacaaattaggaaactgagattaaggaactgtcccaatttctcaaaccaaatgaacaatggaaagaatttgaacctcaatggtagaaagaatttgaactccaatatgtgtggctttttccactggttccacatttcttccctaccaatggttcataaaaagaagtagtgagttttccaaatggtacaaacaaaataccagagaagtagaggtgaggaaggtagtcacttccaggtgtgatgattggggaaggggtcatgggggaaagccactgaggtgggcctttaatggagtgggaggtgggtacaggaggacaatattctatattctagacagagggaatggcctcagcaggagggtgaagatgagaccatttttgagtgtggagaacagtataacttaatatgcaagatttatattgagaggctagcagaaggcaaggcggaaagttaaattgaggcaagattgcagagtcgatgacaggcgaaggagaaagaactctatgaggcaataaggagctgttaaactctgccccccaactccagggatttggagccatatacagaaaagatctagaagaaaaagaagggagctacagtgcactgtcacagtgctgaactctgacagaagtggtggcggggaatggaattgatgattccaaggagaaggggaactctaagaccaaagagaagaggactatagatttcagtgaccaatgggttttggagagtagaagaaatgtatgaatcacaaaaactatagtggtgagagcctgggtgatcaagagaactttggaaccacacacggaaatgtgggcaacaggaagaggtgctggcttaggggaaagaaccacctggaaagtgtcagccacacagggtctgtggtcaggtatgttacaccgggggccctggggcaggctgaatccgaggaagtatcacaaaggaaaggagcttcctgagaagagaagaaccaagtgaaggccacttcaggggtagagggctgggaaagggtaggagaaataggagtagaaaaatcaacagaaggaaaagaggtaatgaatttggggtcaaaaagacagagtaggtaatgaccctctatagactttgcttaaggaggaaactttgttcttacaatgagtgaatgaatgactgcaaagaataaatgaatgcaaagttactcaatgcttccatctgacaaagagtgcgtgaaatagccaatcagttgcttcactatccaaatggagaatatagcccactatacataagccattttgaattatataagctactccataatggagcttattagtgtggttcccgggcttgagcccaatcttttcttcttgtgaaacgaaatcaagatagtattgtttccctgtcaataatgggttcttaaatgggcttgagctttgtgagcactgccaatatcaacacttactttagaggcaatcttgataaaggagaatctgataaggcacaagagagggcaaagagggtataaatggcaggttggatgagggacactaccactgaggcaacatggccaagctcacccttctcactggtaagagatcgtctcatctctgtacctctgaatgactctctccatcttgtttttctgcccctttaaaactcttttaccttcaaatttaaaccagatcaactgagatttttgctttcggcaaaagtatggggatgtactgaacagggggacagccccaaattgcctggtgatagg

SEQ ID NO: 2217 - DNA, 2300 bp, Homo sapien
gttcaataacttaacaaggttataccttgattatgatggtttttgtcaatttctcctataaaacagttgagaggtaagatttaacttgcctgagttaacagacctgcaggcggcctcctggaaaagaaagttggcctgttgcctctggaaaccagctataatctatagcctaggtcctaatgcaatccatcctggcagagagctgaccatggtgaatgagaacttcagccaagtttacaccaagcagttgtgcataatcacggggttggattacaccagaagaaagccaagtgttctcccaacagatgaatgctaaggtagtagataagactgaaagccaaggttctgctatatcatactgctattagatcccatatcctaatctcactaaagaagagttttgttaagaagcttaaaagtcccaacatccaaagcccagagcctctttctcagagctagatatgtgctatgttagattgttgtatgctgcctgagaataaaataaacaccagaggatcactcatctgccatcgcttctgtctctgactttttacccagaagtactattccagaaagcccagtgtgcatgctgcttggctactcaccctgaatcacttgacaactggtgtagagagctggatgtcagactaggggcacctaccatggccttctagaagtgaaccaagggacttgggatttaaaaagtgtttctcagatgatcccatcgctttcaaagattcgtatggcagtcatggggactagtccactaaattcctgaagatacagagtgataaaagtgatactgcgtagttaagatcatcgagcctagcattccatgattgttattattggccttggaagaattagctctaaggaggcagaccgaggggaacttgactcagcatcttgaatgaaattacaatttgaaaactttggtgaatgtgaaatgatttatatatggtcttatccaagcaggatcaaacaaattccatcctctgaccctcttcctatgactgataggatcagttcaagatggcacaggttgtcatgttattagggtgttatgagctccagttaaatgggtgcaaagggaaggaaagacaaagtatgtgacttatgaggttagttccctcataacaagtgaagaagataatctgaaataggctgattgaactaaccgaacttctgggtagactcccactatagctccgtcttagaaagtctatgtgattactgcttctatataaagggttaaacatgataaaattgatgatggtccctatctttgtctatggaaaaaaatatccagtgagttttgggggaactcatgacccaagtcataataggaatttcaggcttcataaagacatcatggttgaagcagaggtgttctgtttccagcaaagcccaacaggaagctaacttttgctttttgaaaggaggattccccaccagactgggaagcaacagcctaggctccagagtcggacactggacttaagttgttatcagatgaatttgctcagctgcgtactgttgtgttacaaaatcaaatggcattagatacgcttacctcagcccaaggagggttttgcaccttactgcatactgaatgttctgtgtatagccctaacaattctcacaatattactcacaaagccatgttgggtgtggtttttattaattgtgcttttaattctgctgtacttaacctgtatctgtaaactatatcaaatatcccttccccatgtatctgtaagggtattttcctgcaattgagtatcagattgaggccaaatgtggaggaaaagttaaatattaaatttgaactcaactgaacatggacacaaacaatggtcaccaagtcccggaacaggttgtgtgagccccttgaggcgttcatccagcactgttttggaaaaatctctatttcaatctagtcctatatgttagttattgaaaaaaatagacagtctcaaaaaacaagctgacctttttatgttccttgaacctagttgtgaagggcccttgttactgggcctcatgccaaacaactcgttacaaaaacagctagagtcccagacggtgccaaagcttcatgaaacctcctcgtctgtgcacgaacaggtggccgactctggagcccaggctgttgctttccagtctggtggtgaatcctccatagtctggtgagtgtaaatatatatatatcttttcccttctccctttcccattgcaatttgattgttatatcaatttgcttattatatcaagttgtttattatatcgtttgcttatta

SEQ ID NO: 2218 - DNA, 2300 bp, Homo sapien
tctcttgactaccttgggaaaatgcctcactcagtttaacttgggccaaaagcttgcgtacttaacacagggatctggatctggtgtttaatagctgattaattttctcatcagcaaaattggtgtgatagtaataatcctctttatagggtaaaagaaacaataaagtcaagccctctgatgatagtcattttttttagtcactcagctttactttttattcttttagaatttcattttgtgaccagtccttgtgaaaatgtaaatccaagtgccctgccctttccctaattgagggtctggtgtcatacaacaatatgctttttccccaggatttaattcttgtcattcatagatggaaaataaaattggagtttatttctcctaagccttcctcccacacccctccccatagaaagacttggtttctattgtattagaggcaggttctgtattctttttgattctgtgagtttcttcatgtctttcaaatatattgatttgtgcttcttagagttggttttgattgcttacaaaattaaagcctaagtgatataagcaccaaatacagtctctggcacatagtaggcacttgtagtgtttgttgatatgattattttcacaattgaaatgttccctgaacaacacacactagggcctgtcagtgggggtggcacgagggaaagcatcaggaaaaatagctaacgcatgctgggcttaatatttaggtgatgggttaatagggacagcaaaccaccatggcacatgtttacctatgtaacaaacctgcacaccttgcacatgcaccctggaactaaaataaaataaaaatttttcctggcagcacttctattagactttctctggttctgagagtagaacaaaacacttaacctaccaatcacaggaagaatggatacaatttagtttccaaatgtgataaatggataaacctgtctggactcacaagaactctgctaaggtgctgaaatcccataatgatcacccatattcccgccaactgcattcctggtattgtcacaagacagcatcatataagcaatacagaaaatatgtgctagagtacataaagtaaatcaaaagaaggagagagcattaagatagaaaagatctgagttggactttgaagaactgctaagattgggataggcagtgaggataaggagacactgcaggcaagacattacaggcaaggagtggagggataccttgagcaaagacatgcaaggcatgtttgagggcaaagaatagtcctttggccaaaagagaaatgtattatagaacaatggtagtgaattatgtttggaaggggtagattggagttaatttaaatacaaagttccagaaacggtcaagttgcaaatatttctatgaagagactcatttcaatatcatctatattatttctatccattagcaacgcagtttttaggggatgtaatttgaaactacagaacactagagagttcttggtgacctttataggggacattttgagatccaaacattcttagataaaattatcatttagtcatgacttgaagccattccaaagaacatgtgtgagtagaatattgagagagtagcacctaaagaaggaagatttcttaggcactgattgtacaaattacatatgaataattccatgaggaaaaaaaggtttaagaacagctaataacttccaaagtttctttttatttatttttccataaagacttgctttgatgccagacacaaaatgtccacaatagaaaatctgaccacagtatctaaacagttgcttatcagcccttggaactgccaaaaaagctattaaactggtgttttccatggtgatggtctccaccaccctgttaggagccatgacattgttctgtccttgttgggcagagaaggtggtgatgctggtggtgggagggtgtaggttgaaggtcttgggagggtgtttgtagaagagaaggtccgttgatttactgattaactacatacacatctgggtcaaattgttctctatttagaagcctttgtgataaccacagaatcagaacatataaaaagctctgcgggactggtgctgactgcaaccatgacaaagcttattctcctcacaggtgggtttgtaatcagagattgacccttcatcttatctagtttctttttctctcacaggctctgaaaatcatgaagtggtcttcatactacatccctatacttttccattcttctttcatcatttcaaatttcaaatgaatcttgttatatacaaatcagtctgcctc

SEQ ID NO: 2219 - DNA, 2300 bp, Homo sapien
ataccttgagcaaagacatgcaaggcatgtttgagggcaaagaatagtcctttggccaaaagagaaatgtattatagaacaatggtagtgaattatgtttggaaggggtagattggagttaatttaaatacaaagttccagaaacggtcaagttgcaaatatttctatgaagagactcatttcaatatcatctatattatttctatccattagcaacgcagtttttaggggatgtaatttgaaactacagaacactagagagttcttggtgacctttataggggacattttgagatccaaacattcttagataaaattatcatttagtcatgacttgaagccattccaaagaacatgtgtgagtagaatattgagagagtagcacctaaagaaggaagatttcttaggcactgattgtacaaattacatatgaataattccatgaggaaaaaaaggtttaagaacagctaataacttccaaagtttctttttatttatttttccataaagacttgctttgatgccagacacaaaatgtccacaatagaaaatctgaccacagtatctaaacagttgcttatcagcccttggaactgccaaaaaagctattaaactggtgttttccatggtgatggtctccaccaccctgttaggagccatgacattgttctgtccttgttgggcagagaaggtggtgatgctggtggtgggagggtgtaggttgaaggtcttgggagggtgtttgtagaagagaaggtccgttgatttactgattaactacatacacatctgggtcaaattgttctctatttagaagcctttgtgataaccacagaatcagaacatataaaaagctctgcgggactggtgctgactgcaaccatgacaaagcttattctcctcacaggtgggtttgtaatcagagattgacccttcatcttatctagtttctttttctctcacaggctctgaaaatcatgaagtggtcttcatactacatccctatacttttccattcttctttcatcatttcaaatttcaaatgaatcttgttatatacaaatcagtctgcctcttgttctcttaacttcaactgactctggtaacatttctgcttttgttaatcccatggacctggtcctaaaggaaaagcatactttctcctagtgctagtcttactctttcatcttttgttcagccattcatttttctttactcttcttcctacgccatctcattttaattggaataatgtttatttatttgcttgtgtccttggactagcttttctggggaagaaaatcagtaggaactgagatagagttatgcaagttgtctttgttctgctgttttcagaattatttctctatttactcccctattatcctactgagttgatgatgtaccataaacatgttagaaattaaattattcaaagaggttgattcagtaagttgtttagagacaagtcataccaagaatttattagttgctctagagctgggatttgcaaactgtttaagcttcagaaccttttccaaatgaaacctcaagctcaatttataaaacaatcagagtagaagaattgctttgtagaagtcagggaaaggtatctggagtctcaccccatagttcctagctcttctctcctcatataaggcctcctgaaagtcattccaaaaaaccactaaaggccagaagatactgaattctctgatttagcagatgccttatctgttggaaggctgtgttctatcactcaggtaggggaagaacgaatggatgtgtcatcattgactacagtgatcagttggtgatttcagtaagtacatcttccatagatagtaaacttcggactcagcattcaggaacatttatttgtgacaagaaaggtgtgagacgaaggtaccacggtcatttttgataaaggtggggaaaggtagatctactgttgtattcactgaaaagcctttggaatcaccaccaaatctcactgaggttgtaacaatttatggcaaattggaaggcaatcaatccttcagaattagattctacggggtacagacaatcggttcaaagtacatgctttttctttctatccaggtcttgtccttatactgaatttgcagctcggtaagtcatggactccatgttttatcattgaatgtatatatacgagataaaccatactatggaaagagagccgctgtttgcttcacagacagatgggtttgatttgggagtaatctagtgttttggattggctgtcactgctatcctcttcagcatgaccatctgaa

SEQ ID NO: 2220 - DNA, 2300 bp, Homo sapien
agcagcaccaaggttgaactcaccactttgggcttctcttctctctgagattttggttctgaatgttctttctttctgggtatatctttgatatcttcaaacatatatattttacttattcaattcacctgttctcagctggagaattagtctgaagcaaaccagtctaccaaagtaagaatggattaccacattttcaagaaactttgcgaaatacatttcatgtcacaaataatgtaaacattattttcaaaaagcacattaatacctacaaatgttaatattacctaaattattaatggaagtaaaaatcatcaaatccataccaatacagtcatacaccacatgaagacattttgatcaatgatgaactgtatatacaatggtggctccctaaaattacaatggagcagccctatacaggtgtaccatttttaattttaaaccatagttttactgttccttttctatgtttaggtaagtttagatacataaatacttaatatcatgttacaattgtctacagtattcaatatggtaatgtgctgtacaggtttgtagcctaggagtaagaggccatactataagcctaggtgtgtagtaggctataccatctaggtttgtgttaaatatagtctatgacgttcgcaaaacaaagttgcctaatgacacatttcttagaaaacatcctcatcactaagtaatgggtgattgcatttctttacattttatttactatcagtattattgcaattgtattttaagtagacaaaatgcttggagtaaattatacaataattttcagaccctatctttattccatttaagcttggctcctcataacaaccttttatattactgggctttctgcattatttcctataaatttcttcacaatgttaatgtatataactactactaattatttttgtagagtccaacaggacatatttgaatgtcatgtgggacatgggacaactcactgtatgcctgggcaatgcagtgtaggatgtctagcctccctagcctgttgaccaggaacaacaccccaacaatttttaacaagcaaaaattcttccacaaatttccaaaacaccctctgggagtcactgtcaccttttttggaaagtctaccttagatctataaaaatcatccctgaaggctgtcctaacgcggagtatgtgtggattccagggtcatcacctgtaaagggtcaaagtatggaccagtcacactgggtgttctgttaacctctaacacctggacaactcctaaagccatcctaaaaatcgagtgaaaacaagctagtgttaatatccatgacaaaggcaaaaaagacaaaacacactctgatctttttttcttcggttattattatcttcagtgataataacctgtcgtatgtcacccaccaagtaccacgttctgaactgttttaatcccgtcatcttgatcctctcaacaatcctatatagaggaatttttattcccaatttagagatgagaaaactggggcttagaaatttgactgccccaacttctaaaaaaaaaactattagagtcttctctgattccgtggcattctacccggtccacgcaaggcctccagttcttttaaaacctcgcgccccctccccacggccccccgggatagaatgggcaacctgattggaggggcttgaggaaaaggaaaaatggtctaagggcctaatatggaactagctgtcagctcaactccgccccctactcctctgctggggcgttgcccagggagtccaccccggtacgctgcagcggctgtctttctactttcaccttacttgctggtggcccagacttcgggacattctgaacctcactgtccttccctctacaacagcgcattcctcttggcccagcttccaaagctatttgccgccccgtcaaccctgcagcccctacagccgcgaatccaggaaaccctctacccgcagcccagctactgagtttacaatcccctgggctttgggctccaaggtgcgggttcctgccccagtagtggctcggtggacgccccaacttgccgcgcaggcgcgctcgggccctctccccctccccgcgctccgcagctgggaatcacgggactagccttcgtttccttggcaacgcagtacacaagtgctagccctagcagctcgcgatgtgcttcagcagagcaggtgaggagggctgccgagaagcctagagtagagggcaggtagggggaagggtggggaagctgggaaagacgaagtgggaggaagtgcagttcgcccccctc

SEQ ID NO: 2221 - DNA, 2300 bp, Homo sapien
tgtgggaggaggctcagaagtggaggaaagtaggcattccacatcaaagaggtcttaaaagacaggaggcctttaggctgtaggatatgaggaacctagcaagacagagtcagaagacccaggccctaggacccaactgtggtgccagcagtttgtagaacaggaagagaagtcaaagcagggaccagacccagttacaagaatgagggcacaagggctaggaatgggggaacaagagcatggttgttgtagccagaaaacgtaccaggggtagtctaaccaatggtacaagttgttgccaagcatgatccagtgttggtctcaggaggcctaattatctcctaattcaggttaatattagtccaaggaatggatggtggcattgagcatgcaagtgggacccaagttgcctcagtgatggtacagagtgggaattgaatctgaaatcattttggcaacaaaactcatgttttcctcactgcactcatcatgctacttctccaagaaagagacacataccctagctctagggatacgatcaatctgttcactaaatcataagctccttgaaagcagaaaatgtttcaagtgccgagcagggcatggcacatgctcagtgataatttgttgaatacataaagaaaggcaaagatggatgaagaaaaggagacatagtctgggttgggtggggtattccatcaggctttcccagagtttcagtgaaatactccaaacattctatacaatttgttgcttttattccatcatatccaagcaaactgctgatttaaaacaatgactcctggtttcttcatactggaaatgaaggatagatgttatatgaatttgaccactagtcattatttccctgtgtcgtggattatattgacatctggttaatacctcgtgagtagttcatgtggattagatgagcagcatcagtctctgtgaaggtgggcataaggtccaagaccctctgtagcagagaaagaaaactgatgaatcataaaagcatctggcttgcagtctggtaataaaaacggtatatatatatatatatatatatatatatatatatatatatatattttatctttcatactcctgttgttgcatttttaaaaaactggctcttagatgtccagaattgtatccatcatattcttgaggttcatgacacatcctcacaattggctcatatactgactcaaatattgttgactcataaaaattcaggttttgccttctcctgagaaactgaaggatccagcaacactgggtctgtttccctgcagggaaaccattagcagctgctcagagtgctgtccctctttatactgatctctgttgtctcctgaccaagaggcttcatgtcagttgatgtacatcattgggcatgaactgttacttttctaataaaatagagatagctgttttattgcatctacaccatccatttacattacctgcctggcaagcgtcatctgagtttgagaactctgctctgctgggcaacccttttgacatccctaataatagctaccattcactgagcccttattatatgcgagcacgaaactaacaatttttgacccattatctctttgatctctataaagctctatgaggtaagtctgagctgtcatctccattttacaagcatggaaactgacctcacagaggcaggtaatttgtgcaagattacaaaacttctaagtggtgacactgagattcaaactttgaattcaaaccttggattcaaagcctaaatccaaagctatggtttaaactttttttaaaaattacgctgcttcccagccaataatcttttaataatagaattgctgctaccatatggggtttctcccccatattcagtccctgtggtactgaataccaggaagaccctcttcctggtattcagtgccaacctggtgctgttgctttgttggagagggaggccaggtcgttctggggtcactgtgactctcataaattactgatcctggcactggggtgtgtgtgtgtgtgtgtgtgtgtgtgtgtgtgtgtgtgtgtgtgtgtgtgtatgtgtagctgggctgtcccagcgctatccacagggaagctcctataaagggctgcatctctggactcacagctatcagaccattgagatgtggaagctgttgctgtgggttggtgagtgtggcaggtcccagcagtgtcactcagtccaggaagtgccaggctttatgagttcgtcatctctctggtgcctgagagagcagcctgagactcagggaagcctagattaggta

SEQ ID NO: 2222 - DNA, 2300 bp, Homo sapien
gtccaaaaacacaacagctaacaccagggctaaaaatgaaagaatactcacctcggtatgaactcagtaccacctgctgagcaaggtcccaaaccttgatgctaagaagcaaaagcaaacagacatttaatcttgacctacactatcaacataaaaacgtgttcaaacaagaacttcctgtaatcaacattccccaagtctttgcctcttggactgctgctatggtctacttacgatggactgcaaaatccctaaggaaaccttatagacatgctaaaataagtcactggattcttagaataagcccaaaatgttacctaatgaggttaacaggataggaaaggcacccacaggaggcttagagacaggagcaatgagaacagggacccaccagatgtctttgctaccactgacagcttgtgtgccagagctcaagacactgactgtagacacaatgtcatcatgctcatacttgcagaacttgctgacaataagtgtctcattctcatctagttcccacaattcaacagcacctgttgggggtagggtaaggaaaacatgagcttggattataccaaggcagtaattcacttctaggattcaaagagccattgtcactaaattaacaaagtaagttagttattcctgtaaaagcaaagtccacatcattggagagttcagctaatttctgagtctttgactttattctgcgttactgttttcctaatgacagcccagacaagtaggtgcagaaagcttccagaaaaagacaaagatggaacagtctgtaaaattcattatctgcttttagtgagagaatatggaaaatgagctgcaaggggacaaggatgaagtttccacaactgtttaagcagcacactatccagtgatgttaacacttccccaatatttggacactagtaagtatttgctgaactagttgaataaatgtcttgcagagtctttaaaaatatgttgaataattgaacgtcttgcacagtgactggttaagtatagagaatccgccaaaagttgtcttgattatgtagtgttcaagctcaactgtcagagaggttaaatctatcaaaaactgggactttaaacttccatgcaatgccggccaacttccaaattctgattttaaaaaaaaaaaaagccaaagcctgcatcgctaagcctaacagtcaacaaaaagaaagcagaatgaagacaagaaagcggtaagaaatgggaagagacatgtagcacagattggcttcaatgtcatcttaaaatcaagattatgcttggtctgggctgtgggggttaaggggcaggttacacagaagaaaaatggttccaatccgttgcttaattttgttacggatttttctaggaaatctcaccagacaatttagaattttagaaaaggtatttcccacctacacaagagtttgcattcggggccaacactctcaggctcctccaagcactgagtataggacgttagatattgagctcaaccctacggtaccccaagtctccattctaccgttccacccgggggtgggggtggataatgggatagtgactcacctgaatcggaggccactagaatacctctctccccaacccaagtgaggtcagccactccagcctccgtttggactccggcggagcagaagccttcgttgggggcggcacaggggtccttaaaaagccagagggagccggcccagcagcgcccactcaggctggaggccccgaggagaagcgccccatctacggggggtacaagctgtcagcgcgtgaagggtagaagggttcgcctccatggagaccgcacagaacagcgttccggccgggtctggatctgagctcaggaacgcggggcagggctggggacagctcggtgacgcgacccagggtcaggataacatgcagggcggggatgggctgggagggtcagtctccggggaggggcgccctgggccggggtaagggagctcccaggcccgggatctcggctcaccggaccggtaccgcgcagcctccaactgccgttccatgcaggcgggcgcatttgggggaagattccactcccgggccgccgggggcactagggggggtggggtttccttccgcatctccacggttccaactccaacctagactcaaactggacgccggccggagactccgctccggcagcaaaccccacgtggtgcacctctgagcctccgcccctctcccgagggaaccgcaactctacttctcgcgagaattgcttctatggctccatcctgctttccggctgtcgc

SEQ ID NO: 2223 - DNA, 2300 bp, Homo sapien
gatgacatttgacccaatcatctggggaaaagagagaagagcaagtagaaagatattgaggcaagaatgcgcttggtagttttcagaggaacaccaaggttggagaatgagctaaaaagagaccacaaggagatggtgtcaagagataggatggaatcaattcatgttggaccttctgggttatgctaagtttggattttattcaagtgggatggggagctctggaaggccttggtgggggattgacataatcctcctggctattatgagaatgggctgtaatgggacaagaatagagatgcaagactaattaagagactactaaaatacctaggtgaaagtttatagtggttcctactttagcggtagtggaagcagcagtcagagtccaaatttctagaggaagagccttgctgaggtactggacatggagtgtgaaagaaaaccaaggatattccttgtatcttgtaagtataagttatttactacctggtattacaattatttgtttaccagtctgtatggggtcctttttcttctaagttggaagcagtcaattatagccttactttttgcatacatgagacttaattatagataagaccactttttcaagtccattttttttcaatttgagttaccgtattttgcaagctttagaactaagtttggaagtaaaaagagaaatctctaggaaaatggacatgtcttatggaacaattttaacggtaacagctgctaaatttactaagcacacgctatgtaccaagaactgtttttgagtttcacagcaattgtctcttaattctcaaaagccacaatgcactattatcgccattttatagatgaggaaattgaggtcacacagccagtaagtggaggggccagggaccctgtactggctgtggagccctcactctaaaccaatactcttaaggtgcctcccattcctagactgtgagctccatgagggcaggtaattagccatactcattcttgtatccttggttatgtttttaggcaacataaatatttactgaatcaatgaatgatttctctgattgttatcatatggcagcaaaaactaggtatctgggaaaccgactgtaaacaacatgctttactgttttattgaacaaaatttattcttgggtatgtcatctactcggattcaggctgtggaagctacatgtcataaggtcccaagggaaggtcacaaaggagtagggcgggtatagaagacagcaaaaccaatttctagtttagttagaatacgttacttatcctgctaaaatcttggtcattaggtgacatgagagcgttcctggcagttacaggaacaagtgtcttgtctgaaagagggtttaagtgtcccaaaattatcggaaagaaatttctgacctaaagctaagggggtgggggcaggaatcgggaaataaaaggtagtgaaaacaaagacgaaagggagcattatcctcacacttaccctggacctaggaaggctgcattcttcagagagggggctgcagatagacaaggcgaaggtcagcaaagtcaaatgaaatctggtttgccctttccttacccccgccaggctctatcactaagcctatgtacccctctttcccgtccctcaagaccccacgctcccttccgaactgcactgaccactcgcctctcaggcccgtgtcgctgcgcccttctcccctccctgtcacccctagattcgcttctttccaatcactctgatagtccagagcagggtctataccccttacccgctgtggcggcggcggaaagtaccacccgggacagcatggtcaacgaaagtccaggtagcaatcttagcgtccctgtgaccccgataggagaatctgtcagggcaggaccaagatggccgctcacaagtctcgcgagatgaaaattttgtactcttccttcaactttccttgggagatttttaaaaaaaattatcgcgagaagagtcaagtaacgctgagagcctatcgcatgagggcgacagccggaaagcaggatggagccatagaagcaattctcgcgagaagtagagttgcggttccctcgggagaggggcggaggctcagaggtgcaccacgtggggtttgctgccggagcggagtctccggccggcgtccagtttgagtctaggttggagttggaaccgtggagatgcggaaggaaaccccaccccccctagtgcccccggcggcccgggagtggaatcttcccccaaatgcgcccgcctgcatggaacggcagttggaggctgcgcggtaccg

SEQ ID NO: 2224 - DNA, 2300 bp, Homo sapien
acccagaatatcaccgtaccatctagcttctttgtctctacccacaatttatcttatatgatatggtacaatctgtcataaaggctatgtttatcatgttatatctcaatcaaaaatatttagtgtttattttttaaatatttcaaatatgtcttgcttggacttaaagctccccaccatctggctgcaatccatctaagtcaactatttttcatctcccaccctctccaaatgcccctccctatttatttatttatttatttaagcactctgtcactcaggctaaagtgcaatggcatgatcgtgactcactgtagcctcaaactcctgggcgcaaaggatcctcctgcctcagccccccaaagtgctggattacaggcgtcaaccaccacacccagccaaaatgttccactcttgaactgtgctaatatcccagaaatacatcacttgaatttcagcaaccaaccctgggcctagggcacccctcccacagccctttctccctccatccatccaaagcctatccacgctcaaggtttacctgaatacttccttgcctgatttctccagctctgccagctgtgagttactcttctccacgtggaaacctcttccccagactctgtgcctggctagctccttctcatcttcgagttctctaagtggaaatgtgcactccttagagaagccttccccagtcctccatcttctctgaagacattctcccagtgtattctgtctagctagcactcttttttttccctcaaggcccttaatacaatgtgtcattgacttatcatttacttgtttttcatttctcttctcaattatgtggtagagtctgtgaggcaaggaacttttctgccttgctctccgaaaaacctgtaataatctggtcagttattaaacctatataacctggtcaggcacagtggctcacgtctgtaattccagcactttgcgaggccaaggcaggcggatcacctgaggtcgggagttcaagaccatcctgaccaatatggtgaaacccgtctctactaaaaatacaaaattagccgggcatggtggcgcatgcctgtaatcccagctacttgggaggctgaggcaggagaattgcttgagaccaggaggtggaggttgcagtgagccaaggttgcaacattgcactctagcctgggcaacaagcatgaaattctgcctcaaaaaaaaaaaaagaaagaaaaaaaaagaaaaaaaaaaccctataatactagctcactgtatggcctatagcatttacttaatgagtatatttattaatattattttacaaataaatatttataaagaaatgattcgccttccctttgaagggatcttaacactcttaacacatttgaagtctgcacagctagtacttaactcttagcactgtttgctcttcatttttcattatcagcctcatctccctggttagaatagatgagattataaggtttttgatgacaatgtcatactgatgcgacctccacagtaaatctggcacagtggttaaagtaaacacttaataaatatttaattagcaagaaacctgtcttgcctccttatgttctgtcattcatgtgtcagacacaaagaaaaggtacaaaagaaagattaaaaaatcataatgttgggctgggcacggtgactcaggcctgtaatcccagcactttgggaggccgaggcgggtggatcacgaggtcaggagatcaagaccatcctggctaacacggtgaaaccccgtctctattaacaaaatacaaaaaattagccgggcgtggtggcgggcgcctgtattcccagctactcgggaaactgaggcaggagaatggcgtgaacccgggaggcagagcttgcagtgagccgagatagcgccactgcactccagcctgggccacagagcgagactccgtctcaaaaaataaaataaatcataatgttgacctcaaagaggaagcctaccgttgagtttagtaagatctttgctacacacaatgtgatgctggcagtggcaggggcagtaatctttatttcgtcatttttgaaacatagaagccgtaacggaagcaagtgaaatgctcagtcttagacgactgcgtcgtgctatgaccggactttttcttgaaaggtaaatgcatttaccacatgcttttaatctagattaaataatcactcaccaaaagaaagtgtcgtctaattgttagtggtttctatcacttgttttctttgatgcaggaagggttgtatttgaatggttctattaagttgatggattttac

SEQ ID NO: 2225 - DNA, 2300 bp, Homo sapien
ttactcttctccacgtggaaacctcttccccagactctgtgcctggctagctccttctcatcttcgagttctctaagtggaaatgtgcactccttagagaagccttccccagtcctccatcttctctgaagacattctcccagtgtattctgtctagctagcactcttttttttccctcaaggcccttaatacaatgtgtcattgacttatcatttacttgtttttcatttctcttctcaattatgtggtagagtctgtgaggcaaggaacttttctgccttgctctccgaaaaacctgtaataatctggtcagttattaaacctatataacctggtcaggcacagtggctcacgtctgtaattccagcactttgcgaggccaaggcaggcggatcacctgaggtcgggagttcaagaccatcctgaccaatatggtgaaacccgtctctactaaaaatacaaaattagccgggcatggtggcgcatgcctgtaatcccagctacttgggaggctgaggcaggagaattgcttgagaccaggaggtggaggttgcagtgagccaaggttgcaacattgcactctagcctgggcaacaagcatgaaattctgcctcaaaaaaaaaaaaagaaagaaaaaaaaagaaaaaaaaaaccctataatactagctcactgtatggcctatagcatttacttaatgagtatatttattaatattattttacaaataaatatttataaagaaatgattcgccttccctttgaagggatcttaacactcttaacacatttgaagtctgcacagctagtacttaactcttagcactgtttgctcttcatttttcattatcagcctcatctccctggttagaatagatgagattataaggtttttgatgacaatgtcatactgatgcgacctccacagtaaatctggcacagtggttaaagtaaacacttaataaatatttaattagcaagaaacctgtcttgcctccttatgttctgtcattcatgtgtcagacacaaagaaaaggtacaaaagaaagattaaaaaatcataatgttgggctgggcacggtgactcaggcctgtaatcccagcactttgggaggccgaggcgggtggatcacgaggtcaggagatcaagaccatcctggctaacacggtgaaaccccgtctctattaacaaaatacaaaaaattagccgggcgtggtggcgggcgcctgtattcccagctactcgggaaactgaggcaggagaatggcgtgaacccgggaggcagagcttgcagtgagccgagatagcgccactgcactccagcctgggccacagagcgagactccgtctcaaaaaataaaataaatcataatgttgacctcaaagaggaagcctaccgttgagtttagtaagatctttgctacacacaatgtgatgctggcagtggcaggggcagtaatctttatttcgtcatttttgaaacatagaagccgtaacggaagcaagtgaaatgctcagtcttagacgactgcgtcgtgctatgaccggactttttcttgaaaggtaaatgcatttaccacatgcttttaatctagattaaataatcactcaccaaaagaaagtgtcgtctaattgttagtggtttctatcacttgttttctttgatgcaggaagggttgtatttgaatggttctattaagttgatggattttacgctatcagtaagattctccagtgctggatgaaacgtgaaaaagtatatatagcaccgcttctattttaatttatgcttctgccaactgtttgggttgtgctgaaagggaaatatatttcctgcttttcttggcctggatttgtgagtagctatttccctgtggtattgtacgatgattttgtccatttatgtgaaagttagggtggggtggcctaatgttttcacagcggctatggtaacatttttgtaaattcagaactgctactgtgaatttcaggattttacagaaacctatgatcctatcttcttccacctctccagtggcaaagcctagtgtaagctcatactctgtttagcaccagcatatatttcaatattttaaaaatattatgtcaatattttatgatggtctgcaaagagcaccactgacttacaagttagaaaaggagcaaaaagtgtgagaaaaattaccactgccgattctgctgcggactgtgggcctcctattctcatggctcagattcctcaacacattttcccgttggcccttttcttatctgacattgcatgatctaaaaatgtttgg

SEQ ID NO: 2226 - DNA, 2300 bp, Homo sapien
atgtctcttaagtcccttttgattcatagattctcctttccttgcttccttttttattcatgtaatttgtttgtgaaactcatagaggtttttgatgaggagcaactgaggtgatgtagataaaaacctaccatcatgaaggcttgctgcttgcccacatgctgacttcacatgaattagagacaggctccccttcctccagagaggacattattgcataacctggacaatctatgtatgacccttgatgggatgtgctggctctgggatgtgataagtagcacccagcttaacttcacctgagaggtgattcaataattccaacttttaaagccagtggtcagagcacatgagtcccattagaatcaggagaagctgctgctgcatagatgaatctccttgctttgtcccagctcttctcaggaaagctttcaggaagtctgaagaccgcagcccaaactgcggccacccacacttccacctgctcacgtgttccaggtcccaggcacgcaggctactgacagctggcatgcgccacccgtggccgtactccccagatgagcctgcagtgtccacttgggagctgggttagttagaaatctgattactaggattcctctcaactgtataagaaattgggcctccaagattggtagacagacaaaaggagtggcctctgatgatgccaggaccattggcagcaggacagggcatagtagagcacatacaaatgtgtaccagtgatggctgtgtgcatgtgcttttctgagtgtgggccagagcccatttacgcaggagggagatctctactgcccagaattttcttggttgccccgtcagtaagtttatgtctatgaagagcatgtggtatggtgcattgtgcagtgtatctatacatggcagcactgcttggactaactggttgtttcccttttcactggtctcttcaaaccaggataaagccatattaagctcaagcatatctgtttcccttaaacagattcagaattcctgggctccctgggtgcattctatcattccagttgaaagtttgcttccttccagtcatgtggctcttcattctactctccttggctctcatttcaggtaggatgggggacggaacagctccagccctttaagctgtggcctttccagagactttgcactgaagtcctcacctacttggagtccttgcttattaactcgaaccatctaaggagtgggatgggaaaataaaaggcgatgaaaataggtcttgtccatattagttcttgttcttagctcagataagagagtttgtgaggaaattgaaaagcttgactaaaatgatgactctgcactcactttggcagcacatatactgaaattagaatgatacagagtagattagcatggcccttgtgcaaggatgacatgcaaattcattacgcattccatatttttccccagcatctccactggaataaaataaaacgagagctctgtattttcttttagtttacccaggttcccccttcccccttctcccctcaaaaatatatgtgcacatatatgaggacacgactttcccctttccacttgtgcttgaccccaaagatgagacttggaacactggccttttcccagctctgtctgaccttcagttgtgtggcatttagagttgctgaacctttctctgggtcagcattcatacttataaactgaagatcatgctatcttccttgtggggttgttacgaaaacaaaatgttataaagaacctgagcctgcattttagtggtttttgctatacttctggaaggctgagagaagaatgggctctgctgtctcatctcctcttcttggtcagacactttccctgccatggtcaagctggacatggtgtgcgtgacttcctcattgtgcaatatcctgagatgatagaggtgcctatgctggtcttgtacggagggaacatgaagttcttatcccctaaagacagaacatgacttcctctgttttcagccctgtgcagccagcagaagcctccaaacatcactttctttctgagggtgctaaggtagggtgggagctagggacagagggcctcctaacggtaagcctcaggctcttcaaggccctccgtcaagcaatggtaggaggcctccatatttcacccacccttaggccagggaaaaggacttctccagagttgctttattagtttgctagggctgtgataacaacaacagcaacaaaaccacagtctgggaggctaaaacaatggaaatttatttccttatgttatgaaggtggtaa

SEQ ID NO: 2227 - DNA, 2300 bp, Homo sapien
tctacggtcaggttccaggccaaaatgttaagtgactgtgaaagtccttctcctctgttctcaaatcaccccacccagcactgatggaccttgtctattcagagaacatgaaggaagggcttctcttgttcacagaaaagaaacccccatggtatgtgcagagaattctgagggtagaattcccagatgggcagaggtggctgggctggtgaccctaagtgtgtctcctgcctttattctctctagtgggttattctttcatgtggtatcttgcctacagcatgctgtgtttggacacaaacccctttccttggtttctctgacccagctgagatggactgattccaaaagaactcacctatgtactggggtaggggagggagggttttttgcagtatttaactaaggttcaaagagtgctatatagtgagaaaggcttcttttttttttttttttttttttttggcagagtgctgcctcctagaaatttctcttggtaacttccttctctgaagcacagataaagaaaacaattacagtagaaacatttatgagggacacattggaggccgatgaagcttttcaagttccagcagtgcagggatgtgggcagaactgacattggaaaatactagaatgatggaaattcagttggagaggactgccctttttaatgtctggggagtctgctcagggagaaatgacaagtctggcggggacaagtatgggatttggtaagacttggatcaacttgggatacagggtgggggtcgggagtggaatcaatgaatgatgccagagcagatcaactaacaagaggaccctgatgagccccaggcagaggcgtctcccttatgccccactctgaagtgtttgttagtaaacaccagaacgccattgttgttactgctgaattttattttgggctgtacatatttagatgcttaaggtaaaaatgataaagccctcaagccactgtgtgggtttgggtccaagtgttccttcttgctgcctctctaacacgcctggttaaaataatccctttggatggtgctgagaagcacctgaaccaagtgggtccccaaataacaatggcgtgcaagtgtctggttcccagaagttggtgactaggtaagcagcttcagggagagggggctgattcccagacagtcgcctgttcctgcggggatggggctgaggcttggggaatgtgggcaggaggatatgccatttgattctgttgcacacgttcttttcccttctttctgtatgtctggtcattctgctattctgtcgttcctcacataggttggacattggccggctgccagcataagtgccagtgtgattttgctagggtgtgagctgagaaagagaggtggaggctaagcaggtgtgatgcttctcagaggtgctgagtttttgcccttctgagcagggaatctttgcttatccctttgaccaaggatctttgctgcaaaggctgggtatcggctgtgctcagcaaagcgtcaactcgtgcaagaacttagcaggaatagttctggctaaggttaggaggctgccaccaaagtctcttttttgttcctctgcttctcccgtttgcctccttatcatgagatctttttgctaagctggcagaaagattgcatagtcagtgcttccagctctgctcccacctgatcctgcactgtcctctggtccctgaatgaatgaactctgatacccaatcttgtctcgagccttctctatgccactcatggctcctcttctgctctttccatctttttgctgagagttctgagctctgtacttcctcttggcccatctcacttcctgaaacacccctgaagagggttgcttatcttgatggaactcaaaaagccaaaaagctgcaggcagaggcgttgaggacatctgtttggggaactaagagcagcagcactttcagattcagtccatatagagctgtcctacagcattctggaaacttgaggatgtgcggtgcataaaggggctggaagtgacccacctgtgatgagccctttctaaggagaagggtttccaagagatcaccccaccagaaaagggtaggaatgagcaagttgggaattttagactgtcactgcacatggacctctgggaagacgtctggcgagagctaggcccactggccctacagacggatcttgctggctcacctgtccctgtggaggttcccctgggaaggcaagatgcccaacaacagcactgctctgtcattggccaatgttacctacatcaccatggaaattttcatt

SEQ ID NO: 2228 - DNA, 2300 bp, Homo sapien
agaaatgcagaaatggaaagtggtggtccctgtcctccaggaacttacaggctaagcggggaagtcatatacacacagcacagtgtggtcccagaggagaggtgaagactgggaagttttcttcaaggtcctgttgggtaacagtcttggaggaaaagtatttgttttctagatggacttgggggagaagggccctgcaaaccagacaaagagtgtgtgcacaggggagaggaagtgaaagagaatgactctgagccacgagttgctcagtctggtgcagccaatggtgtctgtgcggacccaggtgacaggagactgcagaggctgggagacccatcagaagggtataagccactctaaggagtctggacttgatcctaaggcaatgtgcagaccaaatggtttagaaggggcaggggtcatcctgggcatggagctctggcgtggttcctctggttgcctgaggcaccgagtaggaggctgcagcatctcctacttgagatgtgatgaggcacatgaccaagagtggctgtgcgccatgggctgtgggtgcagcggtaggaatgggcaaatgaagtgaccttctgccccagcctctctgtcctctttcccagattgccttttggttttcaatctacggtcaggttccaggccaaaatgttaagtgactgtgaaagtccttctcctctgttctcaaatcaccccacccagcactgatggaccttgtctattcagagaacatgaaggaagggcttctcttgttcacagaaaagaaacccccatggtatgtgcagagaattctgagggtagaattcccagatgggcagaggtggctgggctggtgaccctaagtgtgtctcctgcctttattctctctagtgggttattctttcatgtggtatcttgcctacagcatgctgtgtttggacacaaacccctttccttggtttctctgacccagctgagatggactgattccaaaagaactcacctatgtactggggtaggggagggagggttttttgcagtatttaactaaggttcaaagagtgctatatagtgagaaaggcttcttttttttttttttttttttttttggcagagtgctgcctcctagaaatttctcttggtaacttccttctctgaagcacagataaagaaaacaattacagtagaaacatttatgagggacacattggaggccgatgaagcttttcaagttccagcagtgcagggatgtgggcagaactgacattggaaaatactagaatgatggaaattcagttggagaggactgccctttttaatgtctggggagtctgctcagggagaaatgacaagtctggcggggacaagtatgggatttggtaagacttggatcaacttgggatacagggtgggggtcgggagtggaatcaatgaatgatgccagagcagatcaactaacaagaggaccctgatgagccccaggcagaggcgtctcccttatgccccactctgaagtgtttgttagtaaacaccagaacgccattgttgttactgctgaattttattttgggctgtacatatttagatgcttaaggtaaaaatgataaagccctcaagccactgtgtgggtttgggtccaagtgttccttcttgctgcctctctaacacgcctggttaaaataatccctttggatggtgctgagaagcacctgaaccaagtgggtccccaaataacaatggcgtgcaagtgtctggttcccagaagttggtgactaggtaagcagcttcagggagagggggctgattcccagacagtcgcctgttcctgcggggatggggctgaggcttggggaatgtgggcaggaggatatgccatttgattctgttgcacacgttcttttcccttctttctgtatgtctggtcattctgctattctgtcgttcctcacataggttggacattggccggctgccagcataagtgccagtgtgattttgctagggtgtgagctgagaaagagaggtggaggctaagcaggtgtgatgcttctcagaggtgctgagtttttgcccttctgagcagggaatctttgcttatccctttgaccaaggatctttgctgcaaaggctgggtatcggctgtgctcagcaaagcgtcaactcgtgcaagaacttagcaggaatagttctggctaaggttaggaggctgccaccaaagtctcttttttgttcctctgcttctcccgtttgcctccttatcatgagatctttttgctaagctggcagaaagattgcatagtcagtgcttccag

SEQ ID NO: 2229 - DNA, 2300 bp, Homo sapien
tgtgattatagtggtttgtaatttgttaacttggttaaaatggctatttcccagactgctcttcctcatatgtttctggctggggtaaaccgtaagagacattttgtgtgagttctgcaaggtggaagtgaagcagcacccagaatgttttgacatgcaaagggttggtgcaggagcactaggcaccaatgcagctcacgtgtacgtgatatcacttatctgctgcttcatctccttggcatggggcagcagccagtcctgcagttagcttctccacctcctcctggatcttccttcagcttttctaactcttgagccggggagtatttagctccaagacaaagtgtgccagcttctcctgtagacacccacatcatcaaagttagaggtaagagagactgacacaggatccatccatctttctgggttctggttggtggttctaggattcagcttgttcctcctccttttctccatttacatgcatcttcccacttcctgactgccagtcatgcaaacttcatgctccagcatgagacacaaagacaacagcctcacagagactggataatcacatctcacaattgtgtaaggttcaacttctggtggttttgcttccctgacaaaccctgatagagaatttggtagcagacaagattccaggggtatagaacctgaagaatgagttgtctaaacaggttccaggttacttggaattcatcctctgattttcctaatgccctgtttccaatggttaagaggacattagtattatgcagtggcaaacagttacacaaattatcacattgacacctttaatcaaatgcctatggaacgacggttggcaaactttttctgaaaagggacagatgataaatattttaggcattggaagccacatagtctctgctgcatacactccacctagactctgcatagtctctgtctctactcaactctgtggttgtagcacaaaaacaaccacagacatatgtgtatgaatgaacgtggctatgttccaataaaactttatttacaaaaataggggcaagccagatttggctcaggagtcatagcttgctgacttctgctatagaaggaaagctttggatgaacaagtatttgctgccatagaatatttcagtgaaaatacaaaccataatgggattgattaattgcttctaagtgtgctggagaacttcagaaaagaaaatgatgagctctgggctttacattcttagctcaaggtctatataaggaagctaaactcttctatgattaccctaaaagaattctgactgatacagtgatgactgaactaaaatcagtagatgttttgcaggctaactttaaaaagaagcaataaatttgtaggggagttaatttgggacatgccaagttggaggtgtcaatgaagcgtccaagtggtgacgcttggcagacagtaggatgcatagtctgaaactctgggagaaatgtccatttggaaatcactcacacgtactcaattgttataatcacaagaataaaagaggtaacaaggaaaatgagagagagagagaaagagagagagagagaaagagagagagagagaaagtgcaggaggctaaagcagaccctaagaaacccaacattcagtggagggacaggggacgaggggcccgtaaaagagcctgagaagttgaagaccccagaagagagtagcatcgccaagatcaaggaactggagtgtatcaagaaactgcgagtgaatgcaataaaactgcacatggcagaggttgagaaagtcctaagtcaaaattgaaacaaaagatccactgccttcaaaagaaacaactggagaggaaaggcaaggtgatgaatttttatgaggtgtgtcaccaggaacaccattcattccataagcattcctttctttaaagaggaatacctctcttaacagcttaactcagggtggtgcaaagaagctttttttttttttttgaagggttttttcaaatgtttattttatgtacaaagaactatcatgtttttaattgagtagatgccttggataatcctttgaaggaagatcgtttagaccagcttaatgaaacagacatccttcgcgtactgacggaaacactggcggcacatattgaggccgtatttcaggatcagacctgccggttcgaacacacgcgacaagagcaaagaagttaaaagagaagtgtctgtgtggctccttccacgtgggtgaaggactgtgccagctgagaggtggtagagcaggaagctgcctgaggacctccatttatttg

SEQ ID NO: 2230 - DNA, 2300 bp, Homo sapien
tgcttgctggcacttcaggactcatcattctgagttatttgttcctcctcgaaggtgccatgctctctttgtgatctggacgttggcacatgtagaccctctgccttgaggtttcttctacatccctggtttgtctcttccactttgagtttagattagtgctgtccagtagaaatataatgtgctgtccagtagaaatataatgtgagccacatatttatttaattgtagattttgtagtagccacattttttgaaagtagaagtaaaaagtacatgagcactaacaaaacaatcatgaaatcttatgggatgcaatgacaaaagtagaagtagtcctaccaaaactgtaaggttgaatttaaaggaaaaatgcttcacactgcttcagttttatatttaaattaattaatattaaacatttggttccccagccatactagtcacatttcacatctttaatcaccccattctgaatggcacaggtttagacttcagtttctctgacatcccatctgcagtaggtgccctccatatgttactacaggaatcagggcttaaccctcttgcagtaccagttacactgtgatatagctgtctgcttacttgtctctgttcttcatcagactcagcttcttgacagtaacgcctttgtcttattcatctctgtatcatcagcacccaacaattctggcctaaaataattgcttggtttgtttgaacgaggttgaatgcctgaaaaacaacaatcttctatgggcctatgaggcattacaaaatcaggtccctcacttgctcactctgacctcatcttctaccacactccccccctttgttcattctgctccagccacactggcctccttcccattctgtgaataacctaagtatgagtgaagcttagggcctttgcattatgttctctgtgcctggaaaacccttctcttgagggccaattggcttcgcttcttcccttactgcatttaggtgtcttattaaatctgccttccctgaccaacttctttccaacatagaccccattccaccagttaatttcctaagtttatttttcatcacaatgtccatcaccatttggcatgttaattatttagttagtctgtcctgactgtaatgcaagtttcatgatagcaagcatggggggctttttctggggtgatcagtgatgcattcacctaagtaactttttttttttaagagttggggtctcacaggccgggtgtggtggctcacgcctgtaatcctagcactttgggaggccgaggcggatggatcacaaggtcaggagatcgagaccatcctggctgactcggtgaaaccccatctctactaaaaatacaaaaaattagccgggtgtggtggtgggcgcctgtggtcccagctacttgggaggctgaggcaggagaatggtgtgaacccgggaggtggagcttgcagtgagccgagatcgtgccactgcactctagcctgggcaacagagtgagactccgtctcaaaaaaaaaaaaaaaaaagagttggggtctcactctgttgcccaggatggagtgcagtggtggtgccatcatggctgacagcatcttcaatctctggggcttaggtgatcctcctacctcagcctcccaaataggaatataggcataagccaccaagctaggcctatactcccaacttagaatagtttctggcacctaacaggtgcttgataaatatttattgacagcaggaatgttaagactatcacagggaaggttagggaatgggaaaaggcaataaggtactcagaagtagagttccagaaatttcaatgtttctctcatttcaagtttcacaatgtccaaatggcttggaaagccacacaatgaccagattttcattgatttatgtgtaaaacttgaggcaggagtaaaaagatagtcatgagttttaggagcttaaggctttatgagtatgtccaattctctaccccccaaaacagggaattcctggttctctaatggcagaagggttggatgggtggaatgtggctgttggaagcttctgtggcagttggtagagaccaccagttggaccaatggaagggtctccagcaggacccattgagcagaaggaggccaggtgggaaagctcctgggaagagcagccagactggacactgggctgcttgagtcctgagtcacagtgagtcatagcagaaaatatagctgctgggaggcagaggttggggtctgagtctgcatactgaccactttggaacatttattcatgatatggggcaagctact

SEQ ID NO: 2231 - DNA, 2300 bp, Homo sapien
actagctgagtccgaaaagtagaaaacacatttgcagtaaatttacaatattaattttgagctgagggagcaaattccaaattcaaaccagattcagaaattatgacctcagtttttccagagtttctactgattaggattgttatagattggccaggggtagactgtattaggggaaaaataagagagaaaaatagaattcacaagaatatgtaaactcagagaatgaagtttcctgtgttagcatttgctgctaataaatgagactcaagcaaaggaatatagtatttttctaaggaagagtgagggggtgagtcttagggttttgcaaggaggattaccaagggagtcaatcatttttggctgtaaggtcataaggggcgtatagtttttcagagcagtacgtgaatgatgttaaactaaattagtagagctggtggttacagaataaactagaaggcaattttgaaagtcaatcaggccagatgtggtggctcatgcctgtgatcccagcactttaggaggatcacatgaggtcaggattttgagaccagcctggccaacatggtgaaacccagcctggccaacaaggtgaaacccatctctactaaaaatacaaaaattagccgggtatggtggtgcgtgcctgtaatcccagctactcaggaggctgaggcaggagaatcacttgaactcaggaggcggaggttgcagtgagccgagagcatgccactgcactccagccttggcaacagagcaagactccatctcaaaaaacaaaaaaaagtcaatcaatatttacatattgaatatcaactctgtgctcaatagcctcccattgttcaggggccacaatgacacagagcggagcaccagcacccagtgtgtctagtttagggagaaataacctatgagcctagatgaagacagaagaaaaagatggaagactctgtaaccaaagggttaagaaatcttgaatgactaacatttaagtaaaaaaaagtaagggtcaagttctaaaacagagaatagaaatagcatttgctaccaaagaagtgggcttttgattaaaaaaaataataataatgaagtgtcaggtgtgccagggacctgattgaaggtctcacttgggctttgaacctggcaaagggtagaggtgaagcattctcaaatccttcccttgcctcctgcacccagggttcaaggtgtaaaggaagaaaagccagggcatgtgcatcgttgacagacatctgaaatggatcatcttgctgggagttggagggttctttctcaccgcccctctgttcatcctctgagctgtaattgcctaaatagacagattagcacaaactcagcctgtgcaagtatcttttaatgctcatttgctgactttaatgagttccagaaccaatttgtgatcttaaaatcgctcaggtttatcaccaaaagaaagcactgtaagtctagtgcaagaggtcagctcagcagaactcagcagtgagacattgatatgaaaatgaattcactccctctccctctccctctcccgatgccgagccgaagctggactgtactgctgccatctcggctcactgcagcctccctgcctggttctcctgcctcagcctgcggagtgcctgcaattgcaggcgcgcgacgccacgcctcactgcttttcgtatttttttggtggagacggggtttcgctgtgttggccgggctggtctccagctcctagccgcgagtgatccgccagcctcggcctcccggggtgcggggattgcagacggagtctggttcactcagtgctcaatggtgcccaggctggagtgcagtggcgtgatctcggctggctacaacctccacctcccagccgcctgccttggcctccctaagtgccgagattgcagcctctgcccggccgccaccccgtctgggaagtgaggagcgtctctgcctggccgcccatcgcctgggacgtgaggagcccctctgcctggctgcccagtctggaaagtgaggagcgtctctgcccggccgccatcccatctaggaagtgacgagcgcctcttcccggtcgccatcccatctaggaagtgaggagcgtctctgcccggccgcccatcgtctgagatgtggggagagcctctgccccgccgccccgcctgggatgtgaggagcgcctctacccggccgcgaccccgtctgggaggtgaggagcgtctctgcccggccgccccgtctgagaagtgaggagaccctccgcctcgcagccgccccgtctgaaaagtgaggagccc

SEQ ID NO: 2232 - DNA, 2300 bp, Homo sapien
cttggcctcccaaagtgctgggattacaggtgtgagccaccacgcctggcccaattttacctctctaaagaatcattccagctgggcgcagtggctcacacctgtaatcccaacactttgggaggccgaggcgggtggatcacctgaggttgggaattcgagaccagcctggccaacgtggagaaaccccgtctctaataaaaacacaaaattagccaggtgtggtggcacatgactgtaatcccagctgctttggaggctgagacaggagaatcgctcgaaccagggagttggaggttgcagtgagcggagatcacaccactgcactccagcctagcaacagagcaagactccgcctcaaaaaaaaaaaaatcattccagcatactaaaatgagaaaaagcatttctcatcttaaaatatcctcccttgatctcaagtacctctctggctactgcccttttctccttcaaagcaaagcctctcaagagctgtttagaacactttctcttcctcacctcccatcctattaacataccctaatcagactttctcccctatgactccactgaaactgttttcatcaaggtcatcagcaacttcatcaggccacatccagtgttcaaattctcagtccttatcttactaatttcagcagtatctgataagactcttcactctctccttcctgaaacaattatcttgttttccaacgcttcaccttctcttggtgtttctcctgccctgactggtagcgcctccttttctacttaaccttcaagtgttggagtgcctcttggtcctttccttcagctatctcccctccccatgtgatcctaactagacttaagacttaaaaagtatctatttgctaatgaatcccaaatgtatctctctagactcatatatcgattgtttattcaatatctccatttggatgtataacagacaccttaaacataacatgtgtaagaaaagactcttgatttccccatccccaaatctgctcctccatttcattaagtggcaccgccattaactcagtcatcaggcccgaacctaagaatcaactcttgatttctttttgttctttcacacactatgccccaaatccaaatccattccaatcaaaatgtatctaaataaaataaaataaaataaaatagccttcttctcatcctgtccgtggctgccaggctagttagtccaagctaccttactggtatcccaaggacatctgtgcttctccattgtgtattttacacacatcagcaagactaacttttaacaacatgaatcagatgcggtcattcctcggctcacccttctctcatggtttcccgttcctgttataatggcccacaggcttcactggatctggccaagcctagctggtactgctctcgggctggctgacgctgctcagccatgccggcctttcactgtttctgcaacatggcaggcgtatccccacctctgggtttatggctgattttctctcagcttggaaaggctattcctcctccaggcccgcgtgtttgcaagacttattccttcatcccgtgtgtatgcgctcaaaggtcttctttgagaggcagtatctcaccaggtgtaaagtcaccctatcctctgctttatttttctccacaccacttatcactacctgcaatttttgtcacttgtttgttgtctgtctcccctctctcactccaccagcatgcaagctgcaagagggtctttgcctgtctatgactttaaacctctgcgcttagttagaacagcgcctggaacctaacaggtgctcaattagggcttgtcgaatgattgagttccctccaaattctcttcttgaatctttggacccttcctcatcttttttccggtcttacccacctcccatcccgccctacgcaaagctaaaactccccgccccttcccggtagctccaggctttcccggctccagtgtgcgcggctcctttaagcggactccggaacgccgtggggaaggcggggccgaagcccagccatcgccaacttggaggggcggggcagaaccagggggcggggcctgcgtggtgcgtgcgtgcgcgttctggaggaggcgccgccgccgctcccgaggcccctgccgccgccgctcccgctgctgtcgccgcgcagagccggagcaggagccacggccgagaggagggaggaggaggaggaggaggtggaggaggtggaggaggtggaggaggcgccggaccgggggggtgagtaaggggcggggagctccagacggccccagagggagcgggggg

SEQ ID NO: 2233 - DNA, 2300 bp, Homo sapien
attgtcttcctttgtacagacaggattgtcagatgtaatgggaaacactataattgagtataactaagtataactgaggataattcaagttgatcagttatagactcctcttgtaaacttctatttttgattttttaaaacatttttaaagggaatttaaaatagcactgttactgtagctgtttagcataatttagttctcaagttatgatcagctaaaatcattatttttttattttattgaatacctgcttgtttagtaccattttctgacatcaagagattaaccatacatatatgtatatctgtatccaatgtcttagattacaggaatgaagaactgttgcctaattggaaagtgccagcattccagacttcaaaaataaaaaatctgaagaggcttctcctgttttatatattatgtgaagaatttagatcttatattggtttgcacaagttccctggagaaaaaaattgctctgtgtatatctcttggaaaataagacaatagtatttctcctttgcaatagcagttataacagatgtgaaaatatacttgactctaatatgattatacaaaagagcatggatgcatttcaaatgttagatattgctactataatcaaatgatttcatattgatctttttatcatgatcctccctatcaagcactaaaaagttgaaccattatactttatatctgtaatgatactgattatgaaatgtcccctcaaactcattgcagcagataacttttttgagtcattgacttcattttatatttaaaaaattatggaatatcatctgtcattatattctaattaaaattgtgcataatgctttggaaaaatgggtcttttataggaaaaaaactgggataactgatttctatggctttcaaagctaaaatatataatatactaaaccaactctaatattgcttcttgtgttttactgtcagattaaattacagcttttatggatgattaaattttagtacattttcatttggtttgtgtgtttttgttattgtttatagattaaagcgtttattttataatgaccacattgttttaaatgcgacagtagctcctttctgcctagtatctgcagaacactggctttaaactatactaagtaactggtgatttctctaggaacagacctcgcactttctgttctaaatatatttattcctactatacagtaaaatacatcagacaacatagaatagttttgtatattctctcttgatcttaaagattgtatcttattgaatatcccactgtatattatttttatatgtaaaaagataagtttaatactgtatcagggtttaacttttactatttcagatcttccacagcttgtaatttcatcaagggaatccttttgcattgttaatttgttgggtgtgagtccaccaatgaagtgttatgtgaaaaatttcaaacttgctttataatagattgaagaatttgagagaagtgagagaaagttaaaacacataaaaggaatgtgttacttttgcttaaactacttatgaaatagtatggtagtagtaatatggaagagattgctaagttaaaattgtagcttcctatatagtggtgctttttcttttccttcccagttattttcctctttacaaaagatagggcttaagtaagacatggacccagggtgatactacttatgtagtctctataaagagaggtagaacaaaaagcttgttagccaattaagttctggaaaaggaaagaaacaagcttagaaaaccctgtgccttgtcctcaaatattaaggaggagacagaccagtcctagaaagtctaagtcattgctcagggatctctagatactgtctctttgcaactaggtatgaagaagtgttcatgccttgctgagattttccaggcatgtggtcagcctgtcacttactaaactgaaattttaaaatcaggtttcaaatgttaagctttgaccaacctgagaaaatgttaaagtattgtttttaaaaaaatggaaattttttttgtttgtgtttttgttttagtttcgaataaacttagttaccttacacttcccttctacttatccaattatgcatatgtctgggattgaggggccaaaactatagcgaacttgaatgaagtattagggccagttgtcaggtcagggtggcatcttttattttaaggtcctctaaagtcattctgctttaaaacacccctcaaacatacctttaaacttaagatcatagacagacatctcatcaaccagtaaaactttctaaatact

SEQ ID NO: 2234 - DNA, 2300 bp, Homo sapien
taggagtgtctgtggaagggatttagcccccttgcccaggacacagccacatcaaagctgtgctcagcaggggccagagcgagtggaaccggatgactggacctccacgttgatgtcccggggccggaatcgacagcctctggtgttaggggacaacgtttttgcagacctggtgggcaattggctagacttgccagaactggagaagggtggggagaagggtgagactgggggggcacgtgaacccaaaggagagaaaggccagccccaggagctgggccgcaggttcgccctgacagcaaacatctttaagaagttcttgcgtagtgtgcggcctgaccgtgaccggctgctgaaggagaagccaggctgggtgacacccatggtccctgagtcccgaaccggccgctcacagaaggtcaagaagcggagcctttccaagggctctggacatttccccttcccaggcaccggggagcacaggcgaggggagaatccccccacaagctgccccaaggccctggagcactcaccctcaggatttgatattaacacagctgtttgggtctgaatcctagagacagaaagttgactgagcctgaaagggccaggtcccagtgctgggcccctggggaggagggagggtgggcggtatggctctcgaaagcccaactccaagttcctttcccccagaaagcggggagaagccagagttcttggctcaggactgaagggaaggtggttgggagaggctgtcttgggggctagctggtggaggaggtaagagtagctggagagtgagctgtgcgtgtgtgtgtgtgtgtgtgcatgtgtgtgtctgtctggcatgcatgcactcactttggggctggaggtgacagtaggtgagggcagaggaggagatcagaaaatccctctgacatctccactgcccccaaagacctccgttgaacattctgtatggaaaagagccctggagcatcaggttccccagataggcccccaaataaagacctgtctatggctctcccaaccttctgtcagcttctttggcaagacattgctccaggcacagggactgaaccccaggcctcctgggactggagcagcagtgaggcaaaacccgacctgctagccctttctgccttggaggtttcagtccatacctggactctgagaaaatgagctgaataaggagtacagtgtgtaaggagcagccagggaagccctagacactccccgcgtctcccccatgcacaggggaaggatgttgacatagcactgggctgtttgaatgccttttcatctccatggtctcatttgaaagtgagcgaggcaggcaggcatgatcccattttccagataaggaaacaagcctagatatgctacatgtccaggaacaactgcagccaggaggcagaacagcctaggtctaactgcagagtagaagctggaccctggagttaccaacactcctccccaacagttcttagcaccccgcaggctgggcgctgtggctcacgcctgtaatcccagcactttgggagggcaaggcaggcggattacctggggtcaggagttcatgaccagcctggccaacatggtgaaaccccgtctctactaaaaaaatacgtaaaaattagccaggcgtggtggcacacgcctgtaaacccagctacttgggaggctgaggcaggagaattgcttgagcccgggagagggaggttgcagtgaggcgagatcatgccactgcactccagcctggctgacagagcaagactcccctgtctcaaaaaaaataaaaaaaaacagttcgtagggccccataccccacaacccctgtctcctgcacttaactcccacctgggtcagagaacagccaattcaccagtgaggtagaagtgaacccagaagaaatagccacttgattttaaaattcccagctccattccgtggccttctccccactagacacagcagtcccaggcctcctgttccctcctcacctagaggcagccgggacggagggggaagggccaggcagcagctcagctccggcttctctaaagccactctgggcacgtggcccaggagggccacctagtgatccaggcccccccccaggactgccctgggaagccactgtccctcccactccagtagggaacactcactggctgggaaaagacaatgtggatcttcttttgggctgaccaagccaggagggcacaccctcccactgcccctctctgcctcccactgattgtccctcagcctgatggggtgtgacagctgcaatt

SEQ ID NO: 2235 - DNA, 2300 bp, Homo sapien
tcagtgacttttgcatctgagtgtcaccacagaaagggctccaggagggaggactagagagagaaatgatcgttgatgtgagcaggctgaccctggagtaggactgacaggaagagtggcagggttacttggtcaggaagcatcagtgagaacacctgcagtttcaaactctgccccctacccccagagctggcccctaacacactgccaagttccttcccaagcaggaagagtgtagcctttgcaggcagcagtgggaaacgctgtcacagaatctggagagccataagctggccctttctagatccaggcctgctgttgtgtggcctgagtgcccctggctctgtaaagtaagaagaaagaggagagcagaaaagtgagactgagaagagtcgactccaagagagacaaactaaaagagacaaaaagagacgagggcaaagacacaacagagagcctagtggaaggagagatgggcaaagcagagatggggctgtatgtgcataacatttgcctgaattccggtgggtgaaggaataagaaaggtggcaggtggcgtgggggcgggggcagtggtatatgaagccagtgagaatcaacctggctctccctaacatagctttagcgaacaccactcccccgacttcggtgatttccacccccccagactgagctacttctccccctccccgtaccgcggggcctccgaacgctccctgcgcactccccaagcccagacctgacatctggctgggcctccgcagctcccgctctcgatttgccaggcagagcccctcctccagcgcagggccctcccccgcctttccagctgccagccccctccctgctggcagacaagcccaggcagacagccggccaagcctgcccccgcagccgcgccagctctgccaagcccggcagagctgggggcccagggtggtacccgcttccctcgagcgagcagtcccgctgacctcgtgcccgcgcagggatcaggacccagcaccctcctcctccccgcgctccaggtcgccccgcgcagccccgcacccaggcgcccgcgtcccgctccccaggccttcgctctcgcgctttccgcgtcggcggcgcgggggccccactgcgtccgtgtgcctggccgtctctgggcgtgccctatcttctctctggggttctctgtgtcacatttcagcctggctggcttgctccctctgtctctctgtcacttgttcttgtctcatcacaaatctttgctcaaagtttcttcgtggtcccctttcctgaggacaagccctgccctctgcctgcgggcccgcgtcctctcctctcttccctggccctcctccgccctgcttacgtcccggctccccgggggccggggcggagaccaggtgcccgtcggggcggagcagccctccctgccccggcgccagcttcgctcttaccagctcctgtttgaggcgacggagatagcagtccatttccctgctctccatcgtcatgcgcccatttgtcgggttcggttcaaacagagagggcccgggtgaaaccccggccccactggaaactgcgctccgggccggctccccgcccctgcgcccgtagcgctcgcagcgcggagctgagcctgcgctccgagcccgggactcagagtcgcttccccagcggctagccgcgcgcggtcggtgctgggggtggagggaaaagtgggacagccaatgagaattcaggggggctgtcttcagccaatgggcagggcggccgggaggccgggctgggcggccgaggcggaccctaccgcagtgtttgcacaggacccgggcgcagccactggggctggcgaggacacacctggtcccggccagcgcggcggagggcatcgtgactccaggctgtaccgcggcccccaacgaagcacgtgaccctcgtgtggtcataaagggagagcacagttttacggggagggactgggtagcggtctcagtaacaggcagagtgccatagtgtcagtcccttttcccaaactccgatcaggaagggaaacacccccacccactccgctcccatccccagaagtccctcagaagctcttttctccccgaagaggaccctgggaaggtggctcccgcctcactcctagagtgaaatcctcgcagccctgccctcgcgggcggagcagagacgccgccgcttggccggttcacgcctgtcacacaaagccgccgagggtcggctgcgcccctggcaaggctgtagggctggggatactgagtatgacaggcgaggtccctgctctcaag

SEQ ID NO: 2236 - DNA, 2300 bp, Homo sapien
gactggaaaccacagctgtgtccttgggggcagctctcactctgaacatctggtgggtcccatagaaagggatctcttggagaatttctgcccacagctgcagaaaaggcaggagggccaatactgctcagactggtaggaccagagttgcctgggcttggccagcggtcaccgaccaagttcagcccatattgtgcctcttttttcttttctctatccattggctacagctgccccagcttcgcccagagggacacttggggctaggctgaaaggtgtaggcaagggctattgtgtaattgaggacctggggttgttaagtggaggccattcaactggactctgcaaactcttctaaagattaattctgtttctctctctcaccctccctctcttcccctccatctctgtccctcctccctccccgcgccatgtctctgtgtctctctgtatctatctctctcctcttcctctcccctgtctttttttttttttttttttttttttttttttttttttttttttttttaaacggagtttctctcttgttgcccaggctaaagtgcaatggcccgatctcggctcactgcaacctccgcctcacgctttcaagcgattctccttcctcagcctccggagtagctgggattacaggcataggccaccacgcccagctaattttgtatttttagtggagacggggtttctccatgttggtcaggctggtctcgaactcctgaactcaagtgatccacccgtctcggcctctcaaagtgctgggattacaggcgtgcgccacccgcgcatctttcaatagttagcatatctggcacttttggctgccacggacggaccgatggcggcgccggcaccgttcgtgccttctctggtgttcttacagttgtcccactcagagacctctaatcctgcctggggcaaacttttccccgttaattaccttttaacaacacgtcgctaattgcttaattactctccgtgctctccgccaccgtccccggctgtcccggccgggcgcggcgtctccgcgctgggagggagcagcgctggcgggcgcggagcccggcgtccagggctgggctgggaggagcaccccccaccggtctgcggagcccatcggcctatcgagcctattggccgcaactccatcctccagggcctggctggcgctcgcccggctccttttgaataacaaaggagcgtcccggccttagagcgcttcgccaaaggcgagagcgtcagctaggttgactgacgccgagctctggggagagaaaggcttgttccctgcccaccccactgaaggccccagggaaagcagcccgacccccttaccccgtttcatgttttcataaaaatcattgtctgaaattaccgtgcttaccgtgtgtgtgtgtgtgtttacctgtttatcttgtctccccttctctcccatgtaagttcttgagagcagggacctcgcctgtcatactcagtatccccagccctacagccttgccaggggcgcagccgaccctcggcggctttgtgtgacaggcgtgaaccggccaagcggcggcgtctctgctccgcccgcgagggcagggctgcgaggatttcactctaggagtgaggcgggagccaccttcccagggtcctcttcggggagaaaagagcttctgagggacttctggggatgggagcggagtgggtgggggtgtttcccttcctgatcggagtttgggaaaagggactgacactatggcactctgcctgttactgagaccgctacccagtccctccccgtaaaactgtgctctccctttatgaccacacgagggtcacgtgcttcgttgggggccgcggtacagcctggagtcacgatgccctccgccgcgctggccgggaccaggtgtgtcctcgccagccccagtggctgcgcccgggtcctgtgcaaacactgcggtagggtccgcctcggccgcccagcccggcctcccggccgccctgcccattggctgaagacagcccccctgaattctcattggctgtcccacttttccctccacccccagcaccgaccgcgcgcggctagccgctggggaagcgactctgagtcccgggctcggagcgcaggctcagctccgcgctgcgagcgctacgggcgcaggggcggggagccggcccggagcgcagtttccagtggggccggggtttcacccgggccctctctgtttgaaccgaacccgacaaatgggcgcatgacgatggagagcagggaaatggactgctatctccgtcgc

SEQ ID NO: 2237 - DNA, 2300 bp, Homo sapien
caatatttgtgtctgtaaaacatcaaaaacaacaaatgcagtaacagaatgcctataaaactataaatgttttctggaaatgtagtctttttgcttttcttgggataatcctgtggttcttcagcagtgattggtgtgagttctacagaaccgctgctatgtgcatggagacccagaagagatttttgagcaagaaggtgtcagccattcaatgtttattgggtctaccaggtgcttggtgctggcctggagggcctaggatgacaaaattactgtccttgagaagctcacagtttatttaatgtgaggcacatacaagtaaccaagcaaatacaacataagagccagactggaattatttatagtgtgatgtgggaccctggggtggggaataaaaaagggtatcaaaaggagcaggatcaaaaggagcaggatctggagctggacccaaacagcttaagatatccacttaagaaagatcactccagcacctgtggggtacatggctgggatagagaagaaactctggccagagaaaccattcaggaggtttttgcgagttaggatgataaagggatctaaaatatagggcagattctacggagactgaagaagaatgggtgaaatatttggaggcaaaattacttgtgcttggtaaattgttagaaagtggcaaaggagtcaagaataattcccaggtttgtggtctggggattaggcagataaaagaggtgagggcactaagaggaaggctgggacctttagtgccatctccaccatcagtctccattccttcaaacggatagttgacattttctcaatgttttgtacatttccaggcaaaataaaccttcaggaccaccttccaatgggattaccatgtcaaagcccctcctatatcatatggaatctagaccatcactgtgtgtgtgtcaagggggtagggacaatgaccagcattataatctatggacaaagttgggcttggttgcagaatatatttaagtttggtattctttgtatttttaaaaatttgtttactttttaagaatttgagacagggtttctgcatgttgcccaggctggcaactcctggcctcaagcaatcctcccgcctcagcctcccaagaagctggaatcacaggtgcgagccaccccacacaactaaatttggaattatgaatatggctgaggtccagaaatatttaaatttggcatgatgactaagagtttgttataggagctcaatcatttgataaatattgaacatttcctatgtgtcagattgtttttcccactagggatgcagaggagaacaagacagaataggttcttgtcctcatagagtgtgggagacaggcagaagacatataatttcaggtaggtataagtatcataaagaaaaaataaagcaaaacaagagagtgctgggaaaggccagggagcagagaggatgacagagctgtcttagggtgttcaagacctctttgaaaagctgatatttgagcagaagaccacagcaaggaaaagtggcagagactgctagctgcctacgcatgaaatgatgggggaaggagcaatacagaaggcatgtaacatttgagagtctattaggcatcccaagggaggtgctgcggaggcggatgcatggaggcggatgcggaggcggatgcatggaggcggatgcatggaggcagatggatgcacacgtctagagtttaaaaggagatctgaggcggagatacgaacttgggagctgttagtccagttccaggttccaattcaacgtacttttatcagagctcactgtgcgccagggacttgctaggagataaatggggtttatctcaccggagataaatgtggttgcacagcagatggacacaccagccaatgtggtaaataaacccttgggtccagctacgttctgcgcgctctctgccagcacagaggagcagcgagtcagggtacggagcgggtagcgttggggaagaggtggccgcgaagcgagacaggccagcggaacggaaaacggaagcacgagacgggggcgtgacgcaccgggcgcatcacaaagaacggcgagagggcggtggcgccgggggcacggctgggcggctccgcccagaagagggccgagaggcggggcggtgcccccaccgcaggcccgcggcgccctctgcaggccacaggcagcgactcaccagttgcctcatctttcctctcctccctcttggggctttcctcaggccacattttttgtgtgtctgggcagtctctcagcctccgactcccgtccc

SEQ ID NO: 2238 - DNA, 2300 bp, Homo sapien
attcatcatcagatataccaatgcctgagaacttgaaatacagtctgccataacaactaaactaccaagtaaggctatgagaatcacatctaattcatctttgaatccccaatgcctggcacactgtttatacgtaatacggactcaacaaacctttgttggagaaatgatccccaaactcaaatttcctgctaatttgggtaaggcaatcttagaaacactctaagacaacctggaagatgggagatcaatatgatacatttacagagctttaagaaccacctgcataccggctgtggtggctcatgcctgtaatcccagtactttgggaggcaaaggtgggaggattgcttgaacccaggagttcaaggctggtctgtgcaacactggagaccccatctctacaaaaaatacaagaactagccaggtgtggtggcacacacctgtagtcccaaatacttaggaagatgggtgggaggatcactggagcccagaagttcaaggttgcagtgagcaatgatccgccactgcactccagcctaggtgacaaagcgacaccgtctcaaaaaaaaaaaacaaactctgcagttaccaacaatagccagagcactacattaccatgaatcaagtcaaatgttaagtctcacattaatctagtcagtaagtaaaagaagaatccctgtctgtattaccaagtagtgacaaaattgacatatatggtagctttattctatttaaataaggtacgcatagaaaattccaaatttcgccaccaccaccacttaactcaatcattcatcaaattcacttccagctctgaggagctactggtatttcatctgacctgtggtaaagtccacaaaacacatcctcctctggtcctctcagctaactcacctgggtacttaagttttcaagaacaagagagtccaaagctatggtggagaacacacaggttttcccggtgccagatttagcttgaacaattaaatctgcgaaggaaaaaaacaattatcactagccagtactcactgaagcaacttaggggctaacatggaatcagagaactagaagggtctcctgagattcccctagttggcaccttcatttttagttgattctcaaaaacgtatgagaacacgcctagtccctgaacgtttaccgtttatcttctcaaacttagaaccatttgtcagtgcttaaaaaaaggtcttaactatcctcaagttcaatagtgcacgttagttttacaaataagttaactgagcgtagcgcctagcccccggcagggccctgctccgggggccgaccgagggctcttcctgagctgcggcgcgggcctggccgccgccgcccgtcggtcccccttctcccaccccaccccccgacctatcccgggcccccgctctcaccgagcccgcagcgccccaacgggatggccttgagctgcaccggcgagggcctctcgaagccggccgcccgcagcccctccagcaccggccgcgaaagcagcagtgactcgaagtcggccggctccgccaacagcacatcccccgtgcgggtccgcgggctgctgagatcctgagcggtccgcaggatcctcacaggcccgggtgttggctctggggccgggacctgcacggccacatgctcagccggcatagcagtcgccactgctgctaaggctcccgaggcttcaaatgccgccgccatggtagccgcgccgtcagatctcgcggtgcttaaggggaggcggggatcttgggagcgagaagaagaaaaactttattggcagttttcccgcgaagacactaacacgcccggcctggaagtggaagaaagggacgggagtcggaggctgagagactgcccagacacacaaaaaatgtggcctgaggaaagccccaagagggaggagaggaaagatgaggcaactggtgagtcgctgcctgtggcctgcagagggcgccgcgggcctgcggtgggggcaccgccccgcctctcggccctcttctgggcggagccgcccagccgtgcccccggcgccaccgccctctcgccgttctttgtgatgcgcccggtgcgtcacgcccccgtctcgtgcttccgttttccgttccgctggcctgtctcgcttcgcggccacctcttccccaacgctacccgctccgtaccctgactcgctgctcctctgtgctggcagagagcgcgcagaacgtagctggacccaagggtttatttaccacattggctggtgtgtccatctgctgtgcaaccacatttatctccggtgagataaa

SEQ ID NO: 2239 - DNA, 2300 bp, Homo sapien
ggcaacagagtgagactcggtctcaaaaaaaaatgagttgatgaaacttttccaggatttcagcattttatctgctgccaaattgtcagaagccaaaatctcaaatacatcttagtctacaattagactaactcaggttcttgggaagtaggaggatttccaatgtgcaacatcacctaggatttggtagacataagatggactcaaaaagcttcccaggtgatgaacatggatatctgggttaaaaaccactgttgaagattcatcatcagatataccaatgcctgagaacttgaaatacagtctgccataacaactaaactaccaagtaaggctatgagaatcacatctaattcatctttgaatccccaatgcctggcacactgtttatacgtaatacggactcaacaaacctttgttggagaaatgatccccaaactcaaatttcctgctaatttgggtaaggcaatcttagaaacactctaagacaacctggaagatgggagatcaatatgatacatttacagagctttaagaaccacctgcataccggctgtggtggctcatgcctgtaatcccagtactttgggaggcaaaggtgggaggattgcttgaacccaggagttcaaggctggtctgtgcaacactggagaccccatctctacaaaaaatacaagaactagccaggtgtggtggcacacacctgtagtcccaaatacttaggaagatgggtgggaggatcactggagcccagaagttcaaggttgcagtgagcaatgatccgccactgcactccagcctaggtgacaaagcgacaccgtctcaaaaaaaaaaaacaaactctgcagttaccaacaatagccagagcactacattaccatgaatcaagtcaaatgttaagtctcacattaatctagtcagtaagtaaaagaagaatccctgtctgtattaccaagtagtgacaaaattgacatatatggtagctttattctatttaaataaggtacgcatagaaaattccaaatttcgccaccaccaccacttaactcaatcattcatcaaattcacttccagctctgaggagctactggtatttcatctgacctgtggtaaagtccacaaaacacatcctcctctggtcctctcagctaactcacctgggtacttaagttttcaagaacaagagagtccaaagctatggtggagaacacacaggttttcccggtgccagatttagcttgaacaattaaatctgcgaaggaaaaaaacaattatcactagccagtactcactgaagcaacttaggggctaacatggaatcagagaactagaagggtctcctgagattcccctagttggcaccttcatttttagttgattctcaaaaacgtatgagaacacgcctagtccctgaacgtttaccgtttatcttctcaaacttagaaccatttgtcagtgcttaaaaaaaggtcttaactatcctcaagttcaatagtgcacgttagttttacaaataagttaactgagcgtagcgcctagcccccggcagggccctgctccgggggccgaccgagggctcttcctgagctgcggcgcgggcctggccgccgccgcccgtcggtcccccttctcccaccccaccccccgacctatcccgggcccccgctctcaccgagcccgcagcgccccaacgggatggccttgagctgcaccggcgagggcctctcgaagccggccgcccgcagcccctccagcaccggccgcgaaagcagcagtgactcgaagtcggccggctccgccaacagcacatcccccgtgcgggtccgcgggctgctgagatcctgagcggtccgcaggatcctcacaggcccgggtgttggctctggggccgggacctgcacggccacatgctcagccggcatagcagtcgccactgctgctaaggctcccgaggcttcaaatgccgccgccatggtagccgcgccgtcagatctcgcggtgcttaaggggaggcggggatcttgggagcgagaagaagaaaaactttattggcagttttcccgcgaagacactaacacgcccggcctggaagtggaagaaagggacgggagtcggaggctgagagactgcccagacacacaaaaaatgtggcctgaggaaagccccaagagggaggagaggaaagatgaggcaactggtgagtcgctgcctgtggcctgcagagggcgccgcgggcctgcggtgggggcaccgccccgcctctcggccctcttctgggcggagccgcccagccgtgcccc

SEQ ID NO: 2240 - DNA, 2300 bp, Homo sapien
ttctagatgattcttacctgctatgaaagatgccttgatgtctgaagaggcttcggcctgatctccctgaagatgctgaaatgggggagaagcctcatcacctctgtgcaagcaaaggagtgaagattatttcttgaacacctggacaacatatctattcaactagcttgcaccctggtggagctgggggcagcatttctggaatcctcctaaccattgttcactgcttgtagcagagtaggtgggcctcagggttagtgacaagtcctttcctgcccttcccaacacccagccaccttgctgcagtctctgtagcctgggctctgaaatacatgagctcctcgggagctgcctatccatcctacagcttagtggttagctgtttaattgtaggccaagaatttctctccccaccacagccatctaaatgagttttactagccaggaacctaaaaacacccttcgtgggcttccctatgaccccagctcgattgaccctgtaggttcaaaaggtttcgaggtggcacctaaccagaatgtgggcagaaggcagaggagagggagccttctttctgtctttatctctttatgcttatcctcattgaccatgggctgagttctttctctgggtcccctaatgtgggaatggagtggttcttgccctctgagcttacagactaagaaggcagaaaagctttacaactacagagtacatgtgtatacacacaaccaacctaaacacatcagagaatacatacttaaatcaattcacttcatatacacatctcattagaagaccaagctaaacttcacttagagggcgggcaaaggactagaaaagaatttttctcttaaaaaaaatgagtactagagcaaaattatgagtgtctaagtatcttagttatgcttcataagatctgactggggtaagagataaagaggtaaatagggctgggcgcggtggctcacatctgtaatcccagcactttgggaagccgaggtgaacagatcacctgaagtcaggagttgaagaccaacttggccaacatggtgaaaccccatctctactaaaaatacaaaaattagccaggcatggtggtggacccctgtaatcccagctacttggaaggctgagggggaggattgcttaaacccaggaggcagaggttgcagtgagccgtgattgcaccactgcactccagcccaggtgacacagcaagactccgtctcaaaaaaaaaaaaaagaaaagaaaaaaaaaaaggaggtaaattagaactggttgcacacacatacaaacttcctgtgatgaatttaagaacagatcattacagggttagaatagtgacagattcaacaaaggatctgtttgatagggcaccaagggaacattttactggttcccacaaaaattaataaatgttaaatatcatgtcccaagcaatttcccatgtttttttattggtcctaatcaacagaatgttttgtgttccttccacttcacgttcagagcccacgtcatgccacttcctaaaagaccattagaccatccccttttcctccatcctccactgtagccttagccagagaaaagatccagctcacttctggtccaaaaaatgtcaacgtttggaaaatggctcatctacactacagaacacagccagatgacactgctaaagggtactgtaagaaaacacaaggtccaaagtatgctgaattggtttcataagtctaactcattggccagtgactgaaaaaccaggatatcaggattttctgggggccaatagccatgacccttgagctttcatagttcatgaaccactttgacataataaaatattcccaaaaccacctattccattcagtcccactcagcattaagagggggagggaaaaacaaaccaaccaaccaacctaacagttacattcaaatgtcaaatgaatgtgaacctagaaaatgtagtattaagagcatatcagaactagaaaagatttaagaatatctaattcattttacagtatagaaaactgagacccagagaaattaaatgacttgttcaaggtcatgcagttatttaatgacagatctgagaccagaacacgagtcttttggctattagtctaatgcattttctaccacacccactgcctctgagagcagtgatgctttggagaagatccatcaaagaatccatactgtaattggagacatagtcttatatgtcaatacgtatatgtcaatactacttggacacagcccttggaaatcacctgactgtaccaatacaaaccatac

SEQ ID NO: 2241 - DNA, 2300 bp, Homo sapien
ttgtatacttgcattttgttgcattcaagtagagacgaggaaaaaataaacacatcagttcccttcctgtgtgccaacaggtccacatggggaaatgtacacatgctttgtattgaattcgtggacacccaggagccctttctacagacagtaaacatacaggctccctcgaagtaaggtaaacaaggcatacatttgaccatcacgtacattcatgcaaaatacagcaacgcatgcctggtcttacaaacagatcgcattgtgcctaggaccccgagaaagttcagacgctctctcttaagaaatacggaccctttttcttgcagtgcgatttcaggtctggaacctcagcctgttgctgacatatcagggctgcccgggataaaagcagaacatctcggatcctattcaaatgtcaacactaagcaagcgcaggaatttagttgagtccaggtaactttgcccagtcccttcccgtcccccacctccagtgtaaacacctcgcagagtgagtctttcgatccctctccccggggccgcgacggcccttggcgtcacgtagagacctttcccagagctcgcggggtggaagtggcgtcgggcaggaccagatggactggcccccagcctctggtagacacaccgccggctcgccgagctggagaactttgcgaagcgccccaaaccgctccgggtttccactttcagccatttctctccttgtcccctcaccaagagcggggacggagcaagccttcgccacctgtctctggcacccgccgagggaagacaggccaatggaaagagggcagaggttcacaccccacccccgaaccccagcgcctggctgcccggaggtggctccacagcccgagggaaccgacgcccccgggccggctgtctgctcccccacggcacgggccccacccccaatccttccggcgccccagcgcccacccacccgggcgcgggagtgggagggtgccgcgtgggcagccggagcaacaggcgtgggagcagcgctcctcgcacttcctggctccagaaggctcggtcgcgtccctcttaccttccgcgaagccagcccgggccccgcgcccggcgccccgcgcgcgcgaggaagctgcggccgggagccggggccgcggaggcgccgagcgcccagcagcgcggggaagcgcccagcagccgccgctcgcgcggctcctcctcgccagcgcagtctcgctcgctgcctccctcgctcggtcggttcgtgcgtccgtccgtccgtggggccctccctcccccgccgccactgccgccgccactgccgccgccactgccgccgccgccgctgccgcagcctccgccgctccagccccggctcggcagcgcgtcccctccccgcctcgccgctccgctcgcgggctcgcgggctccctcgctctctcccttcccccgccgctgccggcgccgcgccgagcggagcccggccggccacgggctgcctctcccgaggtccctttcccgagggggggaggtggtgggggcgcggcgcaggcggggcggggaggagaggagagtccgggggaggcggcaaggctgcgccctcggctcccctccgatccccgcgggcccagcggccccaggccgggccggagagcgccgagccgccaggcagtggaggaagagaggaggaggacccggagtctcgccgcgggagggtgcccagggcgagggcgtgcgagggggagtgactccgcgcgcgagggtgtgtatgagtgtgagtgcgtgtgtgtgtgtctgtgtgtgtggagaggggcgcgcgcgtgagcggggggtggggagacgaggcagagcctagtgcgtctccccgggcgagtggaggaatcctagggtgtgcctggaggtggcggagtgtaccgacgcgggtgtgagcgcgtgtgccagcgagggtgggcacgggggtgagcgtggcaaggtgagctgggtttgggggtgggggaggagcagggagtacggcgtgagcgtaagttcgggggcgtgtgtggctggggacccacggagaggtggcagggagggccggcgtgtgcgcgcgtggggtatgtgtgcacctagctgtgtgtctatttctcgctgactgtccacagggcagcagcacctgcttgagaccaagcccggcgacctggcaaggtggggccccctaccgcgcaatctttgcggctggcccccggctctcagctccgagtgcagaggctgaagaggtacccgggggacacactgcctctaaccccacctatgagccgctctcctctcgg

SEQ ID NO: 2242 - DNA, 2300 bp, Homo sapien
acaccctcgcagtctagaacaccccagaggtcacaacgcactttgcatttctctgcctcggcacccacctctccacacccagaaatgtgatctctcaagccaagcgttccccgtccctgctggggcacggagctgcctcgcttccggagcgccaggccgagatccaggattccgggcaccgaggctggagacaccgggaaagccggagccgcgggtccgcccagcggcggggactgcgccctttgcgcgccgccgccctgagggtgggaatctgggccggacacctggccctgtgggcacatgctgaccttcccactccccatcctgggtcgacgaggcacggagcagtggggacccatgggcttcagggagggactgaggggctgggcgggctccagttgtaaggggaccggctcgggtgagagttcacgctcccaagtccagactcccggtctaggtagtgggtagacgtggcgggagaggagggcgaatctcgaccttctgatggtgccttcgtcctccgagaggagagcggctcataggtggggttagaggcagtgtgtcccccgggtacctcttcagcctctgcactcggagctgagagccgggggccagccgcaaagattgcgcggtagggggccccaccttgccaggtcgccgggcttggtctcaagcaggtgctgctgccctgtggacagtcagcgagaaatagacacacagctaggtgcacacataccccacgcgcgcacacgccggccctccctgccacctctccgtgggtccccagccacacacgcccccgaacttacgctcacgccgtactccctgctcctcccccacccccaaacccagctcaccttgccacgctcacccccgtgcccaccctcgctggcacacgcgctcacacccgcgtcggtacactccgccacctccaggcacaccctaggattcctccactcgcccggggagacgcactaggctctgcctcgtctccccaccccccgctcacgcgcgcgcccctctccacacacacagacacacacacacgcactcacactcatacacaccctcgcgcgcggagtcactccccctcgcacgccctcgccctgggcaccctcccgcggcgagactccgggtcctcctcctctcttcctccactgcctggcggctcggcgctctccggcccggcctggggccgctgggcccgcggggatcggaggggagccgagggcgcagccttgccgcctcccccggactctcctctcctccccgccccgcctgcgccgcgcccccaccacctccccccctcgggaaagggacctcgggagaggcagcccgtggccggccgggctccgctcggcgcggcgccggcagcggcgggggaagggagagagcgagggagcccgcgagcccgcgagcggagcggcgaggcggggaggggacgcgctgccgagccggggctggagcggcggaggctgcggcagcggcggcggcggcagtggcggcggcagtggcggcggcagtggcggcgggggagggagggccccacggacggacggacgcacgaaccgaccgagcgagggaggcagcgagcgagactgcgctggcgaggaggagccgcgcgagcggcggctgctgggcgcttccccgcgctgctgggcgctcggcgcctccgcggccccggctcccggccgcagcttcctcgcgcgcgcggggcgccgggcgcggggcccgggctggcttcgcggaaggtaagagggacgcgaccgagccttctggagccaggaagtgcgaggagcgctgctcccacgcctgttgctccggctgcccacgcggcaccctcccactcccgcgcccgggtgggtgggcgctggggcgccggaaggattgggggtggggcccgtgccgtgggggagcagacagccggcccgggggcgtcggttccctcgggctgtggagccacctccgggcagccaggcgctggggttcgggggtggggtgtgaacctctgccctctttccattggcctgtcttccctcggcgggtgccagagacaggtggcgaaggcttgctccgtccccgctcttggtgaggggacaaggagagaaatggctgaaagtggaaacccggagcggtttggggcgcttcgcaaagttctccagctcggcgagccggcggtgtgtctaccagaggctgggggccagtccatctggtcctgcccgacgccacttccaccccgcgagctctgggaaaggtctctacgtgacgccaagggccgtcgcggccccggggagagggat

SEQ ID NO: 2243 - DNA, 2300 bp, Homo sapien
gagaatcgcttgaacccagaaggcggaggttgtagtgagagattgcgccattgcactccagtctgggagacagagcgagactccatctcgataaaaaaaaaaaaaaaaaagaaaagaaaaacaagggaggagctgattcactagaacaactcttagagtgactcagaagccagcagaaaatagcttgttctcccacatctgcttcattgtcaggcgatgaggcacttcctcattgcatacacataggcagagcgaaagggaggaggaggaaatgggatttttcaagttcctttgcctgctccagcacctaacactctgtatttgtaatcatttcagacattttgtttcaagtcaatatttattgagtacctactctgtgcctggcccctcattttagctttcagattgtcagttttcagaacacaaggcataatgcctttctgaagttcagtataccctgcatcattactccagattcacttacactgctatcgagcaccttcactcatagtcttgctatccttcatatacagagatgaccctcccaagcctaaaatcaacagggggaggcatagagctgtccttctggctctaatgtttgctttaccatcatccacgcccattcttagtccagcatgtgagagccagtgtgaagtgagcagaatatggcataagtatggagtcatacatccttactggaaattctttaccatttactagctctatgactttatttgacttctctgaatctctatcttctcatctgtaaattggacacaatgatgtctatcctacactgtaggatagatttctcatacagcactgaaaatgacatcaaataccattaaatgaaagtacatggcacagtgataacatgataaatacttgtttacttctttcagactataatcgcacaaactgatcacatccctcagtcagactgtaaactgcatgaggcaggctgcatctgccttggggactgtctgcctaggcaagcactaggtccctaatgctgtcttgcgaattataattgctaagtttagggataatgtattaagtgtactacattatttatgcattatgaatattcgtctcaaatatttattatattgtattttaaataatgtggttattgtaaatgtaaccagctgcatcaatctgtgagctgacagccattctgtggaaaaggaattcagaaactttgaccttaggtagggatacaactagttatacatccactcccctctctgagttatttggtcctgcctaagacttgctgccaccaagatctgcattcctgtgttcacaaggcagacattccttgcatcctctgtactctccattgtttcaacttcactgcaaacaccattccccacaatataatgaggccaaggaaagaaaaaagtcgcctcagctggcaagcatagggtggaaaaacctgccacacaaatttgcaattatttgacttccgcctggaaggcaggtcggctgggtttatgtcccccaaagttagtatcctcttctgtacaaaatgtggttgagagaagggtgatctccaggtgtttcatctttgcacccttgcttccagcaccacgcccacaggcgcttccagaaaaaagaaaaaaaaaaagggagcaaggaagccaggtttttcaacaacgaattcattctaatgcagacaccaaagcccacttcatttattaacattctggataaaatcccaatcgattaggccaccagagccctccattcctaaactccgcgtacagtcaggtaaaagcacgaagcactagtcacggtcctgcccagacttttcacgcagaggtggaaagttgcagaccccgagccgggaggggcgcgagcccaccctgaagcccaggacccaggagggcgcttcctcccggaagtgacgcgagctcaatcccggccttgctcttcccaaacaaaagggatcttggggccccgggaggagcctgaatgactttggagaagccccgcctccagccggcgcggattggggccgaggctggagaagcaaggaggcgattggcgctggtgaatgccaatgcccccgccgggcggctgagggggcggagcctcagccgctgtggatggggagtggaggcggaggggagcggagcccggagcgtcgtggaaaggtaggagcaactatccctggggcttggtgatggctgggaggccgggttctcaagagcaaagcaaggataggggcaccggtagcctcccgccgccgtctcaacggcctctgggcccatcccctgagggggcggggccgtctc

SEQ ID NO: 2244 - DNA, 2300 bp, Homo sapien
tctagttcacagcaaggcctggcctgtacagaaagtccggctccctcatcctgcctcagccaactgctcctccccgagctgacctgaaaccagcagttcctagcccagccctggctgctccctggggcactccttccctctcacctgctctaccatgtctggctttgatcttgttcacctgggctgccccatattccaggccctgccctctgcctagggctgtctgcctgccacacttgttgccacaaaaatcctgtcctcatgtctctgaacaggtttgacggctggagcaagggtaggaggggggagcatggtggggcttctcttcccaggccgtgcctccatctgtctagaaccagctctgggaagcactcatcaggcatgtcttgctcctcaggtcaggcatggacaagatgccaccaaagtcctgagcatctagcccctccctgctcgggagtctgacttgccacacctgcttgtggaggagggaacaactgaatgcttgaggggagacacctcctcctcctccgacgccttccgcacctgaactcaaacataacagctctgctgggaaggggcttttgcgtttttaaaggacttatccatttcccttctctctagtgcccaccctcccactcccccgctccctcagcccacccaacccaaatcaaagccttctaggatggtttgtgcctctgagcagacagggtgtcctcaggaagaccctgatccaaagggattcggggtggtggggtagtttaggggtggcgaccaaagcacacaggccccttcttcatccctagcgtgttttccttctcctgagtcttggtgagtcagagccacagggccacacacaaggctactattcagggctcgttttccttcccctctactcagatcttggcatctctcactccttcattctctatgtgggccttattctcaccatgggaaagctctgctccctgccctgtgccgcctcactttcccccaacaacccacccaacacacacacacacacacacactcctcatccttgccttttgagagtttgcaggcccagctggatacaaacatacaggaggtagaacaacatagaaatgttacaccaacaaatccttattcacatactcaaccggttttattgcttctggctccgtgcagacctcagccagcttgagaaggggacacacaccacacactcgctgtgcttgcccttcatctattcagcatatagttattaagtactgactctgtgtcaagcaagcatcatgctaagggctggcatttacactctggtggagaaacatgtctcaaagaggtgactctcagggttgtgcagggcaggatattacaagtgttccaaatgagggatggggcccctaagattcaggagagctggaaacccgcgggtctagagacttaagaagcacctgctttaaataaaagggagaaggagatcggtttgcattgatagggttctgggtacactacagcaaggagtctgagcaagaaaagcagttcagaacaggagctttgtcggtccgtgcgcaaccttggacgagtgagtgaacctccgccaccctccatctcagcatcagtaaaataaagatgggaacctccctctcagggttttgtgagaatcccgtgagataaagcaggcacgtgcctagcacatagtaagaactccatgggtttgctgctccctttgtggagcggcgctgtgggtgaaggggcggtgatagaagttgcttgtctagattggaagccatgtggttctgacgccaaggcccggctgcaacgtgcccgacgggctactccgggctggcagccccgcccttcttcggaaagctgacttacttgcgccccctggtgtttcacatgctgtgaatctctcacgaccgaggtctggccgcgcgccacctctctgagggaaggacagggtcagtggccaggaaggggcccacttcagacgccggcgtaaacgaggatgcgcctcctctcgtccccgtgctcagccgcctccctggtgtctaagttcggagcacagcagcttaccctgcctgaaaagcggaacgaagcctagactgcgtaaaaaaaaacagagaacagaaaccacctcacagcattgttgtgagccttaaatgagcaaatttaagacttaaaactggtcattgacataagccttcaaaaagtgatagctattagtattatgtagctcctagaacagtggctgacatatagtagatgctcataactgttaaaaaggggccaggaggattctatctatttatgcattc

SEQ ID NO: 2245 - DNA, 2300 bp, Homo sapien
tttccttcccctctactcagatcttggcatctctcactccttcattctctatgtgggccttattctcaccatgggaaagctctgctccctgccctgtgccgcctcactttcccccaacaacccacccaacacacacacacacacacacactcctcatccttgccttttgagagtttgcaggcccagctggatacaaacatacaggaggtagaacaacatagaaatgttacaccaacaaatccttattcacatactcaaccggttttattgcttctggctccgtgcagacctcagccagcttgagaaggggacacacaccacacactcgctgtgcttgcccttcatctattcagcatatagttattaagtactgactctgtgtcaagcaagcatcatgctaagggctggcatttacactctggtggagaaacatgtctcaaagaggtgactctcagggttgtgcagggcaggatattacaagtgttccaaatgagggatggggcccctaagattcaggagagctggaaacccgcgggtctagagacttaagaagcacctgctttaaataaaagggagaaggagatcggtttgcattgatagggttctgggtacactacagcaaggagtctgagcaagaaaagcagttcagaacaggagctttgtcggtccgtgcgcaaccttggacgagtgagtgaacctccgccaccctccatctcagcatcagtaaaataaagatgggaacctccctctcagggttttgtgagaatcccgtgagataaagcaggcacgtgcctagcacatagtaagaactccatgggtttgctgctccctttgtggagcggcgctgtgggtgaaggggcggtgatagaagttgcttgtctagattggaagccatgtggttctgacgccaaggcccggctgcaacgtgcccgacgggctactccgggctggcagccccgcccttcttcggaaagctgacttacttgcgccccctggtgtttcacatgctgtgaatctctcacgaccgaggtctggccgcgcgccacctctctgagggaaggacagggtcagtggccaggaaggggcccacttcagacgccggcgtaaacgaggatgcgcctcctctcgtccccgtgctcagccgcctccctggtgtctaagttcggagcacagcagcttaccctgcctgaaaagcggaacgaagcctagactgcgtaaaaaaaaacagagaacagaaaccacctcacagcattgttgtgagccttaaatgagcaaatttaagacttaaaactggtcattgacataagccttcaaaaagtgatagctattagtattatgtagctcctagaacagtggctgacatatagtagatgctcataactgttaaaaaggggccaggaggattctatctatttatgcattcatccatttaattatgcttcagaaatgtcttgctctttttatactgtcgatgctgtaaaatacaaaacccataataagccaagtaagcaagcaagagccagcactctgggaggaaaacaaagagattttcttcattgaaatatccatgccacagttcctactaggtgccaggcactgtgataggcactaggatagagaaataagttacaggcctttagggattttaggtgctggtgggagagacaaacatgaaacgcagtgttatgtggattataataaatagagcaacaagctgtggctgcacagttaacccccagtggagtcaggaaaggtctcacagaggaagggacacttgtcttggtcttgaaggagaggtagatgctcccaggtgaagaagagaatgaagggcattccaaggaatgaggatagcatatacagtgcaccaagttgccagcaggcaccgtgtttctggtgagaagcctgggatggaagtctagatcaggagaagtaagcaggaactcgacaggaaagggcatggtctgcccaggcaaagaatttgtgcccttatttggtgggccactggaagcctgaattgaggagcatcatgagcacaggcacatttaccaagaagctaatgaggtttaagcttcgaggcccatcactggcatggccccttccaaaccctgaagagcccaagcaatgtggttgtaaaatttgcaaaataagattaaatcttaactgcaatctgttaacactgctgtctcctttcactctttctcctatatcacactttcccacatgttggatggccttggagtggtagccataagcatttttggaattcaactaaaagtaagttgaatgaagcactactttat

SEQ ID NO: 2246 - DNA, 2300 bp, Homo sapien
tgcatgtcaccttaatgaggcctaccctgatcatcctagttgcaactgtaaccatccccttgactgtgctctctttaccactgcacttactactttttaacatactctgttttacttctgatgtttattgtttatggtctatcctcctgcaatagaaggcaaactccatgagggcatagactgttcaccaatgggtccctagtgcctagcacagtcctggcatgtggtaggaaataagtatttgttgaattaatgaatgcactcatcaccttaccacagaaagtgggggtaaaggagtgtcactgtaggttggggacaggagggaagtgcttgcagccccttcccactctgcccgcccacagaagttggggctgcggagtgaggggcgctaggacccggaggcggtggggagagaggttaaaggttcctctgaaaccttctccactatctctgtctctgagatgtctgcagccagctgcaccccatctgcttacactcgggaggcacctctaacgccaccaccgccccccacccccaaccaaagactgacagtgaatttggagttgggggcatcggcagttactagtaagttgtttaccccaggactttaaaatcatatgaggaggcaggaaagacacctgcgaggtgggagaaactgaggctgaagaagcgactggagccagatcccaggtgaactctgaactctcgaagttaagcccaggattttaaaaagaattttacttctgacggagggccacagtgcccgcagggcccgtacctgctatcctgggaggtttgagggttggggtggtggggagaggagagtctctttcggcagactgcacctccccaccccttccctatttaccacgcccccaggcgctgtgcgggcggagggagggtgaaggagcagtggggaggaggcagggcgagaagacgaaggagggaaaaagctccagggcttccactctctcggcaggacccccaccctggcctctggtgcgggaaaacctcccagctgtttctgattctttcatactctcagccccgcccgagagggtggaggaccgaggcacagagggggagcggggagagactgagctccgctgagcccaggagtaaggggcggggagtccgcaggtgcccccttagcgtcggcagtcgattcccggtccgtaaagaaaagcacccgggccgggcaggccgggcaagcaggagccaggtctaaacgtgatgcattgggggtggggggtgcagtggctcagaagaagcaggggcgatgagctctagctgaaagcatcccctgctagaagccgactgcccacggcgctcctgtaggcagtgttgaaaaggtagttaagacctccaactcccggtggcagggactctacccatttcacagaagcgcaaggatggaggaaatgagtgcatcctccgtgctcagcgccggtgtcactgtaggttggggacaggagggaagtgcccgcatccccttcccgctccgccagcctggccgtcacccatagaagtggggctgctgagtgaagggcgctaggacccggtggcgcggtgtcggcagggactgggcgcttggggcgcaggagggagccgcggcgtcccgtcgcagcgtgcgggagcaggtgggggtgcagcgcggtggcgcgcgggagccccgaggggcggaggcggctgctacacctagggcgtcgcggagcgccccgggcttggcgcgggcggagccgccctaagggccgcgcgtgtccccggcctcggccccgccccgtcccgtccaatgagagcccgcggccgaaggggctgtccgcacactaggcccgcagctcccttcagcgccgcagaccccctgacaccgcacccggtcctcaggcagcgcgccccagaccccgggttcggcacgccgtcgtcggcttccggacatcgcaacttgcgcccctctcggggatcctcctcccgggctctggaccccaggtgatcctaggtccccagccgccggcgaacaccatggccccccaggggggtgaggtaggagcagcctgagtacccccagaaggtgccccgtccacgcccctccgggctgcgcggcgggagtcttcggggagctatgctgagaccgggtggtgcggaggaagctgcgcagctcccgcttcggcgcgccagcgccccggtccctgtgccgtcgcccgcggcccccgacggctcccgggcttcggcccgcctaggtcttgcctgccttctgctcctgctgctgctgacgctgccggcccgcgtagacacgtcctggt

SEQ ID NO: 2247 - DNA, 2300 bp, Homo sapien
agtgcattctggtctcagtctttggagatagtatttagctaactaagtaagtttttaaaggttttaagttgactaatagtaaagatgctgtacagatagttaactttgtatctttctacatataacaagtacatttgattgctatagtaactgtgattacactgcttttgttataaatgataatattagtacaagtattttcattaggagtttaagataaaatttaggttcatatctgaagaagaattgagagaaaactataacttctttaacaggcacattaaatgtatcctgcagtatgctctcttggttcagtgcctttattcaagatggccctgtgctttgtttatgtcctcctgctgttctcctcactccccagtccactcatccacattctacctatctgtaaatatcaagtcaaatcccatcaagtggtttatttctagcctctaaatcataatacttcctaaacatagagttatcatatgactcagcagttctactccatggtacttactcaagagaaacaaaaacatatgttcattctgaaacttatacacaagtgtttataacaacattattcataatagccgaaagctaaaaacaaccaaatatctgtcagttgatgaatggataaacagaacatatataccatatgtacaatgcagtattattcagccataagaagaaatgaggcacaagtacccatgcatgctacaaactgggtgaaccttgaaaacattatgctaagtgaaagaaaccagtcacaaaatgattccatttgtatgaaatatccagaataggcaaatctatagagatataagataggttagtagttgcttaagggggttgggggactaggggagaagtgagttgtaactaaagggtacaggattttcttttgaagtgatgaaaatgttctaaaattgactttggcaatagttgcacatatctctgaatatattaaaaatcctcgaattgtatactttaatgggtgaattctaaggtatgtgaattatatctcaataaaggctgttatttaaaaactaaattaaaaaaattaatacctctatctgtattcctatgtattgcacctttttttttcttttctttgtgtttttttttttttgttttttttttttttttttgagacagagtctcgctctgtcgccaggctggagtgcagtggcgcaatctcggctcactgcaacctccgcctcccgggttcaagtgattttcctgcctcagcctcttgagtagctggcactacaggcatgcaccaccaggcccagctaatttttgtatttttagtagagatggggtttcaccatgttggtcaggatgatctcgatttcctgacctcacgattttggcctctcaaagtgttgggattacaggtgtgagccagcgcactcggccttgtacattgtgtatacctctaataaagtactcaccgtagtcttgttataattattcacttaagaaatctgtcttttccattgcattatgtagctccacagaacaggcaaagcgttctttggtattccctaacaaccacagtgctttgaacttagtaaataggaatttaattgaacttttccacaattaagttctttcacctataaaatgtaagtaagagaaaaaagaattgcacaaatattgttccaaaattggatttcataatttttatatttaattcttcctttcagtaggaaatggcttaattaaaaatttaaaataaatgaattttaaaaataaaaaatgtgtaatttttacatttaattcctttttggaaaaataaatatctactctcacatcttctcagctcgagtttccattttgtatttagccaggccacacatatgccatttatcaccttatttttacctatagaaatattctggttttcataatttgcgtatataagcattttatacatgttatcagtatcttcatgtcatttcagttagttttttaaaaatcagtttaactttctaacactttgaatctacatttttgtgggtgtttgaatttaacacaatttaatttttcttttttctgttgtgtgtatatgtgtctgtgtgttactctttcagtatttattagagatgaaaagtttaattttacctccagaacacattctgaaacggggtgatagtgaagcaattgcctatgctttctttcatcttcagcactggaaacgaatagaaggtgctcttaatctgttacagtgtacatgggaaggcagtaagtattcttttccaaaagtaacactaatctctctaactattcattgaatt

SEQ ID NO: 2248 - DNA, 2300 bp, Homo sapien
tgggactacaggcacacaccctcacacctggctcattttttttatgttttgtagagatggggtctcactatgttgtccaggttaatctcaaattcccagcctcaagtgatcctcccacctcagcctcccaaagtgttgggattataggcatgagccaccgtgcctggccctatccaattttcttagccaagatttattcaatataaaccttttctgtcacatgaacagtttctgcttgtgtaaagaagttttatctcacttcttagtaaaatatatggtagaagtcaaaccatggcctcatttggtggtaattcttgctaacttaagagtgagcagaaagagataccattttagactgagcataaaacattagtgacatgatagaaaaaatgctgcaccatgattttctcacactttcctataaacgttgtggcatgtagtcagcgggccccaacatgactatacttttggcacctatgtagcatatttgttctgttatttactgaagcaaaaaaataacattcctacagatttgaaaatgctgatttttttgtgatgggttctgtttgtggtcatagtaaaatagttttcaaaaatattataatctggccggtcatggtagcttacacccataatcctagcactttgtgaggccaaggagggcagagcgcttaagcccaggaatttgagaccagcctgggcaacatggcaaaaccttgtccctacaaaaaacataaaaattagctgggcatggtggcacatgcctgtagtcctagctacacgggaggctgaggtgggatgatcacctgagcccagggaggtcaaggtttcagtgagctgtgatcatgccactgtactccagcctggtgacagtgggatcctatctcaaaacattttaaaaaaaggaaataaaaagattaaaatctcttagttgtgcatatgctttgtttattctttaaagtaatacatgtatccactacatttggcagaagactagtctgtcaggtgactttttttttttttttttttttttttgagacagggtctcactctattgcccaggctggagggcagtggtgcaatctcagctcactgcagccttgacctccttgggctcaagagatcctcccacttcaacttcctgagtagctggaactgcaggcatgcaccacctcacccagctaatattttatttttatatttttctgtagagatgaggtctcactgttttgtccaggctggtctagaattcttgggctcaagcgattcttcttgaggatccctcttttgggacttcttggcctcccaaagtgctggaattacagacgtgaaccaccgtgtctggcctggtttctctttttatatcagtgataaaccatggaaatagaaagaaatgaatatcctgatttttaaatggttcaatatgggaatcaacttgaccttaacctttattaataattttgccaaataccagagtagtactttttgcttcagaaagcactttcttataattcttgttaaccacatttagctgaggctctgagatattaagagattaagtgacttgcccacagcacacagctaataaatgactgatttgggagttaaaacatgggcatgctgatgctagtctagtctgttcatccactatgcttattatttgaaaactgtttatgctgcagatagaataaaatgacaatgtaacttaacagagttaaattacttatagattaaaatgcttctttctgtttttaatgctttattacatatgcctagttttgcttaagcttgtctaaattttatgacggaactataaaaaatgtatttcacttttacgtgacatgttattggtgaatcttgtgtttgtatgtttttttctttttgaaaggagagtgcatttaaaatgctgaattgaacaggacatcttgagagaatgttttaatttgagctcatgtatctgctgatcgattctaagtgcaggatattttctgtttgtcatagatatttgaatggtggtacttccataagcatggcacatcttttattgagcaagtatctgtaagccatttgcaaccactgatgggaggaacagagagcagcatttcagaaccaggttctccttcgaggaacagagaaaatgaaaccagcagacagaatttgtcaggtgactacttttctaatgtgttttcagagctgtgtatttaagattgagtttggctctgggagatagaaaactcaaaacagcagagtgctgtggtgtgcatgtttgtgtttcccccaaaattctaatcaccaatgtg

SEQ ID NO: 2249 - DNA, 2300 bp, Homo sapien
ttatcactatttgcaacaaatcaaaatgaggtaattcagcttgctttggagaataaaactaaagcacttataagtcataatttagatagaacttttgcaagtctgtaagaataaaaagataaatatgcttttacaaaggaggttcaaaactactccatatttattttggtaggatacaaaaccactgtctcaaattagagggaaggaaacagcatatgtatttggtatatcagctagagaggcaaaatggctcaaagagaaaagcaacaaacagaaatctccctgagttactgaaatcctggagcagatttttcacttcaaataattatctcataagtactgtgggttttagaaagaaaataaaaatctggccaggtaggatggctcactcccataatctcagagttttgggaggccaaggcaggaggatcactggtagccagaagttcaagaccagcctgggcaaataaaatagacccagtctctacgcaaaatttaaaactcagccagtcgtggtggtgcacgcctgcagtcccagctacttgggaggctgaggccagaggatcgcttaagcagaagagttcaaggctgcagtgatcttgccactacacttcagcctgggtgacaaagggagactctgtctgtctttctctctctcacacacacacacacacacacacacacacacacacacacgaaacgtaaaaaagaaaaatctatagtaatcaactattctcatctaaatgttgcatatggttaacgtagaaaaataaatgacaagtcaatcagtaacactgtgcatagaaaccaccgttaagcacttcattcacctgttacagagatgccaaattagctcttcagtttagcttattttagagtgctagttatatttgaacttgatacctatcctccaaaaaaaccaaaatatttccgaacattaactcacagtctttcatgtcatctctgaacaggaaaggggacatttgctgccttttgcttcagaaaaatcaaccaccatactgaatcatgtaatggaaatacttatatcttgttctgaggttgctgctcagatcttgagtgaaatataatcacatggtaaggggacctgggccctaaacacttcatcctgtctacagctaaagaatagtacagtatatgagaatccatcaggatcatcacttcttacatgtgttcgtattgtcagcacagaatacgtagcaagtgttctacagacgtcgaaagaactagcaaacccactgttgtttgtggcgctctcacttcctgtactattttattactcaagataagcctaaaagaacagacaaaactatcacgaaaacgatttcttaacagaactattttaaaacaagagaatcctcaattaaaatcatgccattttctttctctgaaatctttaaattacagatgtgctcatctttgttgcctggatatgagttctttcagctgggcagcgggagactcaaagtagtgacttttaagggatcctaccagaggtgggggagccaatataaattacgtatcctaatctgagacactcttctgtcctaatacctgaagcttatagcttgtcaggtggcttttccatggaaaaacgaggacataagagagagggcggaccttaagagttctacggaggagccggtaacggcagcaggcttgtcaatcaactgcaaggttgcagcccaaaagaaaaagaactcacttgatcgctcatcatcgactcctcagaggccctctaggactaccgagaatctcttgccctttggctcttgcccccgacatctctcctggccccccgccctgccccaggaggtctggtcctctcacccgctgccaaattctcacacagcctcaaagggatcctcagggcgtaaagcagccccagccccgccacgaaccacaacgaggccccagtccccgccagcccggcccgcagtcgctccctccagcctagcgtcgggtttaggccagggacagatgcaggagacgctccaacagctgcggcttcacccacgccgccacggtccgccatcttgccgctatcgcaggcgccaggagctgggaggggagaaggacaggaaaccgggagtcgggaatcctgggatagtggcggacctgaagttggcctctgtgaaggctgagtcctggggaaccgggaccgagaagatttcgaaggtggaggagcgtgtctcaagattggggctacctgttctttcgtggggcagggaaggggcggacagcagcgcctattctggaggaactggactgagatgtgaccc

SEQ ID NO: 2250 - DNA, 2300 bp, Homo sapien
cacacacacacacacacacacacacacacgaaacgtaaaaaagaaaaatctatagtaatcaactattctcatctaaatgttgcatatggttaacgtagaaaaataaatgacaagtcaatcagtaacactgtgcatagaaaccaccgttaagcacttcattcacctgttacagagatgccaaattagctcttcagtttagcttattttagagtgctagttatatttgaacttgatacctatcctccaaaaaaaccaaaatatttccgaacattaactcacagtctttcatgtcatctctgaacaggaaaggggacatttgctgccttttgcttcagaaaaatcaaccaccatactgaatcatgtaatggaaatacttatatcttgttctgaggttgctgctcagatcttgagtgaaatataatcacatggtaaggggacctgggccctaaacacttcatcctgtctacagctaaagaatagtacagtatatgagaatccatcaggatcatcacttcttacatgtgttcgtattgtcagcacagaatacgtagcaagtgttctacagacgtcgaaagaactagcaaacccactgttgtttgtggcgctctcacttcctgtactattttattactcaagataagcctaaaagaacagacaaaactatcacgaaaacgatttcttaacagaactattttaaaacaagagaatcctcaattaaaatcatgccattttctttctctgaaatctttaaattacagatgtgctcatctttgttgcctggatatgagttctttcagctgggcagcgggagactcaaagtagtgacttttaagggatcctaccagaggtgggggagccaatataaattacgtatcctaatctgagacactcttctgtcctaatacctgaagcttatagcttgtcaggtggcttttccatggaaaaacgaggacataagagagagggcggaccttaagagttctacggaggagccggtaacggcagcaggcttgtcaatcaactgcaaggttgcagcccaaaagaaaaagaactcacttgatcgctcatcatcgactcctcagaggccctctaggactaccgagaatctcttgccctttggctcttgcccccgacatctctcctggccccccgccctgccccaggaggtctggtcctctcacccgctgccaaattctcacacagcctcaaagggatcctcagggcgtaaagcagccccagccccgccacgaaccacaacgaggccccagtccccgccagcccggcccgcagtcgctccctccagcctagcgtcgggtttaggccagggacagatgcaggagacgctccaacagctgcggcttcacccacgccgccacggtccgccatcttgccgctatcgcaggcgccaggagctgggaggggagaaggacaggaaaccgggagtcgggaatcctgggatagtggcggacctgaagttggcctctgtgaaggctgagtcctggggaaccgggaccgagaagatttcgaaggtggaggagcgtgtctcaagattggggctacctgttctttcgtggggcagggaaggggcggacagcagcgcctattctggaggaactggactgagatgtgaccccgaagtgttaccgcttccaaacgaaatgagggtcacctttcacaccgccccccccccggggttggaaaagccaccgatcgttccagctgccgagcagctcttaaagctttggattcggctgtcgtggagataacgggcaccagaaaaacttgtaggagtagcaacagctatttggtcggatggaggccagaagccaagaataatcgaaacacgctgccagcgcccattagatggatgggaaatgagtgtaactcattgggaaagatattagacttcaaatcacctaaggcaaaccctacttcctggggcgcgggcgcgggcgctggcgttaggagacgtcactcccgcgcataactgacatggggccctcttggtcggcgtttccgggcgggtccttccgacggccgccgcggtgattccatcactcggctttcttcccggcctgcctcgcgcccgtagccgggctgggccagaacagcccaagatggccgacttcgatgatcgtgtgtcggatgaggagaaggtaaggggtccgcctctctctcttacctcctcccccgacagggaactggggcccggcccggctgcgttgggagcctagcagtgtccccaggaaaaagaagcttcttggtccatgctgacatacgctctccgcagtcgggacgct

SEQ ID NO: 2251 - DNA, 2300 bp, Homo sapien
aatagtaactatttgccttagaacaatttattatagatcgatttccagcataggcttatacataaatgtttttgtcctaaatcttaaacatgtatgaagatcagtttccaaataagagaaaatctaacgctgttgtcaatggcttgttaaacatttcaaaatggcatgccatatctacatatatcaagttattccgtacagaggacttatggatcataacagtccccttcccatcccaacttcttattgaaaaaaacacccaggtagatttacagagcactcaaggggacacattttctaatagccacagtgggagacaaatgtcataattcttgtccaataagttgccttgtgaggtcattctaagttctacgtgccctaaaaccatgtacttactgaaaagcctgacaaactgttatgaaactgtgcaactgtcagaagaaaagttattccaccttagaatgtgctcttgtatttaagacccttttcaagaaatgagcatacaaaatgcacactgacaaattcaactgatcaaagactccacagtggagcatcaaagaaggcaggatgctttgttcagtcttgaacgtgttaacataaggtttattatgtgttacagaaaacctttctggaggttaagaaaatccatcagctattctagatttgttaacaagaaacaaaattttcaaaaattatcgttaaaagggatgtgtctatagggaaagactggtgttcaaattctgaagcaaatgccctgaggctcacagatttattatagcgaatcagacaggcgacagtacaggagaaaagtagtgcatgtgtagggagatggacaacatttgggacctctccttgtcgaagagtcgtgacagcaaaatcacttcctgaggaaggaggagcaaaagggaagttaagaggccatcctgaccaggaagtgactcgccctaaactaaccccaattatatctacaaatggggggatggggtgagccccaactgctaaaggcggtaaaataactgctttttgatatgtcgcaacataaccaccaccctctcgcaaaattacagaaaaaagtccacagtcacgatccaataaaggaaacgtctgttcccttgcagggaggcccctgggctgtgcctcaggcctgagagaaaaggagagtcgaggaacgaggaactggggccaccgtgaggcagaggaaagccccctaagagggaagcgtcccgactgcggagagcgtatgtcagcatggaccaagaagcttctttttcctggggacactgctaggctcccaacgcagccgggccgggccccagttccctgtcgggggaggaggtaagagagagaggcggaccccttaccttctcctcatccgacacacgatcatcgaagtcggccatcttgggctgttctggcccagcccggctacgggcgcgaggcaggccgggaagaaagccgagtgatggaatcaccgcggcggccgtcggaaggacccgcccggaaacgccgaccaagagggccccatgtcagttatgcgcgggagtgacgtctcctaacgccagcgcccgcgcccgcgccccaggaagtagggtttgccttaggtgatttgaagtctaatatctttcccaatgagttacactcatttcccatccatctaatgggcgctggcagcgtgtttcgattattcttggcttctggcctccatccgaccaaatagctgttgctactcctacaagtttttctggtgcccgttatctccacgacagccgaatccaaagctttaagagctgctcggcagctggaacgatcggtggcttttccaaccccggggggggggcggtgtgaaaggtgaccctcatttcgtttggaagcggtaacacttcggggtcacatctcagtccagttcctccagaataggcgctgctgtccgccccttccctgccccacgaaagaacaggtagccccaatcttgagacacgctcctccaccttcgaaatcttctcggtcccggttccccaggactcagccttcacagaggccaacttcaggtccgccactatcccaggattcccgactcccggtttcctgtccttctcccctcccagctcctggcgcctgcgatagcggcaagatggcggaccgtggcggcgtgggtgaagccgcagctgttggagcgtctcctgcatctgtccctggcctaaacccgacgctaggctggagggagcgactgcgggccgggctggcggggactggggcctcgttgtggttcgtggcggggctggggctgctttacgccctga

SEQ ID NO: 2252 - DNA, 2300 bp, Homo sapien
aggctgaggcaggagaatcgcttgaaccagagaggcagaggttgcagcgagcggagatcgcaccactgcacaccaccccgggtgacagagcgagactccatctcaaaaaaaaaaaaaaaaaaccataacccaagacattaatgttattaattaaaacactgccagtatctaaaggcatcttaattggcattttaaaatatatattttcccaagtttaattaaaggcattctaacctggtatcaaagacaaaaatccaacaacactggtcaatgtgtatcaggtaggcacaataaacttaaaagtttattatttaaattatttgtgaaattttggccggccgcggtggcttacgcctgtaatcccagcactttaagtggcgaagacggatggatcgtttgagcccaagagtttgagaccggcctgggcaacaagacgaaacccactctctacaagaaatacaaaaattagctggacttggtggcgggtgcctgtaatcccagctactcgggaagctgaggcaggagaataatttgaaccagggaggcggaagttgcagtgagccgagcgagactccgtctcaaaaaaaaaaaaaaattgtttagttgtattgtaacaggatttttgcttaattttatttgaatagtaactatttgccttagaacaatttattatagatcgatttccagcataggcttatacataaatgtttttgtcctaaatcttaaacatgtatgaagatcagtttccaaataagagaaaatctaacgctgttgtcaatggcttgttaaacatttcaaaatggcatgccatatctacatatatcaagttattccgtacagaggacttatggatcataacagtccccttcccatcccaacttcttattgaaaaaaacacccaggtagatttacagagcactcaaggggacacattttctaatagccacagtgggagacaaatgtcataattcttgtccaataagttgccttgtgaggtcattctaagttctacgtgccctaaaaccatgtacttactgaaaagcctgacaaactgttatgaaactgtgcaactgtcagaagaaaagttattccaccttagaatgtgctcttgtatttaagacccttttcaagaaatgagcatacaaaatgcacactgacaaattcaactgatcaaagactccacagtggagcatcaaagaaggcaggatgctttgttcagtcttgaacgtgttaacataaggtttattatgtgttacagaaaacctttctggaggttaagaaaatccatcagctattctagatttgttaacaagaaacaaaattttcaaaaattatcgttaaaagggatgtgtctatagggaaagactggtgttcaaattctgaagcaaatgccctgaggctcacagatttattatagcgaatcagacaggcgacagtacaggagaaaagtagtgcatgtgtagggagatggacaacatttgggacctctccttgtcgaagagtcgtgacagcaaaatcacttcctgaggaaggaggagcaaaagggaagttaagaggccatcctgaccaggaagtgactcgccctaaactaaccccaattatatctacaaatggggggatggggtgagccccaactgctaaaggcggtaaaataactgctttttgatatgtcgcaacataaccaccaccctctcgcaaaattacagaaaaaagtccacagtcacgatccaataaaggaaacgtctgttcccttgcagggaggcccctgggctgtgcctcaggcctgagagaaaaggagagtcgaggaacgaggaactggggccaccgtgaggcagaggaaagccccctaagagggaagcgtcccgactgcggagagcgtatgtcagcatggaccaagaagcttctttttcctggggacactgctaggctcccaacgcagccgggccgggccccagttccctgtcgggggaggaggtaagagagagaggcggaccccttaccttctcctcatccgacacacgatcatcgaagtcggccatcttgggctgttctggcccagcccggctacgggcgcgaggcaggccgggaagaaagccgagtgatggaatcaccgcggcggccgtcggaaggacccgcccggaaacgccgaccaagagggccccatgtcagttatgcgcgggagtgacgtctcctaacgccagcgcccgcgcccgcgccccaggaagtagggtttgccttaggtgatttgaagtctaatatctttcccaatgagttacactcatttcccatccatctaatgg

SEQ ID NO: 2253 - DNA, 2300 bp, Homo sapien
gggagacagtgcaagacttcgtttcaaaaaaaaaaaaaaaaagtataaaatatttttcatgtgctctaacaaagccctcatatttcatctatttacaacattttctactgctctactaaataattttgataaacttgtttctcaaaaatgccttaacaccactaccattgtctaaactgaaagcatgtagtttttcttaatactgaaaactttatcttattactgaaagcattgtctaaactgaaagcatgacttctcaattaccatacttttgaaattgtacacaaatattccactagttaggctgaagggaaaaaatatgctagtcacacttttttccagccccccaaaattctctttgcttttatgttttacaaatgttgaatgaaataaaggaaatagacaatgaaaagaacccaaagaagtaattcatctcatatttcaggattcctaattatagtatcttggtcttgctaagcatgtaactaaagagctcaagttcattctcagaaactgtgaactcaaagctacaactaaaagatttatttctaaaagttattacactttcaacttcctgttttatttagacagctcatcatgaccatttcaggtaacaaaacccaacttcctctttataaagtgattaaaaaaacttcagcagttatgagaatagatgatattactagcttttacataaatatttacaaggaaactaagagtccattatcaccaaattttctaaaggttcactgcctttagaaaatgtaacaaagataaaaaacaatattaaaatatacttggcaacaaaaaaagtatgctagaagaggaaactggtcacagatctgctattaaaaaaaacaatactggctgggctcggtggctcacgcctgtaatcccagcactttgggaggccaaggcgggcagatcatgaggtcaggagttcgagaccagcctggccaacatagtgaaaccccgtctctactaaaaatacaaaaaattagccaggcttggtggcgggcgcctgtaatcctagctactcgagaggctgaggcaggagaatcgcttgaaccagagaggcagaggttgcagcgagcggagatcgcaccactgcacaccaccccgggtgacagagcgagactccatctcaaaaaaaaaaaaaaaaaaccataacccaagacattaatgttattaattaaaacactgccagtatctaaaggcatcttaattggcattttaaaatatatattttcccaagtttaattaaaggcattctaacctggtatcaaagacaaaaatccaacaacactggtcaatgtgtatcaggtaggcacaataaacttaaaagtttattatttaaattatttgtgaaattttggccggccgcggtggcttacgcctgtaatcccagcactttaagtggcgaagacggatggatcgtttgagcccaagagtttgagaccggcctgggcaacaagacgaaacccactctctacaagaaatacaaaaattagctggacttggtggcgggtgcctgtaatcccagctactcgggaagctgaggcaggagaataatttgaaccagggaggcggaagttgcagtgagccgagcgagactccgtctcaaaaaaaaaaaaaaattgtttagttgtattgtaacaggatttttgcttaattttatttgaatagtaactatttgccttagaacaatttattatagatcgatttccagcataggcttatacataaatgtttttgtcctaaatcttaaacatgtatgaagatcagtttccaaataagagaaaatctaacgctgttgtcaatggcttgttaaacatttcaaaatggcatgccatatctacatatatcaagttattccgtacagaggacttatggatcataacagtccccttcccatcccaacttcttattgaaaaaaacacccaggtagatttacagagcactcaaggggacacattttctaatagccacagtgggagacaaatgtcataattcttgtccaataagttgccttgtgaggtcattctaagttctacgtgccctaaaaccatgtacttactgaaaagcctgacaaactgttatgaaactgtgcaactgtcagaagaaaagttattccaccttagaatgtgctcttgtatttaagacccttttcaagaaatgagcatacaaaatgcacactgacaaattcaactgatcaaagactccacagtggagcatcaaagaaggcaggatgctttgttcagtcttgaacgtgttaacataaggtttattatgtgttacag

SEQ ID NO: 2254 - DNA, 2300 bp, Homo sapien
ctatagggctgcatttatatcattagagaaacaacatttttaggagtattcaattagaatgttttgtggtttggtggtggtggtctatttgagacaggaattcactctgttgcctaggctggagtgcaaggaaggacatgatcacagctcactgcagccttgagctcccaggctcaagcgatcctcccacctcagcctcccaagtagctgggaccacaggtgcatgccaccatgcccagctaatttttttatttttggtagagatgaggtttctatgttgctgaggctggtctcaaactcctagactgaagtgatccccctgcctcagcctcccaaagtactgggattacaggtgtgagccaccatgcctggccactattgtgttctataccttgaaagaagagacatgatttgttcttgcatttctttgatagtctcattacttctttaagttattagaagttattgagtacccccaaagagtttttgtttatgtgttagatctatcaatgtttacctcactaaaaattaaagctgagaagtgtgggccgggagtggtggctcacacctgtaatcccagcactttgggaggtcgaggcaggtgaaagcttgagctcaggagttcaagaccagcctgagcaacacggtgaaaccctgtctctacaaaaaaaatataaaaatcagctgagttcctgtagtcccagctacttgggaggctgtggtgggaggatcacctcagcccaggaaggttgaggctgcagtgagccaagatcgtgccactgcacttcagcctgggtgacagaatgaaaccctgtctcaaaaagaaagaaagaaagaaaactaagaagtgttaaaactattcgttaattaaaaataatgataacaaacccattacttgttaataagtaacatctttgtgaatatattttccaaatcaaaagaaaaaaatagtgggaagaatggcattagtctgtgtcttcacaaattgtgtattaaaagatggcggactttattgtgatattagttgttttttgcttgtttgtttgtttttttgagatgaagtttcgctcttgttgcccaggctggagcactgtcttggctcactgcaaccaccacctcccaggttcaagtgattctcctgcctcaggctcccgagtagctgggattacaggtgtctgccaccatgcccagctaatttttgtatttttagtagagacagggtttcaccatgttgaccaggcttgtcttgaactcctgacctcacctgcctcggcctcccaaagtgctgggattacagacatgagccactgtacctggcctctgcttcatacctttcattatccctgaaagtgataaagtcatcacacatcatgtagtttctaggaaattacatcatacacacattacagagtgaaagtgaaacaggcaaataactttgtgttagtattattatgaaagtagaaaatagttttgacctcatagtctgtcttaggactgcagctctagatattaaatcctaccctcttccctttaattctgttgtacttaatggtaacaggaagagggagattcatttcattttagacttgaaccacgtggtacaaaatgtgattggctagtttaacatcataagtggcaaataaaggcatatgtgagcttatgtatatgactgatgtgtccaagggcattgttcataccattttaaaccagaaatattttcaaggcatcaaggtttcaagacttgatgatgtcttttgggcgtactgtggtagagtggaaacagcatgggtttttttggtgaagacctaatttcagatcccatctttatcattcaaaagctgtataattctggtcaagttgcttaagaggattctgttttctcatctgcaaaatgggggttatgattataacatagtgtcttccatagagttgttgtgagaatcaaaggagggtagtgggcatgggaacacttggaaaactagaaattgtcatacaaatgttagttaagatggacttactttcaggatcttactgcttacacattaaaaaaaaatctgattttccccttcttccttccttcattagaatgaagcccaaactgccaaggagtttattaaaatcatagagaatgcagaaaatgagtatcaggtaagaagatttggagttaattttcctagatctactatcttattatttcgctgttagcatattttgttaggccttgtgtcctttaatgtaaatatacatgctcttcagttttactaaatgtgggagactttgcagaccttccaagttggcat

SEQ ID NO: 2255 - DNA, 2300 bp, Homo sapien
taaccaagtctgccagagacactccctctcccccttccgcccccttcttaacctcccttagcagaatatttgcttgaattgtatctattttatcaccacaagctgctgaaatcagcctgttgtacgctatggcaaagatttcccagccatctggaaaagggttttttgtgaggcttccctcctatattttggtttgaaatgacactgctgaagacttttttcatctgagcctcagtggttatccctctattgcttgcctagttccagtgcctgttctcttttatagtctaagacttcggtgctggactcatctaggttcatgggatgcttggcaaacttggcatattctcttcaaactcaaagaatgataaatatttgaatgccaacttgtgaatttacaattttctataaaactaccaagtaaaccaaatgctggtgaccattgtctcgtttttcagctacctactatgtgaaaaatcaaaggaagattggtaaatatgaacaaagctggattgtcctgtagtttaagttgagctaacttaaatttcttctttgaacagatagggtatatataaatgcacagagtatatataagctctctgagcacagaaacaaatctcacatctgacggccagaggtcactctcctcaccatcttggttttggtggggtttagccagcttctttactgcagcctgttttatcagcaaggtctttatgacatgtatcttgtgctgacctcctgtcttatcctgtgacttagaatgcctaacctcctgggaatgcagtccaataggtctcagtctcattttacccagtccctgttgaagatggagttgctctgattcaaagagctctgacaataacaattagaaccccatgtgaagtagatttttctggatgaaattgtttagagaagttccattgtaaacaaagccacatagcatcacactttttacccaaggttttactatactgcagacttttgtgtacgttttgagaacatccaagacataaacctgaccagagaagaagggagattgtatccaagaataatagggatttagatttgctggtcagaatggagccagacattcagtttgagtacggttgatggtacgtttttgagatggtaagtaacaaggcaatttttaagagttcaccctctctattcttctggaacctcatcaggacattgagggagaaaaaaggtaaaatctttggctgcttttctagttttttcttctactttgcataataagtttgtaagatgttttcctctgccctattttacccatccccgtagctttggttcccactgacattgcatttcctgttgctaaagcctgttattcctggcttcatttggttgttggcctgagagaaggtaccgggtagcccagctggagtatgacctgggttctggactttcttcaattccgtagattgagtgtgtggcctcctgctggtagctactatggagaacaacactagctttgatttatttgaaagtgatgtatttgatttaaaactttgtagtgtaacttagcttgtcccattctagtgtgtgtgtcatttcattctgcgggaaaaaaatagatacaaaggtttgttattgtagccccacccccttaaatttgtctatacagtcttctgaagcacactgcccttttagttctcttcttggtactgatgctgtcactattaaccacttattattgcctaacacaacagtcccttacgctcaagatgctagtattttgatgaatataagggtccaccttatataccagtaaaaattaaagagcaatacagactggaatgcaacgaagcgcccaaatatgtggctcaggggtaagggtcggtcaccagcctttccacataagccgatgtggcagagaaaagcaattactgtgtatcctggcagagccccttgtccctccctcccacacgtacacacctttatctcagagacactgggttcttttccccaaacttctttgacccttatgccaactacgtgcgtctgaaagcccgagaagggaaaatgggggagggggcgtgtcgccccgagtttacgtccctggaaggctgggggaggcgctggatgagcttccccattccggccgcagccgacctagatcccagccctgccctttgctctcctgcttttcactgagtcccgaggctctggagggtgggcgtgagggtagccctggctgaggctcggaggtcctcccgggctgttcagagggccccaagcggtagccacgttctgatactggctagaagccaggggag

SEQ ID NO: 2256 - DNA, 2300 bp, Homo sapien
tgggggacaatgagcatttttgttacaatttcatggagtgatgagtgctgtgaagaactaaacaggtcaggtgtaagtggctcatgcctgtaatctcagcactttgggaggccgaggcaggtggatcatttaagcccaagagttcaagaccagcctggggcaacatagtgagattctgtctctacaaaaaaaaattttaattagccaagtgtggtggcacatgtctgtagtcccagctacttgtgaggcagaggtgggagaatttcttgagcccaggaggttgaggacacagtgagtgagcccagatcatgccactgcactccagcatgggtgacagagcaagatcttgtctctaaaaaagatgaacagaactatactgaaactaaagcagggttagggaatgggttggtgctgctttgcagaaggccagttagtcctggcctgtttgaggtagtgatgtttgaacagagaaggacatttgaatgaggtgagggtgggagtcatgagaggattggaggagaatgttctggccataagagccaccatgcaaatgcaagtcgggtgaggtgggggcaggggcatccaaggaagcaggagccaaggcttccttcttcagggcctctgactctcatccacttctgtatccctctagtcttctctgctttttgacgctagttccagagcttcaggtgggagaaggtggatactcctgggcataggggttgtctggcccatcctgttcctgcccccactcacccctcccaaccatcatttccagggcccagctggagacagccctgaagtggaggaactatgaggtgaagctgcggctgctgctgcacctggaggaactgcagatggagcatgatatccggcactatgacctggagtcggtgcccatgacctgggaccctgtggaccagaaccccaggctgctcacgctggaggtcagggctcagattgagtgtgaggagggtgggctcaagccagccaagctagaggctgtgggcagaactattcctgacagcagggcagaacaagaggaaagttgaagtggttcccagggctccgcaagaagcagggtgggcatcctgtgcccaaagatgtgttggagcagggaaatggggaagatctgggttctagtccaggctttgctaccaccttgggtaagtccctggctttctctaagccttagttcccttatctgaaaagcacagagctggactggataattcttagagctctttctggctcttggattttcaatgtgtgcatataagcccaaaattacacacgagaatggatttctacacacaattgcaggtgggaattagagggtgagtttgttcaaggaaagattactgcaggaagtgagttttgaacaagttttttgttgttgttgtttttgttttgagacagggtctcaccctggtgctcaggctggagtgcaatggcatgatcttggctcgctttaatccccgccgcccgggctcaagtgatcctcccaagtagctgggaccacagacatgccccactacgcctggctaatttttgtattttttgtagagatggggttttgccacattggccaggctggtctcgcaacacctggactcaagtgatccgcctgcctcagtctcccaaagtgctgggattacaggcgtgagccaccatgcctggtccgtttttttttttttttttttttaattatttttttagcaacccgattaactgatgaacaggatttttataggcagagcaggaactgagctggccaagagggcagctgcactggaggctccgggttcctgggctcggcatctctgggcagcttcggaggatttgtcttcttcctcttcccctgactcctgctggtatgaaaggaaagaggggtgcagggatagcataactccctgagtcttaggttagaaggccagtctcagtccttgtcccttaaaggtctggggaacctgggggctgggccctccagcgtccatccctgggacagaagcttgcttgtgttcacaccccataggttcctggagtgactgagagccgcccctcagtgctacggggcgaccacctgtttgcccttttgtcctcggagacacaccaggaggaccccatcacatataagggctttgtgcacaaggtggaattggaccgtgtcaagctgagcttttccatgaggtgggtgttgggggaaccctgagctgctggaagggtctacagacttctgaccccaggggaggaggagtgtttctccctgagataaatgagaccccggggcagagcaggag

SEQ ID NO: 2257 - DNA, 2300 bp, Homo sapien
tggagacagccctgaagtggaggaactatgaggtgaagctgcggctgctgctgcacctggaggaactgcagatggagcatgatatccggcactatgacctggagtcggtgcccatgacctgggaccctgtggaccagaaccccaggctgctcacgctggaggtcagggctcagattgagtgtgaggagggtgggctcaagccagccaagctagaggctgtgggcagaactattcctgacagcagggcagaacaagaggaaagttgaagtggttcccagggctccgcaagaagcagggtgggcatcctgtgcccaaagatgtgttggagcagggaaatggggaagatctgggttctagtccaggctttgctaccaccttgggtaagtccctggctttctctaagccttagttcccttatctgaaaagcacagagctggactggataattcttagagctctttctggctcttggattttcaatgtgtgcatataagcccaaaattacacacgagaatggatttctacacacaattgcaggtgggaattagagggtgagtttgttcaaggaaagattactgcaggaagtgagttttgaacaagttttttgttgttgttgtttttgttttgagacagggtctcaccctggtgctcaggctggagtgcaatggcatgatcttggctcgctttaatccccgccgcccgggctcaagtgatcctcccaagtagctgggaccacagacatgccccactacgcctggctaatttttgtattttttgtagagatggggttttgccacattggccaggctggtctcgcaacacctggactcaagtgatccgcctgcctcagtctcccaaagtgctgggattacaggcgtgagccaccatgcctggtccgtttttttttttttttttttttaattatttttttagcaacccgattaactgatgaacaggatttttataggcagagcaggaactgagctggccaagagggcagctgcactggaggctccgggttcctgggctcggcatctctgggcagcttcggaggatttgtcttcttcctcttcccctgactcctgctggtatgaaaggaaagaggggtgcagggatagcataactccctgagtcttaggttagaaggccagtctcagtccttgtcccttaaaggtctggggaacctgggggctgggccctccagcgtccatccctgggacagaagcttgcttgtgttcacaccccataggttcctggagtgactgagagccgcccctcagtgctacggggcgaccacctgtttgcccttttgtcctcggagacacaccaggaggaccccatcacatataagggctttgtgcacaaggtggaattggaccgtgtcaagctgagcttttccatgaggtgggtgttgggggaaccctgagctgctggaagggtctacagacttctgaccccaggggaggaggagtgtttctccctgagataaatgagaccccggggcagagcaggagacttttcctcaggggtaccctgagatgctacggcagcttcctcttctagagaacttgcatagaggtcttggaaagaggggttgggacactggttggtggagaaagttctggccctttattgcccacctcccctgccccaacaaactcttaccacctctctctgcccaaagcctcctgagccgctttgtggatgggctgaccttcaaggtgaactttaccttcaaccgccagccgctgcgagtccagcaccgtgccctggagctgacagggcgctggctgctgtggcccatgctctttcctgtggcacctcgggacgtcccgctgctgccctcagatgtgaaactcaagtgagactgtgggcagggagcttctggagccacttggagtgtgggcacagggggtggagtcagggaggcctctgggtcactggatgacttcaagttcacattcctggtccctctgccaggctgtacgaccggagtctggagtcaaacccagagcagctgcaggccatgaggcacattgttacgggcaccacccgtccagccccctacatcatctttgggcctccaggcaccggcaagactgtcacgttagtggaggcaattaagcaggtggggtctgagcacaaacctggggcctgcactctgattcccccagcaccaagcagttgtccccagattctagttccttcccactcccgaaatgctcctgcttctaagcagccatcagaaagagaggtaggggccgggtgcagtggctcatgcctgtaatctcagcacttgg

SEQ ID NO: 2258 - DNA, 2300 bp, Homo sapien
gtttgtcaaaatggaaagtgcaccatctaccttccaggcatctgggtaccgaaggagataattcctgccaaaatgcccgacagagtgcctggcacctaggggctctataactattcttcctttacccacctaccacctggtagctggttctgctactctggtcctagagagggactcctcatttgtgactggacaggtatgacttgtgctgagggacagtctgttctagattggaccttagagattattaaactgtaaatgcatcaaaatcctggtaaccaatgaagtctgactcgaaaccctgatgtgtgaagtagatagaagcttgctccctggacgtcccgcatccctgagcagctctctagctacctggagtccccaggttggcaagtggattagattgaaactcatgttttccagctcccaagtggggtcatcatctacctcccaccactgtattctaacccatcgagggagacctgtccctgacccagagattaggaatttcaagctctgttgtcgcacaattggtgttttgccagaacatgcctgagcaagccccctgtccctttgctagatgcctcggtttccagggaggtttgggggccctagagaagtgtttttggacttaatggcttttcctcaaatccccaatacgtctttcctggcagccccaccatggctgcaatccgaaagaagctggtgatcgttggggatggtgcctgtgggaagacctgcctcctcatcgtcttcagcaaggatcagtttccggaggtctacgtccctactgtctttgagaactatattgcggacattgaggtggacggcaagcaggtgaaggcagaaatgcccttcccaccccaccctgagaccccgccccccagtcactgaatgacctagtatgtccttccccattcctacccctgtctttgcttcattctccctgctggaaccagtaaaagttaggaagtaaatctgcagtcttaaaaaacctggatatactttctggttctcccacagactggctctgtaacctgggccgagtccctttgcctctgggtttaagctcccccacctgcaaaatggggatgatggtaagacctccctcaaagggttgttgtgagaattaaccaaaataatggtgctcacagtggcaactcaagggtcaaacacgtcttagatttctttaacaaactgacctaatttatgttgtgggacagtgattaatataatgcctggtgcatagcaggtgctcaaataaagaagttcagtgagcccgaaggacagtggtttcaggggacctttgggtggcagggttggggccctcaggccagctactcactggccctgtgtgtcaggtggagctggctctgtgggacacagcagggcaggaagactatgatcgactgcggcctctctcctacccggacactgatgtcatcctcatgtgcttctccatcgacagccctgacagcctgggtgaggggattggagggaggggactgagaaccccttggaatcagccagaggtctcgtgccttggcctgtcttcagtcatcttcagaggtgggggtggggatgcaggggagcactcaggccctgttggtctcctttactgtggtaactggccctctgagggcatactactgttgaggttttgagctgtgaaagggaccatcatgctgaatggcttctaagactgctctgggaagatgagggcccccccaggggagctttctagcttaagtggaggcaccgacacctgttggtgcatgtctacacagaaaacattcctgagaagtggaccccagaggtgaagcacttctgccccaacgtgcccatcatcctggtggggaataagaaggacctgaggcaagacgagcacaccaggagagagctggccaagatgaagcaggtgggtacggctgccaggctggagcccctggggaagaatgcaccctctgaggggttgcagacgggcaaagggaacttctctccagctactgccgtgtgttaggggaaacagtaatatctcctggtgagggaggacccatagggttgtgtctgatgaggtatcagaatgaagtgacttgtccaaagtcacttggcatttttatttattccagttaattgtccattccgttcagaattgggactattaagatgattaagaaaatctgccctcggggagacagcttatgtttcacttgggatacccaggctgtgccatcagagtgcccctgggggaggtgtagggatgtggatgcgggaatgagggcaggcattgtgtaagtggctgg

SEQ ID NO: 2259 - DNA, 2300 bp, Homo sapien
tgctaagcccaggagtttaagaccaccctgggcaatagtgagaccccatctctacaaaaaaataaaaaattagctgaatgtagtggtgagtgcctgtgggaagcagttaagcatccaaggaaattaagagtattgcttatagtagaaaagaataaagatctcaaatcagtgatctgtttccaccttaagaggctagaaaaagaacagcaaattaaacccaaagtaagttaagggaagcaaaaataaagatgagcaaaataattagaaaaggcccctcaccagcctgggcaatatagcaagacctcatctgtacaaaaaatacaaaaattaggtgtgatggtacacgcctgtagtctcagctgctggggaagctgaagtgggaaaatcattggagcctggaaagttgaggctgcagtgagctgagatcttgccactgcacacttaggcaacagagaccttgtctcaaaaaaaaattaaaattaaaaaaatctacacatcaccttatcttgagaacttcacctgttgttcaggactgggtatcgcacagcccacacatgcccacactacagcaatgacctccggtattgtaactgtctacattaggagtcagtagggagtaggaattaagaacaggggctctagagttcagctgtttgggttctagtgtcagacccagcactagctctgtaacctctctgaacctcaatttgcttctcagtaaaatggagatagctacctcatgggattcttgtagttaatgtatgtggacccaggtccatgtaatatggattcaataaatgttagctatcttgaaattgcattcctcatttagactctaagttgtttgaaggcagaaatggatcttccgaacatagctctcagttcaccctcgagaaatgttcattgagtcagttaagaggcctggggccaaactgctgcggacctgttttcacatttgtcaaatgtctggattgcacttcagatatttaaagtctgtatgactcctaacattcattcattcatcaaatatttgttgacaacctattatgtgccactcactctgctagacaacgggggaagggacaggctggaggagcccgtgaggtagcagggccagaccaccagtttggagccagacaggcccggctgtgtgaattcttgctgtcacaagtcaaaaacagttgtgtaagccacttgatttctctgaacctcagcttctctatgggcaaaaggggatgggtatattttccccagagatctgtgatgaatattgaaagggttaagctgtgtagtgtcccaagcacaagccaatgaaatgttggtggacgtcctcattctactcccacctcctcagctcccttacagggaaaggagatacgcgtgtaggtaaatatcctatgcgccaagtcagacctaggagtgggaacagaattcacagctgggatccagaagcatttctaggcgcaccctttgaggagtaggtaggaattggactcctggaaattccaggcccagggaagaaagcgaattgtgaggaggaacggtggtctgggtctgaacggctctgagaggtcttcaagtttgggggatgacgttgggctgtacgatcctaggaacaagagggtggacatctccccccaaccaacacacccgcgccgggccctgggacctcccggcggataccctttcccagtcccgcttcccgcgaggtcccaggtgcagcaggagcgggtggccgcttggccacaggagggcagcagcggcccttcctgaccccaccccgagcacctcttaactttcccgacgccggtcctcccctaggggattgaaggctgggcagagtctgagtccacccgggtcgtgctccccccgctcgcccggctcctccgcagtccaggaatctccccgtggctctccccgacctggaggggtggacgcccctggcccccagtccccggcctgcggagggggccggtggctgcggccctgcgcggggccggggcgggccgagccaagggccgcccccggccgaccctccccctgccgggcccgccctccccgccgcggcgctggaggagggcggggcggggccctggggtcagtctgagcctccggcaccggccgcgcagctggaggcggcggagcggaaggtaccctgggccggggctgcgggcggtggggcgtcttgggaactcgtccccaggagagcactttcccttcctcgctggcccggagatcggggcccgtgcgaggaggggcttcggcctgggcgtggaccccgttccctccaagcggagtcg

SEQ ID NO: 2260 - DNA, 2300 bp, Homo sapien
gttctggggcagtctgaggatggaggaggcataatggtgccaggaataggaggtgagaggttcagggaggaggagccttaggattaggccatggctgggggctgttctggagccccagggagctgttattctccctgctgatcatctggtgctggggctgggggggtctcttggcttagctttgcggacagcttgcagccacaccatggtgggtgctagaaagggcagggaatagggagctgggtgacacgaagaagtggtaagtaaactgtcccagaaacactgaataataaaaacaaccaggagttatatttgtttcttcagttgctggcttgctgctgctgttatttatctgagagttggttccagtttttctcaaatagcaggggaaaacctatagaagcagcctgttctttgtccccgtcttcttttgctgctctatttgccttggggtctgttttttttctctcctgtgacttcttttcctctgtctctctctgcctaaagctcaggtgtaacaaagcaggcatagtaagtctaccaacctgaaggaccactgtgggatctttatttggaagctgccaagaaagtcatcccttctggggacacagtttagcctggggaacaaagtggtatgtggtcaggaagcacctggccgacagagcccagaaaagttccagccgtgaactgggtgccgtagtccctgatggctacttccaacttgcttgagggccacaacggcgttgtccccatttgagatgtgtggatgggtggtgtctgtggatacctagcgatcaactttctgataggaggtttagagacagagctcttgtggcatcaggtcagtaccaccctctcccagaggggagaagttaggaagaacgggcagccaaccaggcattgggctctgtcctggtcttccagtgagtgtgcttttactcttcttaggcaagggcttagcctggcctctgtctccccctggcggtagacacagaacttgctcagcattcccggactgctctcagccctggccctaagagaaggatgggaggggaggaacccccactcctctctctgccattgatctcctttctagcccttcctccctgatccggagaagtaagcttggttcttaagacagagcaggtttgaatgtcaggaggccgacataggtgtgaatctttcacttgaccgtgtgacctcctggggcaagtcacggtaaaatgacaggaagcgtcccgtcctgcctcatccgtgaaactgacagaaaaaaaaccatcttgaaggattggtgtgcagtataaataacctaatactgtatggaacgtgctttgtaaagggtctagtatgcagtacttcttcaataaatagtatttgttatgttgttattatcctattaatagcttgtcctgctgtggtcagggaaggtctgcattgtgggaaagacctgggttctgagagagaaaggagggtgggagtagcaaccgctctcccagatctagaggtggtcttcacggggaacagcgcatcaggagcccaggaatctaccccggctcctgattccggggtggtcggctgcagcctgcgtcattaatcccgcaaccccacccggtaccagcttgcccgctctcgctccagcagccccatccagaggtggtgtcacacctggcgcctcatacccagcggctcccaagcgcctgttttgctctgaggtcattagctccatggctctctgggctggctggccacaccgaaccgagagcgaggagaccgcacccccttgtccctcagcccccgtcacaatggagacattctagctgtgtctaatctagcgcacggctgaaataaggtttccttctctccgcccccttcccacagcaacagaacctacccctaagaaacggaggcggggccaagccggaatggggcggggcagaggccggggacccgtgggccggttcctggggtggcccagagcaagggcaagtttcgcccgggacccgcccagctggccgggagccagtagcagggaagggccggctggcgcgagcaccgcccacgcggagccatgggggcggggcctgggcgggggcggggccgcggccgagggcggggcagggaggcagcatgctaaaccgggtgcgctcggccgtggcgcacctggtgagctccgggggcgctccgcctccgcgccccaaatccccggacctgcccaacgccgcctcggcgccgcccgccgccgctccagaagcgcccaggagccctcccgcgaaggctgggagcgggagcgcgacgcccgc

SEQ ID NO: 2261 - DNA, 2300 bp, Homo sapien
gctctgtccaatacagcagtccctatcttcgtgtggctattgagcatttgaaatatggtgcctactaatgaggaactgaattttaagttttatttaattaatttagatttaaatttaaatatcaacatgccactagtggctaccgtattggacaatgcagttctgcaatcttcaaagctcaaaaaccctgagggtctagtcaatcactcctcactcccagctcctttccccccagcacctccacctcccctgagccagggcactgggggccacaagaccttcagggttttgagggacctcctctgagttgccaccacggaggtgtccatcctcactgaacctgcgggtgccggatgtcctctctcccttcctcttgccctcggccgccaggggccgctgcgtctcggctgtgcccatccgttcagccgagcgcctggcactgtcccgaaggaggcggcggcgcccacgcggggctggaggagcgggggtagcccggggcgaggcggcggttgcggcggcggctgcgcgctccccggcctgccggcaggaaccttggaaaaaacccggctgagttctgcagagctggcggggccgggcccagagctcccctgtgcccagagcccggcccgccctgcggatgatgccaacctgaccagaaccccgctgtcccgggggcgcagcaacttggtgaaggggacagggctccggactagacagcacccaagctggccgctccctcccaaagtctgtctttcggagtgctggtccctggctcagtggcaaggaagacttcaggccagcagatcgaaccagtgggcatcaccgtggaccaggtaggtcccaggtgtgggggctcagaatgtggaggaatgagtaggcgttaggggggtttgtggggagagaaggtgaagaaaggttgaagattcttgtggttcacatcctcaaacccttgtaatgcaggctgctaactcagcctcactaaacccctggattgggatttaggaaaaataggctaggaaattgaggcaggagcatggaagtcgaaaaacacatcccagaagcttctatgtccagctgtttcagggagggagggaatagaatgccagggatgagagcccaaatgaacacccccacccctctgctccccaccccaccaaggtcttttgggccttggggttcctaggagagatgcctgagttggattggaggatgttgcagctcagagggaaataggatcacctgagagaagacaaagctgcatttgtgatggtcaaaaggagggttcctggagggcagggagaagagatctctactcaggaaagaggcacatctagaagagtgggaagctcagcccagggagcacacccatcccctgggaactggcacctcttctctgtgttcctccagattccccttatgctctcgctcctaggagctaggactcaggggtctctgtccttccggggccccaccatcctatatgtttcagttctgcctccctttagagaggtgagggaagagaggttcttagggagaaatggaaagctattggaggctgtggccttcaaaggctcagggacctggagtgtccccattccagccctctggtgtgggaatgggggcaagggatgctaagccaagccagctccatgtgagtccaggaagcaggtgccatagtgggtaggaggtggaagcaaagaggatcagggcctcaggtatctcccacgtgcctcttccagcaggaatctgtcaggttctgctccttccttgaccctcagctccctcccaaggccagagagatgacagctgtgattcttagacccctccctaccatcaccctgcttcactcttgggatagagaaactccctcaggccacccttctcaggctcaccaccctgtgtgatcccagagtctgcaagagcccctccagattcccaggccagaagagactgtccctgccctggcacctgagaacagcttcagaattgggctgaacttcagtgcccagcccacccccttgccctctcccaggttctccttcaccccctgcagagccatcggctccctctatcctttgcaaccccctatgaatctttcctacttgtccaggtggagtgagtctgaggacagcagatgaacagacagaaactgaaagatccccaaaaaggtaagtggggagacattgaagatggggagtagcgggggtggacagagatcaagtaccctatctgaggagcaactgggtcctagcagttggtttggcctctggtattcccaaagctgcactggcacttgtggg

SEQ ID NO: 2262 - DNA, 2300 bp, Homo sapien
aatgtctccatagcttccagtgtgaatcgcattcagaattacaatcagatagaaaggcactcaggcccttctcatttaaaacaaacaaaagcatgagggataggagggcacagagaataaaaaacagcaagagaaaaacgccctagggcaaacttcatcttttttttttttttttttgagttggagtctcggctctatcgctcaggctggagtgcagtggtgcaatcttggctcaatacaacctctgcctcccaagttcaagcgattcccctgtctcagcctctcgagtagctgagattacaggagcacgccaccatgcccagctaattttatttttttattttttattttttttgcattttagtaaagatggggtttcaccatgttgcccaggctggtctcgaactcctgagctcaggcaatccacctgcctcagcctcccaaagtgctaggattataagcatgagtcaccgtgcccggctgaactttctcatattatgtatatacatatagtcgggccgggcgcggtggctcacgcctgtaatcccagcactttgggaggtcgaggcgggtggatcacaaggtcaggagcacaagaccagcatggccaacatggtgaaaccctgtctctactaaaagtacaaaaaaattaaccaggcgtggtggcacatgcttgtaatcccagctactcgggaggctgaggcagaattgcttgaacccgggaggcggaggttgcagtgagccgagattgtgccactacactccagcctgggtgacagagcgagactccatctcaaaaaaaaaaacacaaaaaatgatgtatatacatatagtcagtgcaccagaatatgaatgaatgctggtcatatttacagtgtatgaagcccttttacatacaatttatcatctaatccacacaaaccttggggaagtggatataaataaaaacaatgactcttttgtgtgggtggaaggagtgtaggagctggataaagcttctggcttggaaaaccaccccctgcacatccaagtcttcccctgttgtgcttatcttgtgcttatcatgtgacgtaatcctaacttcttcatgacttatggccacttcctcctgggacccagctggagtgagcaagtgagtaaaatgcaagctcttttaattcttgagacagcaaagcatattaaggaaggaaatacacaagtgagaaaaatcacattgtgaatttcaaagccgagggacaaaactgcagaactgcgggagccagtgataggtttggccattatttaccctcaggatcacccaggactcagcctcttctgtttcctgaacttccatccagtacagccttcagctgtagccactaagctgtaatgcaattgctttacaagacactgtctggcactgtcttttctgacagtggggaagatgccctggcaggatgacggctcagctaaggagtcagggttatgggtattttcttactttttatcttggaatttcagattttaaaaaaaagtttgatagtatagagagttcctgtatacttttcacccagcttcctctgcagttaatcttttttttttttttttttttttttttgagacggagtctcactcagtcgcccaggctgcagtgcagtgctgcgatctcggctcaccgcaagctccgcctcccgggttcacaccattctcctgcctcagcctcccgagtagctgggactacaggtgcccaccaccacgcccagctaattttttttcgtatttttagtagagacagggtttcactgtgttagccaggatggtcttgatctcctgacctcgtgatccgcccatctcggcctcccaaagtgctgggattacaggcatgagccaccgcccccggcctcctctgctgttaatcttatataaacgtggtacatttgtcaatttaccattggtacaatactaaatttcactcgccgtgtgaagagaccaccaaacaggttctgtgtgagcaacaaggctgtttatttcacctgggtgcaggtgggctgagtccaaaaagagtcagtgaatggagataggggtggggccgttttataggatttgggtaggtagtgggaaattacagtcaaaggggattgttctctgttaggcaggagtgggggtcacaaggtgctcagtgggggagcttttgagccaggatgagccaggagaaggaatttcacaaggtaatgtcatcagttaaggcaggcacgcgccattttcacttcttttgtgattcttcagttacttcaggccatctggatgcatacatgcaggtc

SEQ ID NO: 2263 - DNA, 2300 bp, Homo sapien
gactgtctaaggacacaagattagaagttagtataatacatgttacactgtttacatttagcaaactttacttttgttgaaaaccttgtaagtttgggatttcaattattctttgctattaataagaccttgtttagtccaaattaacttataattggtatagatggcttttttctttttttttccttcaattacctgggaggaaccatctattgtcctatcctacagggagttcctactaggtctggtcaaccttggtatggtaattaagatttagatcccgttaggaaacctgctgggttaagggaattttcagtggttaatgtctctgtctctttcctttctctctctctgctggtctttccttgcctctgccagctgcttatgctgctgttctctcaaccactgtggggggcatctaaaaccagctgtaaccaagtgtctatgtacaggaactggtctgggtgccctggcttaccttgtgccatacctttgaaacaaaggacctgtccaggcttccttctgatggccaacccacctctaatgctggccagtctatttcacacaaagttctaagttttcctggtgtcatagtaacactgtaatctcccttaaatcctttcttgaaattgttcagcatagttcctagtggggtgggcttagtttgtgcctgatccatgcttcctcgagacaaaacaccacactcacaccactcgcaccccacaaaacaaagaacaagtaaaaagggcacacacacacttttacagtttacaccaaaccagaatcaaaaccaaaatcagagtatcaggaaatccaagccaggccaaaaccaaaaccaaagtatcaagtaatccaagtcaagtaaaaaacaaaaaccaaagtgctggtagaggcacgccatgggtgatcaggccacgcttccactcaaatggagtgcacaagttccaaagaccagtcttagcaagtttcagatgtccagactccaagtgccagttccttcccggtgttcatccactgtgttgatcctctgcaggggcctgccacacgctgctctggcgaggcatcccactggggcaattgcctacccgggagtgctgtttggatctgcgtcactcaggctggtcggagtaccccgtagggatgctccacaagacaggcctaagtcacctaaggggctgcctcgaccgtctgccaatcaccttgcttccccatcagggaaccaagaaatgtagcaggacaagccacagacaaaactcctcagacaccaggttaaagaaggaaagagctttattcagccaggaacttcagcaggcttgcttctcaaaagttgaacttcctgagagagcaattcctgtcccttctaagggcttacacatctaagggggtctgcatgagagggttgtgatcaatcaagcaagcagtgggtacgtgactgggggtgcagcaccgataatcagaatggaacaggacagggattttcacaatgcttttccatacaatgtctggaatctgtagataagataaccggttaagtcaggggtcgatctttaactaccaggcctagggcacggcaccgggctgtctgcctgtggatttcatttctgccttttagtttttacttctttctttggaggcagaaattgggcataaaacaatatgagggatggtctcctcccttactgtctttcaggagatccaagaactctcttggggtctggattgggacctctttcagtaacagtattctaggattgattctggaacttaaaaaggatgttaggggaaaagctgatccatggtttagtgtcaggcctctgagcccaagccatcatatcccctgtgacctgcatgtatgcatccaggtggcctgaagtaactgaagaatcacaaaagaagtgaaaatggcctgttcctgccttaactgatgacattaccttgtgaaattccttctcctagctcatcctggctcaaaagctcccccactgagcaccttgtgacccccgcccctgcctaccagagaacaacctcctttgactgtaatttcccactacctacccaaatcctataaaacggccccacccctatctccctttgctgactctcctttcggactcagcccacctgcacccaggtgaaataagcagccttgttgctcacacaaaacctgtttggtggtctcttcacagcaacgcgaatgaaatttggtgccatcactcggatcaggggacctcccttgggagatcaatcccctgtcctcctgctctttgctccatgagaaagatccacctacgatctctgct

SEQ ID NO: 2264 - DNA, 2300 bp, Homo sapien
cttttaatgaaaaacagcccccagataattttcttttgtaacaaagaacatcctgtaaaatcaagctgcaaacatagacaagcaagctggaagcttgcaggggtgaacgccagcagttgtggcaataggaaaaggctacacctgggactacgcatgttcaaaatggcggctccatcttcccttctctttgctagccgcgtgtgtagtaaggagcaggcaacatggtgccagccaggcaaagattctatttgcataataagattagggtggagaagccagcttacctggcgtgttatgtaaacgtcacacctggtccaaccaatctttggaccctatgtaaatcagacactgccttcttaagcctgcctataaaatcgggtgcactctgccccaggctggaattcccattcgagcgccccactctctcatgagagaccttttctcccttttttgcctatgaaatctcctctcctaaactcgctccttgcgtgtatccatgtccttaatcttcttggcactagacgaggaacctcaggtatttaccccagaaaacgacgctgcttcagtagcagaattgctgcatcatatggtaattctttctttttgaggaaccacaaaactgttttccacagtagctgccctattttacatccccatcagcaaagtatgaagtttgaatttctccacattctcaccaatacttttttccttaaaaaaaatttttttgtagccatactagtgtaaccgaaatgtgggtaagttgctcccacatgctaaaaaaaaaaaaaagccgggcgtggtggcgggcgcctgtcgtcccagctactcgggaagctgagacaggagaatggcatgaacccgggggctgaacttgcagtgagccgagattgcgacactgcactccagcctgggcgacggaatgagactccatctcaaaaaaaaaaaaaaaaaaaaaaaaaaaaagattatctgtatattctcttctaagagttttacagtttagctctttgttattgatgaattttaagtcaatttcatgcaaattcattcttctgcatatggatacccaattgtcccaccaccattttttatttttatctgtttaattattttatttattttgagatagagtcgcccaggctggagagcaatggcatgatcttggctcactgcaacgtctgcctcccaagttcaagcaattcttcctgcctcagtctcctgagtagctgagattacaggtgtctaccaccacgccaggctaatttttgtatttttagtagagacgggatttcaccatgttggccaggctggtctcgaactcctgacctcatgatccgcccacctcggactcctaaagtactgggattacaggcgtgagccactgcgctcggcctatttttttattttttgagacagagtctcgctctgtcacccaggctggagtgcagtggcatgatctcagctccctgcaacctctgcctcccaggttcaagtgattctccctcctcaggctcttgagtagctggtaccataggcgagtgccaccacacccttctaatttttgtatttttagtagaggggggtttcgctatgttggccaggctggtcttgaattcctgacctcaggtgatccacctgcctcggcctcccaaagtgctgggattacagacatgggacaccgcgcccagcctcatcctccagtctctacccttcttcaatctcttgtgagaattgaggggaagggtaagtgagggggtgagtcctggaagggaggaagacagtgagagaagggcagggtcctggcaagcagtaagtgctcaacagatgttggttaatttgcgcctgactcagtctctcccataaacttgaaagctctttgaaggcaggggccttgcctcatactttttcagtatttctcaaaagtcctggacatcagagaccaccccatggttatttgatcacttcaacacacacgttggttatgcggtcacagcggctattatgataaaaacaggctctggagtgtgacttcaaatgctggccgctgacgagctgggctgtctggaaaattacttcacctctctgagcctcgggtgccttatttacaaaatgttcatggcagggcccacttcacagggctgtgaggattacagaggataatctgggtgaggcgcatcagccccagcgccgcctgccacaattctatccggccccacatatgcatcgtccataagcgtccggcccctgcattctcgcttttccacgtggccgaggtgcacaccccaacccactgggccagt

SEQ ID NO: 2265 - DNA, 2300 bp, Homo sapien
ttattaacaaatgtaagaatggtttgctatgaggtcagggaggaagttctttgaatattacttttgctagcactatttattgaataatttctctctattaatttaaaatgctactttatcttacattaaatgtttccatgtatttcaactctgttcctggactttctatagtgtttctgcactttcactgacgaatttttactggttcctgaaacagggccacactgctctaatgactgtagcttttgtaaagccatttaaataatttgttctggttggtcccactttttcctctgcaccatcaaaaatttcctagtagctctgtatttgttctgtaagtatcctttagaatcatttaccttaatccgaaagtaaaattcactgacattttcattggattgcattaaattagtacattcaggctgggtgcggtggcttacgcctgtaatcccagcactttgggaggccgagccaggtggatcacgaggtcaggagatcgagaccatcctggctaatacggtgaaaccccgtctctactaaaaatacaaaaaaaaaatgagccgggcatggtggcgggcgcctgtagtcccagctactcgggaggctgagccaggagaatggtgtgaacccgggaggtggaggttgcagtgagccgagatcgcgccactgcactccagcctgggcggcagagcaagactctgtctcaaaaataaataaataaataaataaataaataaataaaataaattagtacattcatttcaggagccttggcatcttagcaatgttgtgttttattttcccaaaactttgtgtgtattttaaattctctgatctctcaggaaagtttcacaattggagtcttaggaattggcctgtttttaagttttggtgctatagtggaagggatcattttgtactatatgttatttctttcgtttttgggtttttgagacaggttctttctctgtagcccaggatggagtgcagttgtgtgatcatagctcaccatagcctcaaacttctaggctcaagtgatactccagctttagccgcccaagtagctaggactgcaggcacacactaccatacctgactaattttcgaattactttttgtagagacaggtcttgctatgctgcccaaggtggtcttgaatgcctggccttaatcaatcctgccgccttggcttcccaaagcactgggattatagacatgagccactgcagctggccttatgcattttctagtgtaaatttgttttatctctactgtcgacttaatgatcttatatggttataataatccttccggtgattttgttagattagacaaaatagttattcaccttcaaataataaaaacaacaataataaaaataacatgtattaagtgcttactacatactgggcactgggtactaagtgcttaacaaatcttttcttcctcacaacagtgacctgtgcccgttttacatattaggaagcagtcataggagggtatacatgtctgagattatgcaaccagtaagcactgatactgagatttgaacccatgtctgttttagaagtcatactttaaaccactacataacatgtcctctaataatgaggatttatatcctattccttccattatttatacctcttattatttatttatttatttatttatttatttatttatttatttatttattgtcttcacaggtcttgggcttgccttcaacttgaatccagctctgaccatgattggcaagtatttctacaagaggcgaccattggccaacggactggccatggcaggcagccctgtgttcctctgtactctggcccccctcaatcaggttttcttcggtatctttggatggagaggaagctttctaattcttgggggcttgctactaaactgctgtgttgctggagccctcatgcgaccaatcgggcccaagccaaccaaggcagggaaagataagtctaaagcatcccttgagaaagctggaaaatctggtgtgaaaaaagatctgcatgatgcaaatacagatcttattggaagacaccctaaacaagagaaacgatcagtcttccaaacaattaatcagttcctggacttaaccctattcacccacagaggctttttgctatacctctctggaaatgtgatcatgttttttggactctttgcacctttggtgtttcttagtagttatgggaagagtcagcattattctagtgagaagtctgccttccttctttccattctggcttttgttgacatggtagcccgaccatctatgggac

SEQ ID NO: 2266 - DNA, 2300 bp, Homo sapien
tcaggagtgccaatctaacaaaaatgagtccaaagacacacatagttcccaccaaaccataacaagttttcagacctaagatgttagatcacttaatccctccagccccagtttccttatgtgtaaaacaagggatcctgatcagctggtcattaggatcctttccagggctaatatatgccctaatatttaaaggctaaaacatgtaaactagtgaaatactaatcatttgctttcatcctatagtgatatgacttttttcctttttaatctgtttaaggacattacagtctatcccgttaagcttacaactaaaccttcaaatctattcagctataaaaatcttacaaaatgctcctcagatcattaacttgcatatttaacaatggtaactgcaatctgatgaaacaacagcatctacctaagaccaaaatgaattactgaaatatattcaacttctgtgtaaataataaatcttaccacgtgttttaagtgctaaatatcttgaattgttggtcatttctatggcaatctgaaggcaaagtcgtgccccagggtgtaagacttgaatttatgggtactatttaacacctaactaaaaaactgaagatacatagtctttgcatcacctcactgggctggtggttgggataaaaaaattgttgaaaccagagtaatttttgaaaaaaaaattcaaaacaagttatagtaagttacagtaaataaagtagcttagtaagttacagtaaataaagtagcgtgtaaacattttactgttatcagtagcagcccagtttctaatcagccactggaaacccaaagaaagactaaagtagtaacaagtttgtctcctggtttagattaattacaaactagttttggcaactgcttgttccatcaaatatgtcatgacaaagtaataaaatgttaaaacgcatgctggaaaaaaaaaaagacgtacttggaacaaaaaacttgcatcggaccaagtgtaacgctatcctccagatttctctcaacagggccgccttaagtccatgagtagaagggcgctgcggcggacgctggcagccacaggttgaatgacaaagagcccccgtcagcaccactcccaggagtctgcgggctgccccgtcccctccgcaaagtctactcgaaccctgcagtcacgccttggctgtggggaatgcggctctccgcaccactctcgcaagtcaccaggtggggcaaggatcggcgggccaagaaggttggggcggacaatgtcacgaatcataaataacttctgccccgagtcccttcccttggggcagaagcggccaggagagtctggaggtaccacatgcagcagcctcatgttatcccttttccagatcaaagcatctctcgaggagcctattgaagacttaggggggaagggacttccccaccgtcaccgggcaccacgacccaactcctcggccaggcctgggaccggcatcttagcacggggcccgcggctcggctaagagaggcgctgaccccagcgcctcaaggtctccttcaccagcactgcagtccgaggccacgcggctgcctgtgaccacgatgccctctgctgggccgcctccctccgccggagacaaagtctcccaaccccggaggtcccctccgaccccaccagggcagcgagggcaccgtggggtccgcgccgcgtgccgccggctgttacccaactaaccgttatatgcgcggatcgcagcgccgagcgtgtgcgtgacgtggtggcgcaggctggagttccacggggcccagggtccggctcccgtccttcgctcgctgcctcgtttgcttgttccagtacccacgcagctagccagtcacgtcgcagctcaccactttgtctggccgggccagcgaggctgccttataacccgccggggccggagcatgcgcgcagggggcggagtcgtctctcccggccgccgccccctccccgccacacagacatccgaactgcagcccgcgcctccacacgctttcagccgcgcgcgccctctagctcgcccgcgcgcgccggcgccccctccccgccacgtgaccggcgtcccagtccgacccgcgcgctgcgcccctgctgagcggcgcggagctaccacgccctgccagactcgcccttgggtccctgtctgacgagctctaggcaatctgccctcgttcgggacacaaccatcggtctcacccctcagtttctgccagagaaaaaggaaaagtcaccgagaggcctgaccctgacgggtgggggagatgcgcgtgcggag

SEQ ID NO: 2267 - DNA, 2300 bp, Homo sapien
gtgcaatgatgagatcttggctcactgcaatctctgcctcacgggttcaaacaattctcctgtctcaacttcctgagtagctggtactatgcattacgcatggctaatttttgtatttttagtatcggcagggtttcaccatgttggccaggctagtctcaaaatcctggcctcaagtgatccacccacctcggcctcccaaagtgctgggattacagggttgagccaccacgccggcctgaaataaatactagttttattatcataataaccctgaggtaggtattatccttgttttacagagttgggagtgaggcttggaaaggtaaaatgacttgcctgaggacacagagctggtaagtgcaagaatcaaatttggaactgaacagatctggctctcaggtctatagtgtgaatctaccaccctatggggctctataagccttcttttgaggtttcctgggattcatcttatttaaccacttctcactacattccatagaacaggcccttatatatttacttctgaaccagactgaggatcctgtctctctaacttaattctccttaccatctacctgaatgctgctgccaccctagcactgctcttataagtcctagctgccccaatgacccgaaatgccttccctttctccgtgtttatcaaatgtaaaaagcaattactgtattactcactagtagtacttggccgtggatgccacactgtcttctaatatactgaactgttattggaaagcacatgggacctctcaggatctgatcctccaatctctactcttcttcaatctcaggttcttcatttgcaaaacagaaaccataaggcctacctcccagggttgctgtgagaattgagggggagggtaagtgagggggagggtaagtgagggggtgagtcctggaagggaggaagacacgaggggaagggcagggtcctggcaagcagcaagtgctcaacagatgttggttaatttgtgcctaagtctcccccaaaaacttgcaagctctttgaaggcaggggccttgcctcatatttttcggtatttctcaaaagtcctggacatcaaagacactccatggttatttgatcacttcaacacacacgttggttatgcggtcacagcggctattatgttaaaaacaggctctggagtgtgacttcaaatgctggccgctgacgagctgggctgtctggaaagttacttcacctctctgagcctcgggtcccttatttacaaaatgttcagggcagtgcccacttcacagggctgaggattagagaggataatccgggtgaggagcatcagccccagcgccgcctgccacaattctatccggccccacatatgcatcgtccataagcgtccggcctctgcattctcgcttttccacgtggccgaggtgcacaccccaacccactgggccagtctccccaccctcttacctgctcttctttcccgactcgtctttaatacccaccaggcgccaaccgccgcgggcctggctctatggtggcaagttgcatgggttctcccatcaggacctcccgatgagcctacgaggtcggttctactactgtcgccacttcagagggaggaaacaggcccggagggttggggaacttcccgaggtcactgaactggtgtcaggcccggattggaatccaaacacatcccagcccatgcccggctctacagcgccggcccccagcgtcttcccgggtgccagcggcacccgcatccattcaaatgctgcccattccccgctcctcagtcgcttcccgctactccgcacgcgcatctcccccacccgtcagggtcaggcctctcggtgacttttcctttttctctggcagaaactgaggggtgagaccgatggttgtgtcccgaacgagggcagattgcctagagctcgtcagacagggacccaagggcgagtctggcagggcgtggtagctccgcgccgctcagcaggggcgcagcgcgcgggtcggactgggacgccggtcacgtggcggggagggggcgccggcgcgcgcgggcgagctagagggcgcgcgcggctgaaagcgtgtggaggcgcgggctgcagttcggatgtctgtgtggcggggagggggcggcggccgggagagacgactccgccccctgcgcgcatgctccggccccggcgggttataaggcagcctcgctggcccggccagacaaagtggtgagctgcgacgtgactggctagctgcgtgggtactggaacaagcaaacgaggcagcgagcgaaggacgg

SEQ ID NO: 2268 - DNA, 2300 bp, Homo sapien
tgctatctgtgttattctgggcaattaattcactgaacttccctgggctttagtttcctcgccagataaattaaaaataatacctactagcctgaactgttgtgttaatcaaatgagatagtatctgcagaagtaattggtaaaacttggaaagtgttctgtattcatgaattaatgtcataatttgtctaaagtagataaaagggaaaaattaaaagcaactaccaggctcttacctggaaaaatagaaacacggtgggtgggtgagctggtgaaaataataaaataatacaggtaaaatccttgctcttctgccaggtttttttcctgatttgaggcacacgacattgaagaaatgaactagggagcataggatgagaaatcagagtggagaggaaattggagatcatctaaggcactcctgactttttacagaaatggaaattaaggcccagggatgctaaaagacttgtctgaggcctcccatctaatgattggcatgatcagaaactccagtttctttaagtataaagaacaagtacaacctttaagataaaatattttgtcatgggggtctttcagaatcattacatcagaaccagagaaggcctggtactctctactggcttttagctttatcacaaaattcttaggattcacctttctgttttaaaggttgatagactggatgctgctatggtaatctgcctcaggaaaatgccggactgttgtttgcaagctggttaagtgagcaaatcttgggaagatttcaaggtaagagttgtaacttcggaagttagtgatgcaataagaaatgcaaatgcaaacttcaaaaattatgatataggtactctttaagctgagtaagttgctctattgcgttatctgaaaaaagaaagatgaaattacagtgtgttctctggaattcacctacttaacttacattctttcagttacttcaccatttctgtgatgtagtagataggaaggtgctattttgcccattttagtaacaataaacaatacaggaaaggattcttcttttaattgacacattgtaattgtacatattctaggttacagttttggtgtttccatacatacaaatgttgtatactgatcaaatcagggtacttagcatatctctcacctcatgctattttgtaatatacaataccttattgttaacagcaaccctactgtgcaataaaacaccagaacttattcttccaatctaattgtcactttgtacctgttgaccaacctctccctatcctcctttcctctctcccctttctagtctcagataaccactgttctctctgcttctaagatataaactctttctttaaaaaaaattagattccacagatcatacagtatttatctttctgtgtctggcttatttcacttaacataatgtcctccaggtttaaccgtattttcacaaatggcaagatttcatgcttttttacagctgtataatattctgtaatccatatgtaccacattttctctttttttcctttttctttttcttttttttttttttttgagactgagtctcgctgtgttccccaggctggagtgcggtggtgcaatctcagcttactgcaacctccgcctcccaaattcaagcaattcttctgcctcagcctcccaagtagctgggattacaggcgcctgccaccacgcctggctaatttttgtatttttagtagagacggggtttcaccatattactcaggctggtctggaactcctgacctcaagtgacccacccacctcggtctcccaaagtgctgggattacaggcatgagccaccgtgcccggcctcacattttctttattcattcattcactgttagatgtttgggttgattccatatcttggttattgtaaatagtgctgcagtaaacataggagggcagataccacttcaatgtaactgatttcatttcctttgaatatatagccactagtgggactcctggctcacacagtagttctatttttaattttttgaggaaaaaattttcaacaaaggtgccaagaacacacactggggaaaagatagtctcttaaataaacgttgctgggaaaattggaaagtcacatgcagaagaataagactagaccctgtctccaccatatacacaaatcaactcaaaatggattaaagactgtcttctatagctgctgtactaatttgtaattccaccaaaaatgtgcaagtgttgtcttttctccacatccttgccaacagttgttttttttgttttgttttgttttttaaga

SEQ ID NO: 2269 - DNA, 2300 bp, Homo sapien
agtcttgctctgacgcccaggctggagtgcagtgtcgcgatctcagctcactgcaacctccgcctcctgtattcaagcgattctcttgcctcagcctcctgaatacctgggactacaggcatgcgccaccacgcccagctaattttttaatatttttcgtagagatgtggtttcaccatgtttgccaggctggtctagaactcctgacccaaagtgatctgcctgcctcagtctcccaaagtgctgggattacaggcgtgagccaccacgccaggccccccagcctcttttataaggccactaatcccattcatgggggctgtagccttctgacctaatcaattcctaaagtccccatctcttgattggtatcacatcagggactaaattccaacagatgaatttgtggggacatcaacattcagaccatagcagcacttctgtctgtcttgttatcttctgctgcataaacagaagggagtagtgcctttaaatcagcccaagcgcctctgggtatcttgaagataaccagctctttccacaggcctttgtgactctggaggttctcagatctggagggtgctaaggaggggacaggtcagaagcctctgggcatgagttgttggacacagccaaggtcagaagaattcttgatttttaagtaggtagagcatccatctctgctggaggggaaaggaggggccttctgtgattcttctgccagttgggatgaaagaaacagtcaatggagaaccagcctattatctgagctcagccctctccaaacaatgctcttgttgatacattctctgcttctttttcaaggggagggaacagctgtaggctgatctatgaaatcttctggcctggaattggaaggatctggcctgactcttctgggggaggccatcatatcaggatgttatccaagcaagcccctggctcagatctatacattctatttcactgcatttgtgtacagcagtgctgctcaaaatgtggtcagtcctccactggcatcattaaaataccttaggagtgttaagaatgcaaattcttgggccccgggaattcctgggtaaggcccaggaagctgtggtttaacaagctcgccaggtgatttttatgttatgctaaactatgaaaagtactgctatgtgggattctctctctctctcacacacacatacacatacacgcacaccacacagctacctaaaactcctgcagctgctaatgccacttggtcattttcctgtggttttcctcagcagggccctgggatttgtttttctccactgtggaccttgttcatttcctgctgcttccaagaggttgggagaggaaagagagcaggaatgaaggcgggagggggaaggggttagctaaggcagtgtagctttcaagaatgaaaaggaaaaagcttagtgacagtgttcctttgtgaagaattcagctttatgttgatggagctgcaagtcattagcaacccaggcatatggcccgagttgaccgggtcattctccggggccagatcgccctctgctgctgactgataaataacactctgggactcgaactgccaaggaaaagaggaagagtctctggggctagggtgggagggaaagaggacatgactaaggctaagagatcacaaagtcaccaggctgtagaagaatcttgttaaattcctgtgtgcaggaaaggaagaagtagccaaatgagcgggcgtttctaggactcattcaagaaacagtaggattcacccaagatctccactagctcctgtgatcctagctcccagcttaatgaggctctgcaaccattctcccttttattcctcacctttacctcacttggaacataaagggtgtttaaaatgggaagacaggctgggtgtggtagctcacgcttgtaatcccagcactttgggaggcccgggcgggtggatcacctgaggtcaggagttccagaccagcctgaccaacatggtgaaaccccgtcactcctaaaaatgcaaaaattagccaggcatggtggcgcacgcctgtaatcccagcttttcgggagactgaggcaggagaatcgtctgaacctgggaggcagaggttgcagtgagccaagatcgcaccattgtactccagcctgggcaacaagagcggaactccgtctcggaaaaaaaaaataattaaaaataaaatgggaagacagccacaaaaaagaaaaaaatgacaaagttttggtgtcgaggcatttaggggcaattaggcttttcagaggtttttgtttgtttttttgtt

SEQ ID NO: 2270 - DNA, 2300 bp, Homo sapien
gaccctgccaaatccccctctgtgagaaacacccaagaattatcaataaaaaaataaattaaaaaaaaaaaaaaaaaacacatatttgcggctgggtgtggtggctcatgcttgaaatcccagcactctgggaggccgaggcgggcggatcacctaaggttgggagttcgagaccagcctgaccaacatggagaaaccccatctctactaaaactacaaaattagctgggcgtggtggcgcatgactgtaatcccagctactcaggaggctgaggcaggagaatcgcttgaatccaggaggcggaggttgcggtgagccgagattgtgccattgcactccagcctgggcaacaataatgaaattttgtctcaaaaaaaaaacaaaaaaaacaaaaaaaacaaaaaaaacgtgtatttgtggccagtcacagtggctcatgcctgtaatcccagcactttgagagcccgaggtgggtggatcacctgaggtcaggagttcgagaccagcctggccaaaaaggcaaaaccccgtctctactaaaaatacaaaaattagccgggcatggtggtgcacacctgtagtcccagctactaggcaggctgaggcaggagaatcgcttgaatacggcaggcagagattgcagtgagccacttactgcggaggatacaggttagagagcattaatttctaatggccccatttggtatagtttcataggaaagctctgaaactataatgtagaaaggaactaaactgcctcctttttttttttgtaaggttcctgcctatgccggatttcttaccagagtttgttaagtctgctcaacagctaagggaagaaggctaagagtaagtttcattccgctgtcttggctttaaaagtttggtttggactgtagcattggatatggccttgtttccaatatatacttcaatattaaaaaaaaaaaacagaaaaaggtttttaaaaacataattatgactccataatctgccatgggaaagattgctttcagttactttctatgagaaccctaacctaggcattatcattctttttaacctgctcagattttcaatttatgtcagaaaacccatgttaatgtcgaacctgcccctgcctcaagagtaacttggtttaacctcttggggcttgttgcatcatcagcaataattgtcttgccaatgtcacagtcactgaaggagcaaacaagataacagatgcaaacgccctttgaaaagttcactacgtataagtgaaccatcactattattctcaaagtcttatttacaaccttggatggctgaatgagcataagatggccagacttcactgttcctagtaagttttccatagcctctgctttaggagaaataaatttcctcacatccagtctttgctttgttgactgctcaacaccctcttgtctcgcttgcttttctgagagtgaccttgacagcatccctccaaagagaagggtatttcctttatatagacatgcaggtgcagtcccaccaaaatttattgaactccaagctagaacaaaaggtggaggtgcaccgatgaagaaacagggcctctgccttcaggagcttacaaggccattaacagagagtgatattgatcttatgcaaatggcagttgccgcctacttgcagaagagcaggggctacagccaagcagcagggggcagaagaggctcgagctcggctctggaggccgatctggccaaagccaggatagaagctcccgtgacccattcgtgtgtgcgacttggaaggcagcccttctgccactcccctttcttaaagcccagagcaaataaaagatccttttctactacagtagatatacctgtagtcaggactttgaactcacagctattcgccgcaccattccctcttaaggaactactgcgccctccagcggaagaacagcggcggaactccacagcggcagctaaaatccctgaacgctttaaagtccttctcctcaagatactcggctgcgtctggccccgcccctcactgagttccgccccgggcgcaacctcatcttatggcaccgattggctggcccctgtgcgtgaggacgttgcgccgtggggaggggcggacgagaggtgtccgtcaggccgtgtgtcccaggccgtcgaccccgctgtcgcgctgcgtctgctccttgcatgcctttagatggtacagccttcagccggggcttcgggagacagtgcagccaccgagcatctctgctgagcttctccgccgatcctccttttctagcaggcagctcttctag

SEQ ID NO: 2271 - DNA, 2300 bp, Homo sapien
ttcactcttgttgcccaggctggagtgcaatggcacgatctcggctcactccaacctcgccctcccgggttcaagtgattctcctgcctcagggtgtagctagtattacaggcacgcgccaccacacccagctaactttgcatttttagtagagatggggtttctccatgttggtcaggttggtctcgaactcccaaccttaggtgatcagcccgcctcagcctcccagagtgctgggattacaagcgtgagccaccgcacccggcccctcttcctccccgaccctccctccccccagacggagtctcgctctgttttcaggctggagtgcagtggcgtgatctcagctcactgcaacctccacctcccgggttcaagcgattctcctgcctcagcctcccgagtagctgggactacaggcgcacaccaccacacccagctaatttttttgtatttttagtagagacggggtttcaccatgttggccaggatggtctcgatctcttgacctcgtgatcggcccgcctcggcctcccaaagtgctgggattacaggcgtgagccaccgcgcctggcccattgatgactctttcttaacgactccatcagaaatctgtcagttaataaacgtgctgctcagttagtgacgagaaataactgtatgttagtggttaagaagccccataattgcagcatttaatacctgctgttgttcctaataccaccaggctgactcagactaaggagccctccaagttccactgtctaataaagacctgtcaaagtgaaaactcaacagtggaaactccagaattcattcaaccgttgtacctgctttacctacataaataagcagaactgatttttgggttctttgccacaagaagatgcgctgaaaacaaagcatcaaatggttctgcaaaaaatactcctcctctttacagtgaagtttaaattagatcaagaatgctacttacaaagatattctgaattacaggatctcctgattcatcataatgaacttttcaaccctgttaagtatcaaaactgcagcacaaaatcagccaacatgcgaactaaggactaaagacagttcataggtctttggcgattgtgattataaaatcacgtgcctgaggaccactaagtctgaggtacacaccaaatcatgcagctcaagataagcagaaagcactgttccgtgctcaacccaccccccgccccaccaaccatccaaagtcaatgctggtgcccaggacccgtgagtccttaccattaaatatgcccgccccatttcctccccagttgaggaaatcacagactccttggccccaagaatcttaaccctcgtcttcatacaattctccagaaaccttaacaccggcttttttaggctcccaccacctaaaacaaagttcataaaatcctgacggcagtttccttcagagcttaggctctcgaccacaccctccgaccaggcctgtctccctcctgcctgccccctgtagagggaaggctccccctccttttggtcactctgcctggccgctctactcacaggatagcggtgtcggggggcagcaagcccgacagcgccctccagctcggtgcgggcaatttcctgcgactgcagtccaggagaggaatgcggcaggagcagggcgcggggcagagacctgctccggcggcgggcaacaggaggagagcggtctgggcaatgaagagtaaccgagaaagcactctagatcgacaccccagcaactgctcctccgggacgcctaggggcgccggcgccattttccccctcgacctggacgtggcctagaagagctgcctgctagaaaaggaggatcggcggagaagctcagcagagatgctcggtggctgcactgtctcccgaagccccggctgaaggctgtaccatctaaaggcatgcaaggagcagacgcagcgcgacagcggggtcgacggcctgggacacacggcctgacggacacctctcgtccgcccctccccacggcgcaacgtcctcacgcacaggggccagccaatcggtgccataagatgaggttgcgcccggggcggaactcagtgaggggcggggccagacgcagccgagtatcttgaggagaaggactttaaagcgttcagggattttagctgccgctgtggagttccgccgctgttcttccgctggagggcgcagtagttccttaagagggaatggtgcggcgaatagctgtgagttcaaagtcctgactacaggtatatctactgtagtagaaaaggatcttttatttg

SEQ ID NO: 2272 - DNA, 2300 bp, Homo sapien
tactctatcccctaggctggagtgcagtggtgcgatctcggcccactgcaacctctgcctcctgggttcaagcggttctcacctcagcctcctgagtagctgggattacaggcgcctgccaccacacccggctaatgtttgtatttttagtagagacagggtttcgccatgttggccagctggtctcgaactcctgacctcaggtgatctgtctgcttcagcctcccaaagtgttgggattacaggcgtgagccaccggtcccgcctggtattatttttaaactctattgattcaaatatgcagtcaggggtaagaaccactagattatagaaattattttgccttgcctgggaagctactcaaaggatactctgtggagcagaactggttgatgagaagataaggatagaaatgcagaataagcctttagaaacttttagaacaattttacattactgtgacacttttgttgtagtttataaaagtattagtctgcagtggattggaaatttaaaagactggtccttaccatggataatttgagatgcactggaaatgtgtgagttttcaaactgcctaggttcaaatccttactccattccttacaactgtgtgataatgggcaaactgttagcctatgactcagtttcttttcccagaatgggaatagcacctccctcagggttatgtgaagataaagtgagataacttgtttactcaaatatttattcatcatctgctatgtaggatactgttctggatgatgaaaacattagtgcacaagacagagtctctgtactcatagcatattacagtaaatcctagtgaggaagataaataatagaccagtagatatataatatctcatcaggtaacaactgaagaaaaaaaaaactaagtcaaaggtatgaagagtggtggggattgctattttagataaagcagtgaggggaaactcttttgaagatacagcatttgaaccaggaccttaatgaaatggcaaaccatgtgaacactgggtgaatggctttccaggcacaaggagtaggaagtaaaatgagtttagagagttaagcagagtagaataattaaatatctacaatttttttgatattaatcatcttatttctcattagtcgttctcttcatttgttccagtatttttttttttaatttattttttttttgagatgcaatctcgctcttgcccaggcaggagtccagtggtgccatctcagctcactgcaacctctgcctcccgggttcaagtgattctcctgcctcagccccctgagtagctgggactacaggtgccccccaaccacgcccggttaatttttttgtatttttagttgagatgaggtttcactgtgttagccaggatggtctcaatctcctgacctcatgatccgcccgcctcggcctcccaaagtgctgggattacaggcatgagccaccgcgcctggcctgtcaagatattttttttttttaccccaaactgctttgttctaacttaccttttttgttgttcttgaaaagcatatcgaatttacagttttaataggtccaacaataaaattatgttcatatttttctttttaaagagagagttaggaggcagatcataatagaccatgaggaattaggatttttgctttcttgtatgcattaggaaactggagggttttgagaaaatgctcagcacagagcttggcacagagtagaagctgagtaatgttaacaataaaaactaaaattaaaatgttatgaaaatcatcatagttattttctgccagatttttaaagtagatattttgatctgttgagatattttgagttatttctcataggcttagtttaattataagttgtgacttactacaaattagtatactccgcccccctcctttttttttgccagtgataacctgagagctggcaagaaagttttaactgttacaagaactcagtttaacataaaatttaaacagtaggtcaaagcaaatattgcagtctcaatcttcagagagtcatttagtaatttgagagttgtcacaaagattctttgcttgaccaacccgtaggcaagcccttaaaccttctcctaggcctagctgtgtaaaatccaattttagcacaaaccctgtaaaaccagtttagcaagaactcttcctcattgtagaccattcccaggtgatgtctgatcaccctggcctgtcttcagcaagaatcctgttagggtttagccagagtcttccttactctggatgttattttttagtaatttcacatccactga

SEQ ID NO: 2273 - DNA, 2300 bp, Homo sapien
ttttgtatgtttagtagagacggggttttgccatgttggccaggctggtcttgaactcctgacctcaggtgatctgcctgcctctgcctcccaaagtgctgggattacaggtgtgagccaccgtgcccagacaatttcaagtatacttctatattattctttctcaatttggaaaattttcctttacacttaaatgtcctttaggccgggcactgtggctcacacctgtaatcccagcactttgggaggctgaggcaggtgggtcatctggggtctggagttcgagaccggcctggccagcatggcgaaaccctgactctactaaaaatacaaaaattagctgggcgtggtggcacacgcctgtaatcccagcttctctggaggctgaggcaggagaatcgcttgaaccgagagttggaggttgcagtgaggcaagattgtgccactgcattccagtctgggcaacagagtgagactctgtctcaaaaaaacaattttttttttctttaaagtggaatgactgattcttagctttacataggagaacttttagatcagtgtatctatgttggatatccctagtatctctgatcatttgagtacctatatattgccaaatctgttttcacaatgtacttaaagatggttggaacagaacacacacttggaagttcgggctcacaaaatacatccattgttttttacaaagtttaaagaagaaaacagaatctagtaaaggttaaattctgctgacattgccgcacattccctttttacttagttttaaatatagacataccatatatttcttcctccccttccacttaactgcttttatggcacaatgaaatgttatccagtggagatactggttaagaatttatatacctgcttctctcaatcagtccaataacattattaattatgaatccatattttattagccagtcctaagccaatcttcagctggacatttgacctatttggattttttcactacttcaggtgaaacccgtgcacatacaaaatgctttcaaataatttgttttattaggtattctctgtgaaatataaatcattcataatccccccattttatattggcacagaaaggataatggttatatatatacatatattttttgagacagagtctcgctcttttgcccaggctggagtgaagtggcgtgatctcggctcactagccacctctaccccccgggttcaagtgattctccttcctcagcttctcaagtagctgggattacaggcggccgccacctcgcctgggtaatttttgtgtttttagaagtgacggggtttcgccgtgttggtcaggctggtctcgaactcctgacctgagttgatccacccacttcgacctctgaaagtgctaggattacaggtgtgagccaccgtgcctggccatatacatgtttatctatcacatacatatatacaaggggtaatagaagtagaacttgtcttgaaatcctaatataaggtttctgtttttccccaataactgataatgcttgagaaatatattctgagcacacaggtgacagtaagggctagtagaaaagtgctggatcctgaagtcaggaaacctgagttccaatccaggctctgccactgactgacatgtctttgagcaagtcatttgaattttctgggcctcatttcccccatctttaaacaagggaattggactgtagctctgtagtctctttcaactttaatatgccactttgtaaacagaacacacaattttatagtattttttaaaattgaatctaaagcaaaaataaataactgacttggctacggatgcatttttttccccttagatgattttctcaagccacagataaggacacatcctgaaaccataattgctctaagaggcatgaatgtgactctgacgtgcactgcagtgagcagcagtgattcacccatgtccactgtgtggcgcaaagacagtgaaatcctgtatgacgtggatactgagaattttgttcgttattggcagcaagctggagaagctctggaatatactagtatcttacatcttttcaatgtgaatttcacagatgaaggaaaatatcagtgtattgttactaatcactttggttctaattattctcagaaagccaaactgactgtaaatggtaaggaattatgctccttgattttttttagtttagaaggatttttcatgttcagttttgaatcacttgagagaattagactaaatctgacatttaagtaggactcttactgttattgtcttttgagtt

SEQ ID NO: 2274 - DNA, 2300 bp, Homo sapien
actgtggctcacacctgtaatcccagcattttgagaggctaaggtgggaggattgcttgaggccaggaatttgagaccaggctgggcaacatggtgagaccctgtgtctgcaaaaaaataaattaaaaaaataggtggacattgtggcatgctgctgtagtcctagctacttgggaggctgaggtgggagggtcacttgagcccgggaaatcaaggctgcagtgagctgtgtgaagccactgcatcccagcctgggtgacagagtgaggccctggctcaaaagtaaaataaataaataaaaagttttaaaaacttacttgttaagaagtgtatctatagaggcagctacttagtgattgtatacacataaacacagtcttggtgtaattaaccgccttcttcatgcctagaggttcatacttctggtcatttgccatctgtttaaaagtgctaggtgatactccctttctaacataaaaagcttgttctttcagagcctggcagtcctgtcacagctgtatgcacctagaggaaaacttgtttggaaattcctttcatttcctccccctctccctccttccctctttttttttactgaaacagaaattgattgaggaaggttcagtcattccttcaggaaccaatgagttagatcgggttgttactttatgtataatgaacgcttcaaaaactggaggctgatttaaagattgcagaacttgagtcagactcataagcagtactgtgacatgaattggagccagaacagttgctgatatcagaaccatctctttcattctgtgactttgctcttgccatgttctgactggggtgagccgctaggatacaaatcactatcactgtccatatttgagtctgcaaatcttgtcattgtctgctttaatgctctttgagttgcaacaggtgtattatttaaatgagtatttgaaattctgtgaacaggaattcttttggtagtgaaataggtgctcacacctgcttgctcagaatgtgaaaatattatttctgagttctctttgttcactttctaaagtgactgttgtttggtgttggagatgttaactgggttctattaggtgtgctatatcttggcaaatattccccatgatgaactcttcctactatcacaatcaggactatgactggatttctcagtctcagtgccccagattcaccatttctgattgtgtctggagaacgttttcctggaaaggcattccatgttccaaaagctacaaaaacatgccactttgcaactatgggtcagttatttgctctctcaatgtctcatgttgctgagttctagaaaatctctgtctcatttaccaggggtcattcaaaagtctgagatgtatattatcatgaaatatttgtgaaatttctcaccatgaatttggagggaacctacttttatttctcgctctggttctccattggtctgggctcctgcttctcagtcttctctgacctctggtaagtggaactttcattaatacttctgtcgcactttgtacctgacctaggtggccttgcaaatgttgactcagattgtggattttccactttcctctgttttccctattttctcccctgggaaatcttgcagatgatgcatattcattttctgtattcagccttccattattaaggataaaattgatccctacattgaatctgaaattaccactatatggattactctggctcactgctgtccaagcttggttttctctttgcttacttcctgtcatattttcagtttgcccaaaagaggtaagccactttattacagacccattactagtgctagacgtcatccacctctgttttcacctgattcttgtggggaatcctctttaatttgttgtaaccttctcagcaactcttctgtacttcacctatagtgcctagcaaattgttatcactcataagcctgtaatcttcatcactcaggttatttgcaagtagaaagcttctggaaccatttgtccatccgacttctgcactgggccacatccatcttcttcattgtcagaatctgagttttctgtcttgaagaacagctggaaagttgtctggctgttatgacacagtattgaaataccagactgagtttcagttgtttctagttgtgttcactttgtgctttctctgaatgggaatatcttctttcagcaaagttcttcattgaccaggaaaccaaagattgcttcttttccaagtttgttttgtttttaatcttttaccaatgtgcagtatatcttaagaagggaagagtg

SEQ ID NO: 2275 - DNA, 2300 bp, Homo sapien
ccttcatgttgcccagaactgaagtggccatggacatttttgtgatctggctagggggaagttaagttggggatacagttgttttatgggacatatttaggtggtttgcagtcacttttatgtagagttggtttttgctagccatctcagtgcagaaatggctcccagaaacatgcttactgcctgtggtgccaacttatctggcattatgacactcaaatgccgggccaaagaccatatgagatttgcgagtgtcctatgcaacctggccctggaagcatgtgggtaatggaggagaaacaagatttgaactgtatagagccaaaagctagtctgtaggaaattcttccaatcatcggatgtgtaagattgtaagtgcagaatccagttctcactgatacctagtcatatgcattaggcatatatatattgagtaatgcggcgatacaagtacatgctttcctttttttcccctttttaaaatgacaaatataatttatcagaattcctgtgttcgtaggatacaaactgtagcggtcctacaaacaagtatgtctggctgtggtcacatgtgtttatgcatcccatcaatcataaatataatttttattatgccagaggacttaattctcattccattctctatatggaaaatattacaaaatcattacatatgatgaggcaataagagtattattcagccaaaaaatgtggagaaagacttattgcagtgtgttaggcagttaactaagaaaaacatgatattatttttctatattttgtgatatttgaagtatttttccactttaaaagctttacaatttatttattttcccaatctacataaaggtccactttcctgcctaattttgtttctgtaattttgtgtttttcttaaagagaaccctcggccgggtgtggtggctcatgcctgtaatcccagcactttgggaggccaagtggggggtggatcacgaggtcaggagttcaagacctgcctggccaagatggtgaaacccatctctactaaaaacacacaaaaattagccgggcacggtggcagacacctgtaatcccagtcacttgggagggtgaggcagaagaatcgcttgaactcggagggtggaggttgcagtgagccgagatcgcgccactgcacttcagcctggtgacagagtgagactccgtctcaaaaaaataaataaataaaacctcaaattgtctaagcttcaggccccacaaaacctgagttcacccctggaacatacaattctttattccttgtcatggtctaatgggagaaccctattgcctccctcctttaccacatatgtaaccagtgcctgctgcatgccagatttctgagctagggatgggcacactatcatggataaaacagacctggccccttcccacgtggagagaagcagacagacatcaaataaacgaagtcatacaggatgctgtgggagagaaaaggggtggggacctcttgcaggaaataatgtttcagcagagactcaaagaatatgtaagagttacccagatgaagagtagaaggatgaacgtgcaagtggaaagaacagcatgagagaaggccctgaggtgggaagggcttggtgcattacaggtactcagtaaatatctattgaattaattttttaaaattatgatttgggcagggccagggtgctatgggagcatataagaatggcacagaacccttgcctaccccaaccagcaacaaaggaatgaggaatgagaaagagttacgttagaattgacttcctgactttcaggaggagaaatagcatgtgcaaaggccctggggtcagagagagatcagagagcagttctgtatggctggaccatagtgggatggatttgaggaggggcatttgttgaggggagaatgagaattggcaagaaatgaggctggaaatgtaaaccagagccagatcatgaagggcctcataagccatggtaagctgtgtagatttcatttggatgctgtggtgaggtggtgttagggaaggaaatcataggctcaggccagcacgttggaaagatctggttgcatggtcaagagaggactggatgggccgggcgcggtggctcacgcctgtaatcccagcactttgggaggctaaggcaggcggatcacaaggtcaggagattgagaccatcctggctaacatagtgaaaccccatatctattaaaaatacaaaaattagccaggcgtggtggtgggcccctgtaatcccagctactcaggaggctgaggcaggagaaaggcgtg

SEQ ID NO: 2276 - DNA, 2300 bp, Homo sapien
cattgcacaccagcccaggcaacagtgtgagactctgtctcaaaacaaacaaacaaacaaacaaaactgctatggtcgtgggcaagataatccagtagactccctcaagtttagattcatacaggcaataagacattagcggaagggaaatggcatgttctgaggctagaatgacgtgcatataaaatggccagtgggccacagggtaatttggagacatggggagaggttgacagtaacgtgaattgaggaactcacaatgacagaggaaggcagacaggttacactgcctcaaagccaaagatcttcattccatctgaccccaccacccatgctcatgcgtgcagcgcagtactcctctgcagtccaaagaactataggaaacctgtcatgcatggtaaataccttcctgcatttgatatggagcctgggatgttcctgagacccctccccaaggggtgatttgaaaatacacactcagaaagtaaagaatagaaaccagagtttaaaggccaaagacatagagggaagggtttaagtgtgaaatgactctctagtccacagcttacttccaaggggagtggtcctcagcagtaatctctgcataaaattgcaatgctttgtgccctgatctctgagtgaatgtagtcctcatactctgcccgtaattagtttaatgagaatcagggctccagccaagggtaaacaccatgggccaagcatgagaaatgctgactgtctctgaggaggctcagtacaaaaccctgttgctgcaacagtcagttttccaatcccagtgacagaaacccagctcaaaggagtataagcaacataggaaatgtattagctcctgagaagagatggatccagaggctcaaagattgtctttaaggttgcctttagctttccatctctctgcgatttctctttgtacattggcttcattttctccagatgatgaaagtgtcctctgtgcccctgtaccactggagaagatggctgcaagcagttccaagccatccttagagcatgttatccaagaggagggcggaactgctctcctgtggctgccacatcaatgcctgaagcagactctgtttggctgtgcttgagtcatatgcccagctctgtgccaatcactgtgacaagggctagagagctactcctattggctagactaaggacagggcaccttccctgcattgggggaggtgaggtcagccccacctgaaccacatagaatgggttccaggaaggaaagtgtggttttatttccaagagaagtgggaggtaagctgggcaggcaaaaacgacaaatgtcctttgcttctggcagatagcagagctccgttttggagaagggtaaattgacacagctagatcctctgctaggataaattctagacattcagaaagagggtaaatctattggccttaagttgaaatccagattccatgaaaagcactgaaccctctcctcacccccaccaccttggaagcactgggacgcagcaatgttgagaggatgggattctgtgccactgagagatggctcgcaggtaacgtgggcatgtctcttccttacatccgtaaagaggcaaaataaaaaataacatagcagcaccaaataacctatcttcctgaccagggccctcctacattctgctggcacaagtgaattcccagctcctgaacccacggactctctctcctccttgttggttgagcaatgtctgtatttactaaacaggcccagtgaagcagtacattccttccagacccagcacagcctcaggcacaaaagaggtccttgataaatgtttgttgaggtcttttcccagcagatgaaagtaaatactttgggaagaatttggaagaaaagtgacctggcctccctgttggtagtttttcctttagctggtgaaagctccttaaagggcctggatgggctgttccagaagacacttacaaatgtaaacagagacaaatgcccacagcccatgcacacctgtttctccctgttaatacttaacagttagtagctgttaagtatttgattattcctttcctacaaaaaagcatttcaaacccaaagggaatatggctcatttatttgctgagtgggactggaggcccatagccgcagaagatcctggccccacagcagcagagagcaagctcagagtgctgtcaggtctctcctgctgcctctcgccatgatgatgtagtggaaaaatggtcaacaaagctatttcctactgtgtgctaaatgcccatcatgggaagtcccaggtaagtcc

SEQ ID NO: 2277 - DNA, 2300 bp, Homo sapien
gtttccttttctgaaactgactgatatgaactatatcaaaagcctcccttgccctctggcgtctggttggacttggccattgacaagcaccagcaggagactggaggagggtggtgagttagatataaatcccccaggtcctttgctgggtgtttacttaggctgactgcatccgttgactgaaggtcacagactcctgtcaggtggccctgtgtgtctggatttttcggtaactgttctttcccgattggacagatctaggagctgtagcctcagggttccagcttctcttgtggtttcccacaccctgcccacatctttgcaaaatgccatttgtttcctgccaggaccctgactgatacaatggtgtcaacgaaatcactgcagctattgaagcttggtccagtctatctgaggtgtggagttttataagggctttcacctactattaaagggagacaggagactacacaaataaatgtcatgctgcaaaagtgaaacaaagatcatagctcagagaaaacactttccacttgagggcaagaaatcagagaaagctacctggaagagccggcatttgggatgaggacggataggagttttaaaagagatgagatgaagggcattccaaagacagggaagagtgtaagtcaagccggggaagagagaaagctcaagtgaaatttctgaaaaattagagctggaagggatctacgatatcttttatttaatgttcgttctcccttcacctcctttaactgagatttggccaaggtcaaacagcaagtaagtagcatgtcaggactccaaccagatctgctggctaccaggttagttcttaataatccaccttctacctccaccccactccctcacctcaggcagtctgcttacttctcagtctctcccactagactgtaacctcctcaatagcggggcttctgttttcttcacccttgaatcccagtacctagcacaatatctaacacaaaatcgtcatcgtcatcagcagcagcagcagcagctaccaaactttaagaggcaaccacccactgtcaggcactatgcagttattttgtacatcttctgtaatcttcacttttcactgaggacgctgcggctcagagaggttgtctaatttgtcttaggtcatacagcagtgccggactctattttataatatctttcatcaaccggactccgaagccctgcctcaatgggcgttcagtaacatctgttgaatgaacgaatgaacaagcaatatccactcaatgcaaactatcggctgtaacaggccaccctaaaggccccggaacctcggccggctcaggactccgcacgttgtcttccaatctaagcacaccggcccctctctgcgccccgcacaggctcagaggctccgcccgcgtctccgcctaactcgccggccacgcccccacttcggggagctcggtccctctcggattcgagttttcctcggctccagccgccgcgcagagggcctctcccggccctgcgacctacagccccttccactcccctgcccctcctctgcgccctccctcactctccaaacttcttttttccaccctctctaaacttcagtcattctagtgcccgcctcctccactcgcaccgaccaaccagtggtccccattctcgttggcggtccgcctcctgcccgccgggggccaatccctggcgcgagagtccagggccggggctcgttcccaagcgcccagcctgtgacggcagcgcgccgggcgccgcgcggcgggagggggcggggctctggatgagggatgggcgagggccgggggaagggaaaagggaggaggaggaggttgcggctggtttgaaagcggcagtttcctggcagcttgggcaggcgttggtctccgcgctacagctccgcagcggccacgatcgatcccgcgacgggtctacgcgcgcttctgcgcgccccccacggatttttcccgttcccggctcttcccccttcacctccccgcccccccgcctcagcctttcccgccgctcgggcgctgagcccagggaccagccggcggcagtgaccccgcccgaagccccttctggaacctcctggggacaattcccttttcctttcttcagcctaacccgcggtggccctcgcggagtccggtcagccccggggagcgcagccgggaggggcgtccaaggggcgtctcgcgtctgggaacggccgggcccccagcgggctgtggtcgcggggtgggggccggagcggcgaggccccccttaccgggctgcgcgggccg

SEQ ID NO: 2278 - DNA, 2300 bp, Homo sapien
caagaaatgcaacaaaattgaaaccagtttaactgctaagtgattcgaagtaatgcaaagtacatggactgctaaatcatagaggatctaatttttttttaaaacccatttgttaggctctcatataaatataacacttaaaacaataagcacatatactgttatataattcaggaagatttttagcttgtagacttccaaagaatgtggcattttgttttagtttttgaagtacctcttttttttttttttaatttcagtaggttttcggggaatgggtgttgtttggttacatgaataactttagtggtgatttctgagaatttggtgcacccatcacctgagcagtgtacactgtactcagtgtgtagtcttttatccctaactcctcttccaccctttcccccgagtccccaaagtccattgtacgaagatactgtacctttcttttaatgccagtttataatgcatgttcgaacttttaacttcactaagtctatgaaggtaagatatacatagtaagaactaaacctgctaaagatcatcctgtttatgcaacatcattaatttaacaaataagcagagtaatgcatttaggacaaaagtttatgtttgttattagggatataaagtctgttatccccaggatcttagagactaagagagtagtataaacaaatatttatagtaaactctgtaattactatagaaaatatcacagaagcacaacagctcagctaactctgccatattaaagtagagcagtattatgactgaataaatcaaaacagctgacatcattagacctgctatgattgataacaggtttttctctttgacaagtggttgtgatatatgtaagaattcctagtttttctttaatatgatagataaacctgactaatgattttgaagcatttagtggttgaaatctttctgtgagctttttgtttatcttttatttttagcctgatagtctgataaaggaactgtgctttaatttgcttcttttttgcttgttgctaatgctttttatgatttccaaatatttcaacttcattgttgaaaaatgaacatattttcaggtagatattatattttaatggattacaacttagattttaaatttgctgaaatttttctttgccaggggtaaggtttctggtcaatataaatagaatcatcatgtgtttctgtctccaaaaagttagctgcatattttctgaatttgaggtttgaattaagaattgggaatgccaattgatagatggatggttaaatgcttatgatagctcactgtctatgaaatcctatatgtgtttgttaaatgtgaccgtcagcactaagtaaatcggtaaatagattactttcccaccctaaggatctgcagagtgtcttagaatttcacaaaaggagcaaacctctgacttgatggaataaattttgataatcagtttcttgtttgtttatctgtttattgatctatttcttagtataattatgattgcattttatattggacttttgttttttacctttttaaaaaaaccacattgagccaattttcaattgtttaaactttcagcatgtttaaatatttgtgtttatagttttcagaatttttgctcagttttggaatagtaccgattaccaaaggtaaacctgacccttaatgagcaagtaaatttgtaggctgtatacatttttttaaagtaattgttatctaggccacattagccttcaagctacattgtctattgactgaggctccttagatctcttataaaatgcattatattgcctgacttgcatattatattatctaggtaaagcaatgtaattaaagcttaactgaggtcatgggtggtggctcacacctgtagtcccagcactttgggaggcaaaggcaggcagatcacttgaggtcaggtgttcaagaccaacctgggcaacgtggggagagcccgtttctacaaaaatacaaaaattagctgggcgtgatggcgcatgcctgtaagtcccagctacttggaggctgaggtgcgtggatcacttgatcccaggaggtggaggttgcagtgagctaagatcacaccactggaataggaacagctccggtctacagctcccagcgtgagcgacgcagaagacgggtgatttctgcatttccatctgaggtaccgggttcatctcactagggagtgccagacagtgggcgcaggccagtgtgtgtgcgcaccgtgcgcgagccgaagcagggcgaggcattgcctcacctgggaagcgcaaggggtcaggga

SEQ ID NO: 2279 - DNA, 2300 bp, Homo sapien
ccaggctatgagacagatttaggccaaagatgaatgaagatggataagttggctttatggcaaatgcctgtagactttgtgtatcaacaaaaacaaggcaggactgaaggcttttccctagctatgtgaactctaaggggttaccttgaacagtttcccagtccgtttagaaaatgttcagaagctacctttctactggtctgtttgctatttttaactgttccggtgacactgctataaatactaagacagtaacaatctgactgcttttaccttccctcacccagacaaccagccctttaggaagttgtataccaccatgcaccaattctttttaccacattgctcgcagactgagaaaggggaccactaagatttcagagattaattctatttaatgctttcccaagtctgaacaaactccttttagtgagccaaggaactgaatgattttcttctcagagtatctagaaagaacactatgtttgagtaaatcttttgtaaggagaataactgagatattgatttagaaggtcaccacagggccaccgtatgacctgccgtatgtttctggtgtgccacctgttgtagaattagtgaatcaactcataatgcctgatatgacatggccctttctgcactggcatttctctaattacgttgtttgtaaggaaaatagaataataagtgcttgacataattcagagctaaaaggcacttccttccaacattgacttactctattttaagataaaatctgccactgtgtattcctagaagagccagggcactgtctgtagggaaataaatcatcatcaagaataacttttctactccaaatgaaggtctatttaaatgtcccttacatactcctagatatgattcagaaatactagtaaggagcaggttttactatggaaattaaacatcattcacagtgccattcaaaaatatgaattatccctattcaaatcagtcagtagtcagcaggagcccacatacctgataagtttaaagtttactgacctaggctaggaaattctcagagaacatagaaggaacatttgtttcctaatacaaatgctgcctgttgcacggtggaaaatattttgtttgacaagatttcctgaatatctgagaactcatttcaagctataataatagcagagtatcttaatagttagtccaggaaggctcttagcattataagctagagatacagtagagctacacagagcatctttgcaattgtattagactcagctttgtgtatttggtttagaatttgatccatgagtcaagtagtcttaacagttaacatttaatgttccaattccactcagcttttcaaattttaaaaagagccaaaggcataaataagaggaattaatttacatgtggaattaagtatgattcattttaattgtcagtcatttcactgtacctgaatttctgaccaataactaccgagtgctaaacctgagtttgacctgcatttatttacaaggttccttatgggagcaagtgtccctttaacagaagcaaagataatcttatcgtagcagtttttaaaatagctaaaaacttgttgcagcttaaatggccaacaataaacaatgagacatctgatcagtcaggtggtatcagtgagattagtagctcttaaacagaacaattacgatgagaatgtaaaaattagaaaaaggtttctggtaggtagaaaatagcaaagaggtttatatgctatgattacaactgtgtaaagagtatttatgcatgtgggcaaaagtgagaagtatgaaaatagttccgtttggatgcgatgatgacgtgtggtacttttctgttatgtttttaaataattttctttgatgttatgttgaattttaaatgacgttgattataaatctaacactagcagaaatcttaaataattgaaaaacctggggttttttttcccatagttattcctcataaaattggccgagtcatagaaggaagtccggctgaccgctgtggaaaactgaaagttggagatcatatctctgcagtgaatgggcagtccattgttgaactgtctcatgataacattgttcagctgatcaaagatgctggtgtcaccgtcacactaacggtcattgctgaagaaggtaaggagccagtagacgcgcctgccccaagctgatctgagaggcacaaagcctgtgtgaggcagtggcctcctccagcactgccagaatcactgcggggatataactgtgtatgcacgctggagtcttattcttccccttttcaattta

SEQ ID NO: 2280 - DNA, 2300 bp, Homo sapien
tgtcccttggcctcccaaactgctgggattacaggcataagccactgtgcctggctaaaaatagctattttgaattttctgtctctaaggttgtatatttctgtctctctggaattggtcactggtatcttattagatattggtgaggtcatgttttcttcgatggtcttgatgcttgtggatgttcattagtgtctgtgcattgaatggttagatgtttattgtagtcttcacagtctgggcttctttgtacctgtccttcttgggaaggctttccaagtatttgaggggaattgggcattgtgatctaagtctttggtcactgcagctgtatctgcattagggggcaccctaagcccagtaatgttgtggctcctgcagacttgtagaggttactgccttggtggtcttgggtcagatctgggagaattctctggattaccagggagagactcttgttctcttccctaactttctcccaaacaaatggagtctctttctctctgtgctgagctgcttggagccaggaggagtgacacagcacccctgtggccattaatactgggactggcctgggtcaggtctgaagccagcacagcactgggtcttgcccaaggtccacatggtgaccacttgcctgtctaccacctatgtttactcaaagcccaagggcactacaatcagcaggtggcaaatccagccaggcttatgtccttccttttagggcagccagttaccctagctctgggcagatccagagacgctatcagggcctggcgttgagaaccttaggaatcttcctgtcattctattctacagcagctgagctcacacccaaaccaaaagacaaactccttctcattcttctctcccgtttcctcaagcagaggaatctctccccatggccaccgctgccccaggcctgcagcaagtactgcaaggctgttgctgatattcactcaaggtccaagggctctttggtcagcttgtggtcaatgctgataggcctgggtatctcccttcagggcaacgggctcccctctggcccagagtgcgtccagaaataccatccaggagccaaggcctagaatcagggacctcaagagcacacttggtgttctaccccactgtggttgagcttgtaccctgcctgtaagacagagtcccctttactcttccctctcttttcctcaagcagaaagagtctctccctgtagccaccacagctgggaatatactgggtccctcctgaggccagcatggctctgagtctcacccaatgcccacagtgagtactgcctggctaccactgttgattatacagagcccaagggctctttggtcagcaggtgatgactcctgccaggactggatccttcccttcaaatgtgctggttgcattttggtccaaggtgtgtctagaaatgtcatccataagctaggtcctggaatgggggcctcaggactctggtcccttgttctactctggctgagctggtatccaagttgcaagacaaagtcctttttactcttctgtctcttcctgggctgtgaacaacactgcctggctttgcagtaagggtggcaaaaatgcactccctggccacccagctggtgtctcaataggtcatgtgcacctaagtctactgggctagtggagtggcaataacagacgatataaggtaggagttgcattgtgtctgagaagatgtggagaggactgtgaacctacttttgtgcaacactgaaaagtatatgcttcctttcagttaattgacatgagtctttgaagaatagactcacattctgagtctgtgagtgagtattttgtcattctacacccttacttagcaagctaaagtcctgaaaaatatgattcctgcattttcttgatttccagaataatatagcgtattccttaaaagaaagtggtttcatgaaaggtgttactttcaaaaaattaatcttcttttccttttttaaaaaataggattaaaagagtaaaattaatatctaacaaagggactgaaactgacaatgacccaagttgtgtccatcctatcattaagaggagacaatgtcgaccagagattagaatgtggcaaacaagagagaaagcaaaattttcagatggagaaaagtgccgtagggtaagatttagatggatttaacaaggggtttttttccccatgtaacattttcctattaagattctgttagagatataaaataggtactagtaggtttataaatttgtcctaacaagtaaaaccacaggatatgaaaagaagataccacat

SEQ ID NO: 2281 - DNA, 2300 bp, Homo sapien
cttctttctttccttcctatcttcctcttagtgaaggtgattttctctaggggtattttaaaatttatttctttttattttttatgcatcttttattatttttttaatttgggggttacattgaggcttgcaaataatattttataacctatttttttaaactggtaacactgattgcataaacaagcaaacaaactcataaaccagcaaagagaaaagtaataaaaactgtacactttcactctgtccccttgctttttaactttttgttgtttgtatttatatcttattatactgtctatgtcttgaaatgttgtattcttttaagttggttcatcttttagtcttcctattgaagatatgagtcgtttacacataacaattacagggttataatattctgtcttttttgtgtatttactattactaatgagttttgtaccttcagatgattgcttattgctcattaatgtcatttctttcaatttgaagaactctcttttgcatttcttgtaggcaggtctgttgttgatgaaatccttcagcttttgtttttttctggggatgtctttatttttacttcttgtttgaagtttatttttgttgggtatagtattgtaggacaaaaaggtttttcatttagcagtttaaatatgtcagaccggctggacatagtggctcaggcctataatcccagcactttgggaggtcaagatgggaggattgcttgaggccagaagttcaagaccaacctgggcaacattagggagacccagtctctacaaaaataaaaataaaaaatcagctggatgtggtgacctgtgcctgtggttccagctatgctggaggttgagacaagaagatcgcctgagcccaggacgttgaggcagtagtgagctgtaattgtgacagtgaactccagcctgggcaactgagatccccatctcaaaaaaaaaaaaaaaaaaaaaaagggaaaaataagtaagtaaataaatatgtcataccactctctcctagcctgtaaagtttgcactgagaagtctgctgccagaaatattggagtatctttgtatgctatttgtttcctttctcttgctgcttttaggatcctttctttatctttgatctttgagggtttgattgttaaatgccttgaggtaatcttctttgtgttaaatctgtttggtattgtatgaccttcttgtacttgaatattggtatcttactctagatttgggaagtttcctgttattatccctttgaataaactttatactcctgtctctctctctaccgcctctttaaggtcagtaactcttagatttgctgttttgaggctattttccagatcttttaggtgtgtttcattcttttttattctttttcttttgtctcctctgtgtctttttaaatatactgtcttgaagctcactaattctttcttctgcttgatcaattctgctgttaagagactctgatgcatttcttcagtatgtcagttgcatttttcagctccagaatttgtttgattttttttttttagttatttcactctctctgttaaatttatctgataggattctgaattccttctgtgtattcttgaatttgtttgagtttcctcaaaatagcttttttttttttttttttttttttttttttttgagacagggtttcactgtcattgctcaggttgaagtgcaatggtacaatctcggctcactgcaaactccacctcctaggctcaagtgatcctcctgcctcagccttccaagtagctgggactacaggcacatgccattgcacccagctaatttttgtaaagacgaggttttgccatgttgcccaggctggttttgaactccttagctcaactgatccacctgtcccttggcctcccaaactgctgggattacaggcataagccactgtgcctggctaaaaatagctattttgaattttctgtctctaaggttgtatatttctgtctctctggaattggtcactggtatcttattagatattggtgaggtcatgttttcttcgatggtcttgatgcttgtggatgttcattagtgtctgtgcattgaatggttagatgtttattgtagtcttcacagtctgggcttctttgtacctgtccttcttgggaaggctttccaagtatttgaggggaattgggcattgtgatctaagtctttggtcactgcagctgtatctgcattagggggcaccctaagcccagtaatgttgtggctcctgcagacttgtagaggttactgccttggtggtcttgggtc

SEQ ID NO: 2282 - DNA, 2300 bp, Homo sapien
ctgccaatgtgtgcaatataaaaataagggtaaaataatttttactttatttgagacaggtctctgttgcctaggccgaagtgcagtggtgcaatcatagctcactacagcctcgaactcgtggactcagacgatcctcctgcctcagtcttcgaagtagctgggactacaggtgcgcgccaccacccccggctaattttttttttttaagagacggggtctggccatgttgctaaggctggtctcaaactcctgtgctcaagctacatttccgcctcaggcctcccaaagcgcccagattgcaggcgtgagccactgcgcccaggctgggtgaagtaatttgtaaaacttagtcctgtgggagttattttagcttagtcgattttcctcatccgtgaaatgggataacttccacctggtgcccactcaatagataagaagaaataatgtctgcaaaacattgagtacagcgcctcttaggctttcttaagtgaagctatcatctgtcattagctttctctgacccagatgctacacgctgtgggctagcaagaacacggcttcaaataaggtggggagaatggctgtaaggggacagtgttccattaatggccaaaaaaaaaaaaaaaaaaaaagcagcctaaaaatccttttaacgtatccttaaatattcacttgagggttcaacctttctttcctttctcctgacctctatcggccctaattaacctgttcctgccgccacctaactttaccctaatttggaaaaagctgtgactgcccaatacttgttcctcttttccccctacacctttgagcactagaaagctccagacccagagctgctgaggggcgggagaggaagggagtcactaagccgcagcctggcccttcctcccagggcagcgtaaattcacgcaaacattgattcgttcgctcaacaaacattgggaacctaagtgccaggcttgtgccaggccccagtctctgacctcatggagcccacagcccactggggaacagagattaagccatgaaacacgaaaatgagtgccacaaagacgtgagctactagagtatcaggaccgacctcctttagaccgctggatgggagagtcgtttgtgaggaagtgacttttaagctgaggcctgaagggtgatctgagggagctgctcttggccatcgatatgccgcgcgactccccaggccctcggacccggagcctggaccaaggctgggcgggaaggccccgggccaggggcggagccacctcggcggcgaaagccggaaagcggaagccgaaggctgctgcccggtggtcggctgagcggctctagcccagatctcagacggctgagtcactgcatcccggcgcggcccgcagaagacgagcgccgctgccgccgcctcctcctcccgggctcccgggctctcggggtccggggcctttgcacctgtcttttccagctgggcacaaagccttttgctgtcgccgtggcgactggaggccttcacttttaatccccctcattttccagttcattctctgcttattttctggtcagtccgtgaccctgtaggcggcctctgaccggcgatcgatttgccgccctcagggcgctgggcggccggctgcctccgaagctggggcggcctccgcggtctccatggtaacggcctctccggcgtctccgcctggaggggaagatgcggcctgcctggcccgccgcctcgcccccggcctcacggtgggaccccgggcactgaggacggaggtcccgggcgccggcccgcggggcaacgggcactaggtgagagccggacgcgggcgagcgaaggaggcgggtgccgggcgactccagcggcggcccctgcccctcccccgcacccacgaacacgctcgcccgatatattgcagaggcttctccggtcgccgctgcgccagtttttttttgtttgtttgttgtgttttccctggcaaacagctggagaaagagcagctcatggagaggctgagagaagcggttttcgcgtcctacccaaactgggagagtaaccttcagcagctggactcaccgattggttttccttcattttcagtgaaatcccattctctggctggagacacagatggcctcaaatgagagagatgctatatcgtggtaccaaaagaaggtaatacatatatatattttttttatttgtaaagcattcttcctgcaaaaagctcccacaaataatataatgttactttcccccgagtttagtagtgccaggtgttcatgtatacttcaacata

SEQ ID NO: 2283 - DNA, 2300 bp, Homo sapien
atctacttaaaagaggacagtcttaaatttttattctggtgatgtggattttcttgaaagtgcattgagtattaatgaagatggcgtatagacttttatgtcattgatgtattaatgtgacacaacaaaatggatttctttcctcatcagtttttgtgtgaagttatctttaattgaggtacctgtcctaagcactgatagcctttggttctgtctaggaaaggaaaagaaagggacttcacattttttgagtaactgccatgggccaggcagtttatatgagggtttctcatttaatcctcacatccttaagaaggtgactatctccataatacaggtgagaaaacaggcttgttagttgaataaattgcttaagatcacagattattggttgggagcaaggattcagaccttgttcgctggtagccgcaggaagcactgaatagtttccaacagggcacctgaaaaatggtttactacttaccactattctctaatacttcttacctgattcagttcctccagacactccctgaaaatctgtgtgccaaacagtgaagtaaagtacttttgctattaatgtaattgaggttaaatatttacgtgtgcaaaattcgacgtttttcacttgtcatttatctcttttttcaagttggccatttgtcttgaagctcaacagaattgtaatgtttagcactaaggaaaggaaaagctgtcaaggagcaaaagcagaaggaaaccactgccaatgtgtgcaatataaaaataagggtaaaataatttttactttatttgagacaggtctctgttgcctaggccgaagtgcagtggtgcaatcatagctcactacagcctcgaactcgtggactcagacgatcctcctgcctcagtcttcgaagtagctgggactacaggtgcgcgccaccacccccggctaattttttttttttaagagacggggtctggccatgttgctaaggctggtctcaaactcctgtgctcaagctacatttccgcctcaggcctcccaaagcgcccagattgcaggcgtgagccactgcgcccaggctgggtgaagtaatttgtaaaacttagtcctgtgggagttattttagcttagtcgattttcctcatccgtgaaatgggataacttccacctggtgcccactcaatagataagaagaaataatgtctgcaaaacattgagtacagcgcctcttaggctttcttaagtgaagctatcatctgtcattagctttctctgacccagatgctacacgctgtgggctagcaagaacacggcttcaaataaggtggggagaatggctgtaaggggacagtgttccattaatggccaaaaaaaaaaaaaaaaaaaaagcagcctaaaaatccttttaacgtatccttaaatattcacttgagggttcaacctttctttcctttctcctgacctctatcggccctaattaacctgttcctgccgccacctaactttaccctaatttggaaaaagctgtgactgcccaatacttgttcctcttttccccctacacctttgagcactagaaagctccagacccagagctgctgaggggcgggagaggaagggagtcactaagccgcagcctggcccttcctcccagggcagcgtaaattcacgcaaacattgattcgttcgctcaacaaacattgggaacctaagtgccaggcttgtgccaggccccagtctctgacctcatggagcccacagcccactggggaacagagattaagccatgaaacacgaaaatgagtgccacaaagacgtgagctactagagtatcaggaccgacctcctttagaccgctggatgggagagtcgtttgtgaggaagtgacttttaagctgaggcctgaagggtgatctgagggagctgctcttggccatcgatatgccgcgcgactccccaggccctcggacccggagcctggaccaaggctgggcgggaaggccccgggccaggggcggagccacctcggcggcgaaagccggaaagcggaagccgaaggctgctgcccggtggtcggctgagcggctctagcccagatctcagacggctgagtcactgcatcccggcgcggcccgcagaagacgagcgccgctgccgccgcctcctcctcccgggctcccgggctctcggggtccggggcctttgcacctgtcttttccagctgggcacaaagccttttgctgtcgccgtggcgactggaggccttcacttttaatccccctcattttccagttcattctctgcttatttt

SEQ ID NO: 2284 - DNA, 2300 bp, Homo sapien
agtattggaactgtcatatatttacatattgtaccaagtaaattcttaactctaaaatttgttgaacttgtttttctagatgtaaaaataggattaattggaatatttgtcttaactccaaattacttcaattatgttagaaaaaacgattgtttggtgggtaaattctatgcagtaaatactagaccaaacttgaaggttcgtcaggactctacctggtatttaatcctgaaagtttcctgctaggtatattttccaattagtaaacaaaagatgccattccatcttgggcttgtcaatccatgataatcctttaaaacttaaaaataagtttttaaattataaaagtaatatgtttattttagaaaattagaaaatacagataagcagaaaagctagacatttagaattctaccaccaatagataactaccattaatagcttggtatatatttctccagatatttttctgtgtgtgtgtgtgtgtgtgtgtgtgtgtgtgtgtgtgtgtgtgtgtaaagcatctatagatcagacagacttcttcatctctttaggtccttttcttctttctgggaatattttctcctagacctttacatgcctggcttgtcttattctttaggaatcactcttaatgttacctccccaaaagagcttcccccaaacttaatgcatcccacttatcactatctggtactttctttttcttgtacaattagatcataagacccaagagatgccaggcaccatgggtcacacctgtaatcccagaacttagggaggtagaggcaggagtatagcttgagccctgcctgggcaacatatggagactccatactcctcaaaaagcggggagaaaaagatccaagagattggggattgtgtatgtcctagtcagcattatggtcctagcacttagtaggtacttaaatgtttggatgaattaatgtttatataaaaatgggatcagaatgtacatgtgttaagtgctcaggagagaaaggtaaggtatacatcactgaacttagattgctgacagtctaggggagggtgtaaaatgaaatgttaataacacagagtataagtgctgagatggggatacaaagcttaagggagcccatagcaggagtagctatccagattgggtggggaagaaaaggctttctgaaagaatgagtctaagcattttgtaaccttctaatttttatgtcagttttttcatctataatatactttacaatggctgagtagtgttttataatatgtaactaccagagtttaatcagtcccctgttattagacatttaggagcattccctgttgtgtcgttttaaataatactgtaatggatatctttatataatcttcaattattttcttagataacttttacttggaagtggaatttctgggtctgaggattagaaatattttttaagacttttaacatgtatcatgaaattgcccttcagaaagttgtaccagtttatacttccagcagtagtagttgagaatgaccagaaaccgcagactttgccaacttgataggaaaaaatgatatctcatggcttactttgcctttgttgatttacctgtatgtatcatagtaattcataggctgacagcaaaatatgcctagcttaaatttaaattttatgatgataactgaacaaaagaatctatgttgttacatagatttcagaatcatcatatttagctatcgtataatgtttcataccattgctatatcatgatttatttaaccattctctgttttttggatgtgtgaattatttctgatttttctccattatcagtaatatactgctttgaaaaatggataccttcaattttattcttttcttcaatccagaatattattatatttaagatctctgtctcatttgttttctaaacacgtaagttgtaatagcaaattcagagaaattgaggataggctatttaatgagatcaagtaccttaagaagcttgtatgttgacactagtcctagcaactaacttctttttaattattgtggccagaaacaccagatgaaaatggtaaaacccagagagccgatgattttgtcttgaagaaaataaagaagaaaaagaaaaagaaacaccgagaagacatgcgaggaagacgccttaaaatgtacaataaggaagtacaaaccgtctgtgctggcctgacccgcatcagtaaagaaattctcacccaaggacaaataaatagcacttcaggacttaataaggagtccttcaggtatctgaaagatgaacagctgtgccga

SEQ ID NO: 2285 - DNA, 2300 bp, Homo sapien
ctcaactaatttctacattgccagaatatactataaaaagttaaaaaaaaaacttactttgtgggttgcaatacaaactgctcttgacaatgactattccctgacagttatttttgcctaaatggagtataccttgtaaatcttcccaaatgttgtggaaaactggaatattaagaaaatgagaaattatatttattagaataaaatgtgcaaataatgacaattatttgaatgtaacaaggaattcaactgaaatcctgataagttttaaccaaagtcattaaattaccaattctagaaaagtaatcaatgaaatataatagctatcttttggtagcaaaagatataaattgtatatgtttatacaggatctttcagatcatgtgcaatttttatctaaccaatcagaaatactagtttaaaatgaatttctatatgaatatggatctgccataagaaaatctagttcaactctaattttatgtagtaaataaattggcaggtaattgtttttacaaagaatccacctgacttcccctaatgcattaaaaatatttttatttaaataactttatttataacttttagaaacatgtagtattgtttaaacatcatttgttcttcagtatttttcatttggaagtccaatagggcaaattgaatgaagtattattatctgtctcttgtagtacaatgtatccaacagacactcaataaactttttggttgttaaactgacttcattgcagtagtgtttaggtaatacttctccagaaactagtgaaatcaaaccacagtaattttatctgctgagtatatatcattgtaatcaattacttccaaatgtctttatcaataaacaaatatactaaaagaattctaggtaaccatgagttacttagggcaccatgagtgcatctgtagacccagctactcattccttgagcccaggagttggaggccagcctggtcaacagagcgagaccttgtctcttttttttaagagtcagggtctagatctgtcacccaggccagagtgcagtggtgcgaccactcctcccaccttagcctcacgagtacctgggactacaggcgcgtgtcacgacacccagataatttaaaaaatacttttgtagggacagaggctcactatgttaccaacgctgatctggaactcctggcctcatgcaatcctcccgcctcggcctcccaaagctctgggattaccggcctgagacaccgagccccgccccgcccgtctctaaataaatacttaaaagaaccccaggtaaaagctaaagcgaggatgaaattctaaatgaatttctgagcaacaactatccgtagtgagcagtgatgatttttggtgtgttctccggtaggcacacttttcaaatttatgcaatcttatccttaagatttgaaaaaaaaaaacttataaaaaatcttaaacgtggttttccatctacaatttttcgcaactgtagggatatattcaaaataaatgctggacatttccaggcattagaggggatgtggccggatggcgaggaggggccgtcctcaccaggactccaagcagttctcgcacctgacttcgtaggcctgtagttgtaaccatagcaatgccccagatgcttgaaaacatttctgaattgcggccctatcatatttttacagcaaaaccacccttattttacatattactaaatcctcttttcaccttcatttcatccctcgtcaaagttaaaaggatgaagattcttttatctcacaaaggttatgagagaaatattaaatttaaaatcactgtggagaccacctcctccgtgtaaaatgaggaagggtcacaggaagatgataatgggaacgcgccgccagactctgaaagccattaacattgtttcggccgttagggcggttggcggcaactcaccgcccagcggcggttgcgtcgcagccagaagcgtgacttcgcgcacgctccctttccactcctccactcagagccggggacgcggcgggggcgcggcggaactacagctcccatgacgctttgcgcggcatagggtgctttacaatagaagctcggttggagaggcctgcggagaaaagctgggaacggccgcttccggcatgttcatctctggacgaagaacggccgacaagtggagggcggaggagagactccaatgcccagcgggcagtgcgcgggcggcgcttgcgcgatgcgcggacgggggggcggtcgggccatttaaatgtgtgtttgtgggtgaaatggctgcgcaggtcggagc

SEQ ID NO: 2286 - DNA, 2300 bp, Homo sapien
tttcaaaaattgcaacagagctacagtaattaaaacagtgtggtactgacatagtatagactaaagaccaatggaatagaagagctttgaaaaaaacatttacatatggtgggcaattgatttttgacaaaagtgccaagaaaattcaatggagaaaggagagtgttttcaataaatgattctgggaaaaactgaatatacacatgcaaaagaatgaagttgaggctgggtgcggtggctcatgcctgtaatcccagcactttgggaggctgaggcgggtggatcacctgaggtcaggagtttgagaccagcctgaccaacatggagaaaccccgtctctactaaaaatacaaaattagccaggcatggtggcgcatgcctgtaatcccagctactcaagaggctgaggccggagaatcacttgaaccagggaggtggaggttccagtgagccaagatcacgccattgcactccaccctgggcagcaagaacgaaactccatctcaaaggaaaaaaaaaaagagagagaatgaagttggacccttatcttatgatacagaaattaactcaaaaattgatcaaatacctaaacataagaagtaaaatgtaaaactcttataagaaaatgggcaagcttcatgacattggatttggcaacgatttcttggataggacaccaaaggcacaaacaacaaaagaataataggaaaattggacttcattgagattaagacttttacacaccaaaggacacaaaggcaaaaaggcaacccattgactgaatggaagacggtatttgcaaatcacatatctgataagggatcaatatccagaatacatagagaactcctaaaactcaacaacatgtaaacaactcttttttttttttttttggtggagggggacagagtcttactctgtcacccaggctagagtgcagtggtgcgatctcggctcactgcagcctctgcctcctggggtccagcaattctcctgcattagcctcccaagtacctgggattacaggcacacgccaccacacccggctaatttttgtctttgtaggagagacgggatttcaccatgttggccaggctgatctcaaactcctgacctcaagtgatctgcccgcctcggcctcccaaagtgctgggattacaggcgtgagccaccgcatacagcctcaattaaaaaatgagcaaaatctgggcaccatggctcatgcttttagtctcagctactggggagtttgagatgggaggactccttgaggccaggagttcaagactagcctgggcaacataatgagaccctgtctctaaaaaaaaaattaaaaaaaaattagcttggtgtggtagtgcatacctatagtttcagctactcaggagctgaggtgggaggatcacttaaggcccaagagtttgaggcttcagtgagccatgatggtgccactggactccagcctgaatgacagagcaagaccctgactaaaaaaaaagtaggggtgggtgggagaaggcaaaggacttgaagagacatttttccaaagaggatatacaaatggccaataagaccacagaaaggtgtctaatcattaggaaaatataaatcaaaatcacaatgagataccacttcacacctaattaggatggctgccatcaaaaaaacaaaataggccaggcgtggtggctcacgcctgtaatcccagcactttgggaggccgaggccggcggatcacgaagtcaagagattgagaccatcctggctaacatggtgaaaccccatctctactaaaaatacaaaaattatctgggcgtggtggcatgtgcctgtaatcccagctacttgggaggctgaggcaggagaatcgcttgaacccgggaggcagaggttgcattgagccaagattgcgccactgcactccagcctggcaacagagcgagactgtgctcaaaagacaaacaaataaacaaaaaacagaaaataaaaagtgttggccaggatgtagagaaattggaatccttgtgtactgttggtgggaatgtaaaatggcacagctgctatggaaaagagtatggctgttctaaaagaaaactaaacggccgggcgcggtggctcacgcctgtaatcccagcactttgggaggccgaggcgggcggatcacgaggtcaggagatcgagaccatcccggctaaaacggtgaaaccccgtctctactaaaactacaaaaaatagccgggcgtagtggcgggcgcctgtagtcctagctacttgggaggctgaggcaggagaatggcgtg

SEQ ID NO: 2287 - DNA, 2300 bp, Homo sapien
gcactgaaatgaaagatcacagtagcatgtatgcatgtatacctagagagaatggaccattgacagtagctggaaaatttcaccagcagatttgaggaagaagatacctggggacaattaaactttccaaaccccaccatttcccagagcccatttgtcatgcaagaggtcctaggcaacatctcagagcaagagtctctagaactgtactactcacaagtaacttatcagaaaaacatgaatttaatgcttaggttgaatttattatcgtttgtttttgctattaaccttttcccctttcaattacacagtcctggccagactctgacatttggttcattttgggtagaaggtttatatatagtgtcatacctgcagtgaatgcatatgggaacactgtcatcctcttggtaacaacgtacatcccagatgagctcaagaatagggtctatagatgaaggtacatcatggtctggccaattcttgtaatgaaactggtagatagttcgagtttcctataaaaagtagccagatgggaggggaagaggggcaagggctgaaaaaccacctattgggtattatgctcactacctgggtgatgggattattcagtggcatgcatgcaacaaacctgcacatttacgcccttgtgtcttatattcataagattaaagttgaggctgggtgtggtggcttacgcctgtaatcctagcactttgggaggccgaagcaggcagattacttgaggtcaggagttcaagaccaacctggccaacatggggaaaccctgtctctactaaaaatacaaaagttagccaggcaaggtggtgagcacctgtagtcccagctactggggaggccacggcacaagagttgcttggacccaggaggctcaggttgcagtaagccaagattgcaccactgcacactccacactccagactgggtgacagagcgagactctgtctcaaaaaaaaaaaaaaaaaaaaaaaagttgaaattattttaaaaatagccaggataataagacaacttgtggttagaactccacctcattataccaagacaacagtccggcatactaagttgtatctatatcctttttgaaatttattccggtttcttctctatagatctcaggtgaccagatgctttctgaaaaccattaaaagtgatttcaggtcacttactattggtttgtccccatctgccccattcacaagaggaaatagctagatatgaaaatagttcaaaccagtgtttcccaactggtatgcctccaatgtgtcacaatcatgctgatatattaaatctttttgccttagagaagctgggcagggcctagggcagcctaagctctcaaactggtccccagtctctatgcactgttcagcttctgttcaccctacaaatattatcattttatatgtgtgccatggtatagaatagattgaagacatattataacaatggtctcttctttttttcttcttctttgagacacagtcttgctctgtcacccaggctgcagtacagtggcaccatctcggttcactgcaacctccacctccagggcttaaatgatttctcctgcctaagcctcttgactagctggaaccacaggcatgcaccaccacgcccagctaattttttgtgtgtttttagtagagacaggtttttgccatgtcggccaggctcaaagttctcttgaatatgaagactcattcatgacatcaaagaccctaccacttcccattgtcttatgcccagcctgagctacacacatctatatttacttgcctgatctctataggcttttgagtttatcattcttattttatacttacactattgaacttaacttttagagtcctgattatataatcagatttccttttttcagcttcctaaaaagaaaaagaagactcaagtattagtgattgcaaagacaagctctctataaggtagaccctggaggctttactcagacatgagaacagacattacacttacacaggatacagagaaagggccaaattccagctgcatctctcctggctcagcccagtagcgctcacactttttctgttgcacaaagcagaatacagtgatttccctccatatattctagtcttttccactctctcatttggaagcaaattcagctctatgtccttcaccttaggttaggtgcgtctaacccctttgggcttcaacccctacattattggaatctccaaagatgggaaaacaaacattaaaggatatataaattacagacttcctgggagtctgaaaaa

SEQ ID NO: 2288 - DNA, 2300 bp, Homo sapien
aactatattatcttctttgtccaaacatagaaaatcattttccttttaggattatgctttgctactctgcaattaagcaagttagtttggaatgtttttatttttattttctttcccaaagttacctaaggagtgttttaatttttatcagtaatcatgtctgtatctttagttctgagttgctttattaactggctaaggatgtttttgttttgttttgttttgtttttaccatattctggctttctcagtgttgtatgccaatctcctaagacaatgtttagaatttagtgggtactcaataaatttgttgaacaacttaatggatttttaaatgtttatttctaattttaaaaacggtatgataattttagaaagcaaactttatcataattctaaaattatgataattttagaaagcaaacttacacaattgattcttttttgcttcttttagtctttaactatgtacacacttttacatggttttagttattacaaacttgaaattttgtatttttataaatcaaagatttcccatattttatgttttaaaatagccaaagtaaacatcacgttacttagagcagcaagaaattctctcttaattctagatggggataatttaagaaatatactattcctaacaaatattgctgaagaatgagggtttattttaatttatgtatactgggattgagtttcttaatttgaaatattgtctttaagttgtctataaccaagatatctcgatgatctttcttttttttttgcagtacttagtaaagagcatgcagtatctttaatgttcagattaagcagtgttcagaatcatgatatcctgaaggaagtttgaataatgttgcaaaacagaaaggattgctaatatcttaaatagaggaagtcctaacaacacatttcccagttttcttcaggatcaagactaattttgttaacatttgttgaacttctgccttcaataaagatgatatactgatttttggatgttctcacactgaattaggcacttgggtagacttgtacccattgagaggttatgcaagctcaaatgtggaaagtttttctagaagagcctgcctttcagggccaaaatgccacaggcacagcataacttcctgaaacaaatttatttcctaagacattggttgcagagtagaaatgtgttctttagaaacagttcttcaggctttctgccctaaaagttacaatgttgtcagcaaggtggttgattttactttctttttgttccatcacagtttaccagcattacatatgcagggtattgagctaactgtctggtcaggtgctccttgtgggggccacttgctctagatcctatatagaccaacactcttagtctttatatccagaacccaagtgaagcttcaaaggttactgggagggttgaagaggtgctgaaatcaacacttcccttaatggaggtcagcacttccccagtcctgggagagacacagactgtcagaagcatctgactttgcttcattcaaaagggagtttgaggtatatatagcagacttaaaagttatgaataaaaataccttctgtgatgaacagaagtttctcattgatcacactgacaagaaacctttcgatgaacagtccgggtagaagacatgtcactcactctaaacagtgtctgtcttctttcctgggcctaactgaactttgcagagttcatttgggacataaggaaacagaaggtgtcaacttggcccttgtgctcactgggaaaatggggagagacagaactcattcaggagacctgtaattctgttctttctctgggaggcaagaagaaaggtgagttttgcatatgggtgatggaatggaataatctcagttaagcagaccacactttacgttctagttagcctcttgtttgttaaaaatttgaattgtaaccaggttcctttgctgagaaggaaggcactagggccctggagtgagatgatggctgtgttatgtgaccacagaaggtggttacgtactaatttcctctagggcttgtgatgaagtcagtaaaccacagccttcagcatgctctgctcaggcggcagcagtggctttttggaggtgtctcggccatgacacacatttgacatgccctccctcaacctacttatagactatttttcttgctctgcagcatggaccaaagagaaattctgcagaagttcctggatgaggcccaaagcaagaaaattactaaagaggagtttgccaatgaatttctggtgagtcctgtatgtgaccctctc

SEQ ID NO: 2289 - DNA, 2300 bp, Homo sapien
tttaatgaattattattattttattattaattctaattaactactatttttgagacagtctttctctgttgcctaggctggagtgtagtggctcaatgatagctcactctagcctcaatctcataggcttaagtgatcctccaacctcagcctcataagtagttgggactacaggcatgtgctaccatgcctagctactttttaaaatttttcatagagacagggtctcaatatgttgcccaggctagtcttgaactcctgacctcatgtgatcctcccactttcgcctcccaaagtgttgggattacgggtgtgaaccactgcattcggtcttttttttatttgagatggagtctcgctctgtcgcccaggctggagtgcagtggcgtgatctcggctcacttcaaccttcgcctcccaggttcaagtgatgctgctgcctcagcctcctgagtagctgggattacaggcctgtaccaccatgcctggctaatttttgtatttttagtagagacagggtttcagcatgttggccaggctggtcttgaactcctgacctcaggtgatctcccagtctcagcctcccaaagtgctgggattacaggcatgagccactgcccccggcctttactttagagtctcccagacatttcctagtcattcaagcaatacctttacaatttaaccagctggactatcacatacttaatatttttctttcaaatcatttttcattcattttgtttaacctaagcaataatacctgaagtcatgggtttgatggactacttatgtattttcaagtgcccattaagataacaaaatattaaaatgagaaaagattattcatctactctctaagatttccttagttaccaccagttgcacatttggcactctaagaaacaattgctttactggattcctgcacctgcagcctcctgcactttttgagtgatactctgttgatgtttcctttgtctttcctcagacaggagctatactccaggacactgtggaatctctcagcaagacctggtgtgctcaggattccagcttagcttatgagagagcttttctggcagtgtcagtgaaacttcttgagtacatggctcacattgctcctgaagtagtgggacaggtggctatccccatgacgggtatgatcaatgggaaccaagccatccgggagttcatccagggccagggaggttgggtaagtttgttggggctcctggttttgctaggtatttgcactgtttttgtactaatacctgggattccaattcatgaccctttttgtaaattggaaaccaacaggaaaacaggcttccctattttgctgaaaatgcctagattttcttgccatggaaaaatggagcagacagaagctcagcctgtggatgttggactcgagtcatgctaccttaaatattgactgctgactactgtaaagctaatcttcatttcctacacataatcatctataaagtatattcatgatagagttctaatttcagcctggcttcactccgttcctttgtaaatttctgggtctttttttcctaacttctctatgtgtgtgttagggaagtcagaatcaccttaatagtatctaagaaaaaacagtctttgctgtagtggtaactatataaggtattctaagcccatgttttagtaatcatcagaacttatgctgtcatagagcactcctttccatttacagggtcagtgaaagccttaataagagctacatttcctggagctatctgcagatcatttcctggtttcttaggaagttcctgaaagcaattcctttgactgtaggattttctctgtcttccctaggaaaatctggagagctgaagagttggagctattcacgagactgaacatcacttccttgttgactgattgggtgattgattcctgggaattcaaacaaacaaataaaaaagcacttttttcattttatcagaactgaacttagctgaataagttattttttactgattgttaaagttgggagcagctgccagaggcctgcagagttggtttttgttttgttttgttttgtcaacttaatgcaaaccacagagattttctactttctgttttcacatgagttttaatgaggttctgttgaagcaaagacccctagacacaaagtaatgacttgttagtagtggaattataagcaacagggcaggcctttgctggaggtattttgagagaaagggagaacaatggaaactatttcttcagatgtagccctgtcttttggtaagaattgtgcctac

SEQ ID NO: 2290 - DNA, 2300 bp, Homo sapien
tggtacaatttgttgtaactgatgaacttacctcatcaattattacccaaagtccaattaccacccaaattcctcctcatcttttcatggcctgatctttttttttgagacacagtcttgctctgtcacccaggttggagtgccatggtgccctctcagctcactgcaaactccgcctcccaggttcaagcaattctcctgcctcagcctcctgagtagctggaattacaggcgtgagccaccgcgcccagccagctcatttctttttagcactaaataatgtctattgtctgtatgtatcacagtttatttattcatttacctactgaaggacatattggttgcttccaagtttgggcagttatgaataaagctgctataaacaaccatgtgcaagtttttgtgtagataagttttcagctcctttgggtagataccaaggagtataattgctaaatcatatggtaagaggatgtttagttttgtgagaaactgctaaactcttccaaagtggctgtaccattttgcattcctaccagcaatgaatgacagttcctgacccacatcctcaccagcatttggttttgccagtgttctggattttggccattttaataggtgtgcagtggttgtatgtgttttagaatggaacagaaaacacaagattggctttgatattttgcaagatagaaattccattctgaacaactgacttactgtttatgcttgaatctttttttgttttttttttttttggagacagagtcttgctctgtcacccaggctggagtgcagtggcgtaatatcgactcatcgcaacctccgcctcccaggttcaagcgattctcatgcctcagcctccttagtagctgggattacaggcatgcaccaccacgcccagttcatttttgtattttttagtagagatgggttttgccatgttggccaggctggtcgtgaactcctgacctccggttatctgcccgcctcagcctcccaaaagtgctgggattacaggtatgagccaccatgcccggcctatgcttgactcttttattagttggagctgttaatattaataacttcaccaggtcagacaggttgagtggtaagtttgctgataggtttgatggctgcttctgagacccagacccaaaatctaggtttagctacgttaagaaggcaaccactacagataagtgtccaatcatgagatctcttaaaacaatgatggagtccaaccctgttaggaaaatccttttgctagacagagaatctcagatctctttcctcctggtcattatgtcttgggctaaaaggaggacatttaacatttattgtatgccaaacagtgctaggccattccgcatgttatcttatttaatcctcataatttatctatgaaatattttctgttgtccccatttataattccaagttgtttttttttaaccttcccagactttatatctgctacctctccgcctagaatagtgttatgcctcctttttgcataatgaatgcctacttattcctcagagctcatgtcagatggtactattttaaggaagccttcccagtcccctaggtttgtttccctattaaactgatcaaaggcttgattccctgttacacttcactgatcaaagtgcactgatctcaatagcacaaataacaatgcgattactcatttaatatctgtcatttctgctgaagtgtaagcttcatgagcacagtaactgtgcctgtatcatttttctatgttacttgtagtgccaactatagttccttgttcagtaagtaattattatatgattatggcaaataaattccataaacagaagttgaacgctggtccactgtaacttcaaaaccttccttcaaattataccatgtgcaggacctaagaagtcgaggaagtatttcttaataaaattactccagaggctcttcctgaactctatttcagttctaggttggctacctaacgataaaagttaagcattaattttatgtggttagggtgtggtctgagatagagaacctaaagtctttaaagtctccccagttccaagtaggtaatccttctgagaagtcccacctttctgagcagctgtgtttgaagaaagctagtgggaaaagttccaggattacatgtcaggaaactacaagaggtagaaacatttgttgatttaccagtgtttttaacttcctgctgggctgaaaactgcttgtttcgtggaaaagcaaaacttgacagcaaacatctaaaatgaagagctcccaaacttttgaggaac

SEQ ID NO: 2291 - DNA, 2300 bp, Homo sapien
tacatcaaactacagaaagtggaggtgctgtgtgaactggtgaacgatgagaatgtgcagcaggtgctagaggagcttcgagggtactgcacggatgtgtctgcggactttgcacaggctgccatctttgccataggtaggtgtctgctccttttccttcttgagaacctagaccagccagcaagaaaactgtggttagaggaaccatagagagcaaagggcatgaatcttgcttcagaagcaaagtactatgcactaaataattgggtcagtgactacaaacacgggggaagagagtttttttttgttttttgtttttttttggtcaagattggtgttgctgtatcttccaggatggagaatacaggtaacacaaactacaatacttaaaattgttgttgtcttctatccaaaatgctttcctatacatcatcttaccacagtatcgtgagacagtcaggaaaagtagacaaatgtcattaacttcattttaaagatgaagaaactcaggcacaaaaacagttatcaaattgccaaaagggcacatagttttagaaatgggactgaaatccagctttcctgactcaaagtcctatgttaatccaccagtcatttattgagcttctgctatgggctatgtattgtgctgaatgtagaccaacacagaataattcctaaatcttacagactttttcatagtaccctgtctggaatttgaaaggctggagtgactcaaaaactgaaaacagctgttgagccaagttttgaaggatttcaagtacaggaggaggagcaaccctcatatttggaataaagcatggttattttaggggcagagaagagggagcaaagaggagacaagaaatccttaggagactgctgtcaagtgtcccccacaaaaatactccattgcaggtgtgctgcaacaaaaagggtacctcatatctggctgccatgtaaatacctttgttactataagttttcaaccttgtttaatggggaattgttttgctatgagctttcagttttctagtagtcagtgagaaaaaatgatttttaccaaagttccctttatagtaaacttatattcttagttcatcaagtaaggagtgaatttttttcttttttttttttttagataattctgtttcttttgtctttcactggtgggagatgattttagattgaggtgctaatatttcacttagcagttttctctgctttcccttcttttgtaggtggcattgccaggacttacacagatcaatgtgttcagattttaacagagttgctgggtcttcgacaagagcacattaccacaggtaatgcctgcctttttaggatttttgttttttttgtcaggtgcctggcctatagtagttgctcaaaacatgtttgttgttgaatgagtaatatagagatttgaacttttccttgcatcatcatctgttgctgttagagaagcataaagtctatagatctaataggatattgagtcttcaggctgccatgatctataaggctgtactatagataatgaaggctactaggatgaccttgcttgatatttcaccatctttacttctctttttgttttatggcagtatgccataggcagtggcttccagggttgggacaagggtaagtcaagcaagatgcctaggatgcaaaatttaagaaggcactcactcttaggttcctgcaagagccaatcctgcatgtcttcttcaattttgaaccctaggcacctcacttgtgttatcattttcccaggcctggtggttctatttatactgtctttagtgtttcattcaacagcaatactaccccacatttgcatacagctttatgttttacaaagtgctttttcatacattagttcatttatcctcatgtcaatctgataagagcaatatgcattcaagaaattattgcttatttcattacatttcttagataaccattgaccacacctccaaaacccattttacagaaatccagccagaatcatgagtctgaatacatgactgttcttaagattcctgcctacctggaggctctaatcctgtgctcttgtaccctggcctgtattgtagtggtggtgcagactttccgagacctggtttggttgtgtcctcagtgtactgaagctgtatgtcaggccctgcccggctgtgaagagaacattcaagatagtgaggtagactgtaattctcctttacttctaggtagggggagaatgcttgaaaccctgccctttgaaatggaatctaattattctctctaccctgtgtttgaag

SEQ ID NO: 2292 - DNA, 2300 bp, Homo sapien
tgaaaagtcaaattaggctgggcacagtggctcatgcctgtagacccagcactttgggaggcttagacaggaagattgcttgagcccaggaatttgagaccagctgggcaagatggtgagagcctatatctacaaaaaattaaatgggcatggtgacacgcacctgtagtctcagctactaggaaggctgaggcaggaggatggcttgggcccgggaattcaaggcagcagtgagctatgatcgggccactgggtgacaaagtgagaccccatcttgaaaaaaacaagaaaaaaacagaaaagtcaaattatggctttttaagcttgatagaggctttctgcaattcttcatgatctgatgggtgcagcatctactaaaccatctgttaggtgaacaggggctgaggtatgtcaaaattagtatttcagaatctggctaactccaggatgtgttgcttaggatgcctggtgtgcaggagtatatacaacagcctattctcaatggtctgcgggataaggcttcatatgtcaggagagtggcagtccttggatgtgccaagatgcataatcttcatggagactctgaagtaggtaagttcagtgtaatccatcatggtcaatgtgcctccattatgtataactttaaaaaagattgtgtggctttggtagaaaataataatgtggccccagttctgtacatatctctttaagtaggatgcagggcttggtatcttctggagatgagaagtcctttctctggggccccaatgagatcctttgtattagctgcttagaacagtctggacatggcagttttttttttgccttgcactttagtgtggcctttgtcatttttgtagcagagaagttcaactttgtctacctggagctattactctggctacatccttgttactctgaagctttccttctttatctaagaactttgttcttttttatagatggtgccctggtaaatgaattatacagtttgctgcgtgaccaggatccaattgtagttgtgaactgcttgaggtctctagaggaaattctgaaacaggaaggaggcgttgtcatcaataagcccattgctcaccatctcttaaatcggtttggatgcctcagcactctttttattatgagatctgctaccttgtgggatcttgttgatgtattaaagtattgaacaacttatgtggggtagaaaagaaagttaaccattattattattattatttgagacggagttttgctcttgttgtctaagctggagtgcaatggcgctatctcggcttaccgcaacctccgcctcctgggttcaagcaattctcctgcctcagcctcccgagtagctgggattataggcatgcgccaccatgcccggctaattttgtatttttagtagagacagggtttcaccatgttggtcaggctggtcccaaacttctgacctcaggtgatccgcccgcctcagcctcccaaagtgctgggattacagacgtgagccactgcgcccggccagttaaccactattaactccctcacattccactgagagaatttcttttatttgccttactttcccttattgatatagggaaatagaaatatactgtgggaataggttctacccttctctagtcatgtcccccaaactaagccatttatagtgtcttaaaatgtaaggaacctggacccagtgtatgctgatcatgtctttggtcttagaggagtgtgcatttgtattaacaactcatcttggaattttaagccttttttgtgtaaactttaaatagtacatgaaaagtgacttaattatggcacagcctatttttaagaattctccctttgctatgatgaacaaccacctggtcatatggcagtggcatggaaatggtcctaattttgttgctaaaatagctcttttgttttgttttttggatagaatgtcaaaactggaccaatggggccaggctgaagtattgaactttctgctacgctaccaaccccgcagtgaggaagaactatttgacattctcaatctgttggatagtttcctcaagagcagtagcccaggtgtggtgatgggagctaccaaactttttctgatcttggcaaaaatgtttccccacgtacaaactgatgtccttgtgcgggtcaagggacctttgctagctgcctgttcttcagagagccgtgagctctgttttgttgctctttgtcatgtacgccagatcttgcatagtttaccaggtcactttagcagccactacaaaaagtttttttgctcctactcggag

SEQ ID NO: 2293 - DNA, 2300 bp, Homo sapien
tttctccatgttggccaggctggtctcgaactcctgactgcaggtgatccacccgccttggcctcccaaagtgctgggattaccagcgtgagccaccgcacccagcctcaacaaacacttattgaatccctagtactttggtgaaattcaacttttacatccagggacatgctcttgggacataatcttgaagaaggtgtggtctcaaacctctaggaacttcaaatctattaatgagccagatgagaataccgttaattacagtatgatagataagtacttaaacagaagtattgtacaaggtgtagaggggattcagaggtctgacactggcaggaagtcagaaaatgtttcttcacagaggaagtaatactttagctgaatgagcaggagctcactaggcagatgtaatagcaaggtaaagatacatgctatgaggtaagtagacatgagcaggagcagcacacatttttttaagagtctgtaggtagttgaattaacagcttgttccttgggtgctgtgataagtttggactttattgtttctcagactggtctcctactggaaccaactgaaatgtttattaaaaatacagattcctgggttccctcccaccctactgaaatcagaatcagtccctggactggatgacaaaaagcaccccaagggatttttatgcatagtaaagtttgtgaaccatagctgtaggcaagagttatgtgttcaggtatgtataatggaaaaattctgtctcaaatgaggcaaagtggcctactagtaagctgctgcaattgctttattgatgaaggcctggaccagaacaacaatgctaataaacaagagaggatggatatttagaattatgaattcaaaccatctgacataagaagtgagagatcaggtgtcctcaaggttggctcccacgcatagtcggctgctggtggcattcatcaacacaaatgtaagctgaacaggtttgaggaagacggaagaatgtccgggctatttcggacatacttttgataaaccacgcacgtggaaatgccaagcaggcagtgggatacgtgggtctgaagctaaaaaaggaagtctgtactagctatattatagatccaagagtcaccagtaattgctcaagcccgtgatatggaggaaactacccagctgagtaaaagatgctgcagaggggagactgacatggtactccaaagcagcaggacgaagaccgaaccatataactgccacgtgtgaaagctaattcaccctttcagagagactggggctagtgagccctgatggggattgcaaagggagcagttagcacgcgaagggaggtaggtgatacctaatcactcgctggatgacattccggtagcgcagcctatcagcttgaatgtgaggattgcacagagccttcttcagctccttcaccacgtcctcggagccaaggtacggcatcttcctaagagtcacagggcagctcccacagctcccacggtaactcgagggctccttctcgtcctgatgtgggagcctgagtaaaggaaatatgagtcagtgaaaatacaaaaggcgagatctcgcctcaggctcggcttccgtagggccggcacgctggccctgacacacttccacgccctccgcgacaccgcgagccccaccctaggctcttcaggccctaccgtcggccggcaggccgttcgccccgcccacagatcgctcccgctacttctaggtcctccgccggatttccagcgccgcgtccgactgaccgcagacccctccctctccagttccagccttaattccccctccacgccgttctcatcgcggataggcccaatcttgctttctgcggaagtcccgcccccttgtcaagagaccaaacagaagaccgctgccggtctccccgcgagcgagcgctaagcgtagtcccgactccgaccttaggatgcccttcccccaacctctcactctccaggcgcagctgcgcggctccctctggtggagctgcggcgggcaatcggaaatcggctactttggcctgtctcctccctgcagcgcgcgctttgagtgcccggctcggcctccgctcccgcgcggttgggagtgtccagcgccctccgcgatttgggctccagcgggcagggtgacttcctttttctgcccactctggtaacttattgctctgctgggctctttcccttagggtctctggccctgttcttgccccagcatgacttttatcgggacgccgttgtggaagcctcacgcaggagccctgcccccgtggagaaga

SEQ ID NO: 2294 - DNA, 2300 bp, Homo sapien
gaggcccacctgtgtagaggatggttccaaaatatccttcaaagagaaacatgacagaaccaggacagtgattggcatcgaggagggttacggtcatggtctcttgtccaatttcatctaggggtaatacatggctctcaccaacctccagggcttggatccattgcttagatacctgagaaaacagttagtcatcccagtgaccactgactcctctccgttacctccccgggtcagggactatcccttacatgaatcaggaaagctgaccaaatcctgagccaccgggagcagaagctgtaatggggattcccaagcaatctgcccttcctccttccacttcccatcccaccctttgtacaatttaagagttcagctggccgggcgtggtggctcacgcctgtaatcccagcactttgggaggctgaggcgggtggatcacgaggtcaggagatcgagaccatcctggctaacacggtgaaaccccgtctctactaaaaaatacaaaaaaaattagccaggcgtggtggcgggcgcctgtagtcccagctactcgggaggctgaggcaggagaatggcgtgaacccgggaggcggagcttgcagtgagccgagtttgcgccactgcactccagcctgggcgacagagcgagactccatctcaaaaaaaaaaaaagagttcagcaaacagtctagtcagcaattcccaaacttactcctgatcttaatctcttggagacttaagggtggggtggggagagagctggagaaccacccagcacattaggtggattcttaagatgaggcaagtttaggcggggcgtggtggctcacgcttgtaatcccagcacttggggaggctgaggcgggcggatcacttaaggtcaggagttagagaacagcctggccaacatggtgaaaccccgtctccacaaaaaatacaaaaaattagctgggcgtggtggcgtgcgcctgtaatctcagctactcaggaggccgagacaggagaatcgcttgaacccgggaggcggaggctgcagtgagccgagattgcgccactgcactccagcctgggcaacagagcgagactccgtctcaaaaaaaaaaaaaaaaaaaaaaaaaaaaggcaagtttgggaaacatcggcctagcttacttataaaggtaggaatagtttccttggctggattaaaatatctcctcaacttatggctaactatctcaagttggtcacttcgaaaacacgttcctattctgggttaaagatgcatttttgggttcaaacaacttccaaatcagttttcgtggcccccattctatgactccaagaatgacaggttgaagtcccaacccagatgcctggaccagctctcggagaccgactccagccccatacctgtaggtgacgatgcaagaggtgggctgtaattggggagcagtagaggggccgggcccaggtgctagacaggcccacggtgtggtccgagtgcatgtgagacaagaagaagagacgtgcggtgccagcccggcgcaggctccagaagtccactgcgatgggcgtatgggggatcaggaccccattcatggtggtagggttggagtcaccagtgggatcttctccacgggggcagggctcctgcgtgaggcttccacaacggcgtcccgataaaagtcatgctggggcaagaacagggccagagaccctaagggaaagagcccagcagagcaataagttaccagagtgggcagaaaaaggaagtcaccctgcccgctggagcccaaatcgcggagggcgctggacactcccaaccgcgcgggagcggaggccgagccgggcactcaaagcgcgcgctgcagggaggagacaggccaaagtagccgatttccgattgcccgccgcagctccaccagagggagccgcgcagctgcgcctggagagtgagaggttgggggaagggcatcctaaggtcggagtcgggactacgcttagcgctcgctcgcggggagaccggcagcggtcttctgtttggtctcttgacaagggggcgggacttccgcagaaagcaagattgggcctatccgcgatgagaacggcgtggagggggaattaaggctggaactggagagggaggggtctgcggtcagtcggacgcggcgctggaaatccggcggaggacctagaagtagcgggagcgatctgtgggcggggcgaacggcctgccggccgacggtagggcctgaagagcctagggtggggctcgcggtgtcgcggagggcgtggaagtgtgtcagggccagcgt

SEQ ID NO: 2295 - DNA, 2300 bp, Homo sapien
cagaccatgccttttcttctgtgtatccttaatttcttttttttttatttctttctttctttcttttttttttttttgagacagagtctcactgtcgcccaggctggagtgcaatggtgcaatctcggctcatggtagccttcttctcctgggttccagcggttcttctgcttaagcctccagggtagctgggattacaggcatgcgccactacacttggctaatgtttgtatttttagtagagacggggtttcaccatgttggccaggctggtctcgaactcctgacctcaggtgattcacctgcctcagcctcccgaagtgctgggattacaggcatgagccaccacacccagccccttaatttcttatatagtgcctagcacacagaagatgctctataaatagttactgaatggacaaatgactaaactttgaaacttctttgaccttactatgctcaaatatcacttctgatgttcttctccgactctctcacttatcttatatatgtctgcacacgttttttcctcattagactgtaaggtccctgagggaaaagaccatgctttattcacctgtctcattcatacctgacccagtgtctagaagagtgtatagcacagagcaggcacacaagcagtttgctggatgaatgagtgaatgatactaaagaggagaaaatacagactttaagaagctctccgtatagtgagaaagactgaggacctaagagcaatgaaaatagaagttaacaagtataaataaagaaggtacaggttaatttaagtaatcagatgatgatgcagaattcaaataaaataggagtcaatcagcaaaggttcccgaaagggtgaattctgagagatatttgaaaagaggaaagggacataacttgagagagcaggagtttaggaacatgtcagagagttaggttgaaccaaggcatgataaacatgtttgaagcttacattctgagcaggatctgttctacccagaccacaggtttctgcctttttttctggctcatcaagcaggcatgtttacccactctttttatcttcatgtttcccaggtcagcccaatgtgaggactttaagtagtagaaggaagtttctgtgaaaatatgcaaacaaaactgccttgtgggatcgaacatttttggtaaccctagttctctagggaaataaacttccctgttccagataaaatggaactgctccccgtgttgttaagccagagagaaagccaaatgacttcccttaaaaggtacttcagcgcattttacacaaatcatagttttctgtgtgtgttatggggatccaaggaaatcaaagatgttaatgagtgagatttgagaaacaaaacttgatagtagaattttgtcttagccacaactgcccttctcctcacagagtatatgcaaataccgatggtgacggacagtcactttctagagctcagatcactgctgcctccagcacttgtgggatggaaaaaatgaagaaattacagttgccctaaaaatgtcccccacttcaggaacctgaatattttacacagcaggagatacatcggaagtcctacagaatctcttgactttgggagatgcaactgcttttctattaggataacctaattttctgtgtccattttctcagaatgttgtgcccaacgcgttctgtttcctaaatacccagccttccttctggtagaggcaagaaaattatgctagcattcgctcactgcatgttttgagcgtttgagttcagagtacagctattctctctcctcgtaatgtaaacacaggttcccacggcggcaatgggagactcccctaaggggctcttgacgtacagggagacttccagatatggtacacagatgtcacattgctagaacgtctctagacggcaacgaaacattaaagcctaacctgaggtaatccctcaccggcagtgaagctcctctgctaggcactgtcgtcccgtacactgcccaagctctgggggtgtcacactaaactgtggtgatgtcacactagctgggatgacattttacagttggatcccgtaccaccgccaggcacctttaaatcaccgcagagtctgcagtgcggagggggcgggaagtccaggccccgcactcgatccacgctggctccctacggaggcccacctactcgaggcccaccgactcctactgcaatcagtactatgcgatcgtcctagagagtccattcagctgcacttccgcctcagtaggtgtcatggcgcggggcgggtgaatagttccggcgag

SEQ ID NO: 2296 - DNA, 2300 bp, Homo sapien
tttgaccttactatgctcaaatatcacttctgatgttcttctccgactctctcacttatcttatatatgtctgcacacgttttttcctcattagactgtaaggtccctgagggaaaagaccatgctttattcacctgtctcattcatacctgacccagtgtctagaagagtgtatagcacagagcaggcacacaagcagtttgctggatgaatgagtgaatgatactaaagaggagaaaatacagactttaagaagctctccgtatagtgagaaagactgaggacctaagagcaatgaaaatagaagttaacaagtataaataaagaaggtacaggttaatttaagtaatcagatgatgatgcagaattcaaataaaataggagtcaatcagcaaaggttcccgaaagggtgaattctgagagatatttgaaaagaggaaagggacataacttgagagagcaggagtttaggaacatgtcagagagttaggttgaaccaaggcatgataaacatgtttgaagcttacattctgagcaggatctgttctacccagaccacaggtttctgcctttttttctggctcatcaagcaggcatgtttacccactctttttatcttcatgtttcccaggtcagcccaatgtgaggactttaagtagtagaaggaagtttctgtgaaaatatgcaaacaaaactgccttgtgggatcgaacatttttggtaaccctagttctctagggaaataaacttccctgttccagataaaatggaactgctccccgtgttgttaagccagagagaaagccaaatgacttcccttaaaaggtacttcagcgcattttacacaaatcatagttttctgtgtgtgttatggggatccaaggaaatcaaagatgttaatgagtgagatttgagaaacaaaacttgatagtagaattttgtcttagccacaactgcccttctcctcacagagtatatgcaaataccgatggtgacggacagtcactttctagagctcagatcactgctgcctccagcacttgtgggatggaaaaaatgaagaaattacagttgccctaaaaatgtcccccacttcaggaacctgaatattttacacagcaggagatacatcggaagtcctacagaatctcttgactttgggagatgcaactgcttttctattaggataacctaattttctgtgtccattttctcagaatgttgtgcccaacgcgttctgtttcctaaatacccagccttccttctggtagaggcaagaaaattatgctagcattcgctcactgcatgttttgagcgtttgagttcagagtacagctattctctctcctcgtaatgtaaacacaggttcccacggcggcaatgggagactcccctaaggggctcttgacgtacagggagacttccagatatggtacacagatgtcacattgctagaacgtctctagacggcaacgaaacattaaagcctaacctgaggtaatccctcaccggcagtgaagctcctctgctaggcactgtcgtcccgtacactgcccaagctctgggggtgtcacactaaactgtggtgatgtcacactagctgggatgacattttacagttggatcccgtaccaccgccaggcacctttaaatcaccgcagagtctgcagtgcggagggggcgggaagtccaggccccgcactcgatccacgctggctccctacggaggcccacctactcgaggcccaccgactcctactgcaatcagtactatgcgatcgtcctagagagtccattcagctgcacttccgcctcagtaggtgtcatggcgcggggcgggtgaatagttccggcgaggcggggccggccgggttgagggacggccgctcggcattccgttcgtcgggtctggcgacaacggcggctgcggagcaaggggcccggcggtagccccggacggcagcaggaggccgaggcgggagcgcgcggggctgaggcggcggcggcggcggcgggaaggggctgggtggtggagcgggagggaggctgaggaggctccccctgcgggacgggcgcggggacggctccggggggcgggggccggggcccgggccggctcgcgcggggggtatgatgacccggctgcggggccccagatctcgtctcctccgccgcctcctcacggcagccccagctcgcggctgagaaccagacacaccggcggtgagtggggacgggcaggaggggtcctcggcggggagcgacttcccctcagctccctgaggcggggccgggccggc

SEQ ID NO: 2297 - DNA, 2300 bp, Homo sapien
ataacagtattataacacagaaccctgagataattacatgtaaagatccaaaatcaccagctgaataatgaaaattaggtcaaatgatttgttagattttaaaatgttttatagaaagctttaggcttccatatgaaaaaagctagtaatagtttgcattctctataatcttacaaaaaaaaaaaaaaaacccacagaccagagatcaaaaatagctttacacaaacaaaaggaaaattgtaggtttgctgagggcatcagccacttaatttaaccctatttcatcaagagcgggaagccacactgctgttttcaccagttactaagaaacaagataaaggacagattgggacagagagtctatagctgaaagtattatgttgatgcaattactgagaattcccaaagtgtcactaatagacaagaaagagcatctaggactgcctctaaatgagtctacctacaacagaatcagtgattaagtaaagaaaagacttactggagcttgggggttttccccccctcttccctacccgcatcctcccatcctgaacccccctccccaagtaggaaagaaagctcgcccagcataaacacaggccattgctcacagctcgtcaccacaacaaactggaggttagaccaacgctcctggagacggaactccacgtcttggttgctaagcacaaaaaggggactcttccccacagacctgtgaacagtgtgggccttaccagaattttggttgtttctccaccttccccctcccttttgtttttttaacgaaagctttgaaagtggtggcagcaaaagtttccctttgggccagacctctagatctcccttgtacagatatacattaggtgggctggtctcacgtagtctccaccgtcattacgaattacaagcctaacgactacagaacatcagcggagacgacagaaaagcttccacacccaccccactgtcgtcctctccaggcacggcttcctggtcccaaacagcacaaataacccaaaaccatggtgataagcggagctgtgaagtacacacgcacaagccacacactgggaacctgccacgacagccggggaaaaaaccggccgagtgaggagacgcaaggcggtcccctgtcacttaaggacaacacgcccaggcgagaagtggcaggaggcagggggagttgccccgaaaaccagcccggagcctccccaccttcctgggaaggcaatcccctcagcggcagtgagcggccgggccgcaagacgcggcgcccggtcccaggcaggggccctttgaggaaggcgcccccggcaggctgggcgctccaggagagccggcggccggcccggccccgcctcagggagctgaggggaagtcgctccccgccgaggacccctcctgcccgtccccactcaccgccggtgtgtctggttctcagccgcgagctggggctgccgtgaggaggcggcggaggagacgagatctggggccccgcagccgggtcatcataccccccgcgcgagccggcccgggccccggcccccgccccccggagccgtccccgcgcccgtcccgcagggggagcctcctcagcctccctcccgctccaccacccagccccttcccgccgccgccgccgccgcctcagccccgcgcgctcccgcctcggcctcctgctgccgtccggggctaccgccgggccccttgctccgcagccgccgttgtcgccagacccgacgaacggaatgccgagcggccgtccctcaacccggccggccccgcctcgccggaactattcacccgccccgcgccatgacacctactgaggcggaagtgcagctgaatggactctctaggacgatcgcatagtactgattgcagtaggagtcggtgggcctcgagtaggtgggcctccgtagggagccagcgtggatcgagtgcggggcctggacttcccgccccctccgcactgcagactctgcggtgatttaaaggtgcctggcggtggtacgggatccaactgtaaaatgtcatcccagctagtgtgacatcaccacagtttagtgtgacacccccagagcttgggcagtgtacgggacgacagtgcctagcagaggagcttcactgccggtgagggattacctcaggttaggctttaatgtttcgttgccgtctagagacgttctagcaatgtgacatctgtgtaccatatctggaagtctccctgtacgtcaagagccccttaggggagtctcccattgccgccgtgggaacctgtgtttacattacgaggagag

SEQ ID NO: 2298 - DNA, 2300 bp, Homo sapien
ccaggctggacttgaactcctgacctcaggccatccacgtgccttggccacccacagtgctaggattataggcgtgagccaccgcgcctggcctgttatcgctaccttttaaagaagaaagttatagagtggcctggccattctctgtgacctaccttttggactttaaaatgtctttctagtatggtaggaatagcaaaatcaatatgctgccctccaattgatgctttggaatgttctaaacccagtttttattttggctcattgccagttgtgctccccctgccagctatttttggcattgtcatgaacttggaaattaatgattctgctcactaggagtagaaaattttgttccttttcaattttagaaaagcttttatgttgtttctgggtagtcttactagcttattaatgcgcctgtcaaacttgtgcagtgttgaaaacatgccattatggttgagatttcactgaactctgaaattccatcagtaatatgtgcctctagccacctgcaacaggaatatcacttttgagggttacttcttttcttttcttttttttttttttttgagacagagtcttactctgtcacccaggctggagtgcagtggcactgtgtcagctcactgcaacctccgtctcctgggttcaagcaattctcctgcctcagcctcctgagtagctgggattacaggtgcccgccaccacacctggctgattttttatatttttagtagagatggggtttcaccatgttggccaggctggtctcaaactcctgacttcaggtgatccagcctcctcggcctcccaaagtgcttgtattacaggcatgagccaccgcacccggccagttatttctttggtaaacaaaaccacagttcaaattaaatactacaaaaactgatgatattggtggttccacccatagctgttaaaaagtgtaagcccgaagaggcctgggtcgactgctatttgtatttaaggatcagaaaagctttcaggccctgtggagtccccagatttactgttttctaagggccactatttatgtataaatactaggggaggattttttttttcttctatgcctagtttgcttagatggggagggatattcttatttagggaaattatattctccttgcttaatccttgccttccctcaaccccctgcacatatacacaaaacaacaataagcacatatcacttgaaagtagtttgagaaacctgggtattctgtgaggagacacggccagttagatggttcttcacggaaagatctgttttccatttaactcctgtaacatgaggaatctgaatctggatctggatctggatctggagtgtccttatagattataattccatgacttgtaagaaagaaaggaaattatttggagaagatgatccagtgcctaagagctgaaatcttggatccaaatagcttgggtaccatcctttttcttttgttgagatggagtctcgctctgtcgcccaggctggagtgcagtggcagatctcaactcattgcaacttatgcctcccaagtttaagtaattctcttgcctcagcctctgagtagttgggattacagctgcccgccaccatgcccagctaatttttgtatttttagtagagatggagtttcaccgtgttgaccaggctgttctcgaactcgtgacctcaagcaatccactcaccttggcttcccaaagtgctgggattacaggtgtgagccactgcgctggccaagggcaccatcttttagtagttatgtagccttgggcaagttactttaacctcttagtgccagtttcttcatctgtaaaatggaggtaatacttttattgcatagaatctaacatgccattgattataagatacattatttttgtaccacttaaaaaaggaaaagcgctgccattaaactaaaatataccatcatttgtaagaatcttcttaatttcagaggtgctaacatgtaaaaagatgtgtatcttagaattgatgacatcataataatactttgataggattgttgtaaggattaagtgactcaacatttataaagaacttagaacagtgcatggcacatagtaggcaatatttatgtgtcatttattattattgctattagtgttacctattattttctttttgaacccacttattgcctaattagtcatagtttgacaattgcccttgtattccaccatgtcaaatataaatttacatagatgagtatgtacttttacttattgagaaacagtgtaatatataatatactcaattc

SEQ ID NO: 2299 - DNA, 2300 bp, Homo sapien
caagtaatatacctgcagctattaaatgatggaactaggattcagaccctgacaggctggctctagagagtgtgctgtcaacaccatgtctcttcagaaggcatttctttttcttttttttttttccagaaggcatttctgtcatgaagggttatttattgaccagggctttttttttttttttttggactgtcttgggtctcctaggctggagtgtagtggtgtgatcttggcttactgcaacctctacctcctgggttcaagcgattcttttgtctcaacctcctgagtagctgggattacaggcgcccaccaccacacctgactcatttttgtatttttagtagatttggggtttcaccatattggccaagctggtcttgaacttctgacctcaggtgatccacccgcttcggcttcccaaagtgctgggattacaggcatgagccactgtgcccagttgaccaggccttttaattgattttttttttttatgattgaaatggtgctaggaataataataaaaaaaatctattatcccttatctgtgattgcaaaattcagaaagctctcataaatgaaaatttttctttaagtttggtataaattcatttaattggcaagacctgacttgaaccattgttaagctatttgaagtctttatttagccaacttagtatgactgttccatgttttgttgcagaaatattaatgtgtttgattatagtgcactgccctgaactccactgggattattatataatgtgtactttgtgttctgcattacctttctgaaattcaaaatattctgaattccaaaacacatctggccctgagcttcagatgatggattgtataccaaagattttttttccatttcattgaataaatgttcctttagctaatactaaaacaggacttagtcatgtagttaattttcccaaataatgtttttttttttttaatctgatattttttgtttttgctagagctcctgaaattattcttgggttaccattttgtgaagctattgatatgtggtcactgggctgtgtgatagctgagctgttcctgggatggcctctttatcctggtgcttcagaatatgatcaggtaaaagtgtttatttgaatggaaatagaatgcaaatagttacttgtgaattagattctggagaaagagaagtactaagtactactgaagtatttagataatagggaaagagtagtccaattgctactaaagaactttttaaagaatagtataattttctcttcctgcttcttaggctaaagtatgtttgcaattctataataaaaaaaagaattttattttatattaaggttgatactttgctagatctgtaatgatttattagagacttaactttcattaacttatgtgctttgtgagttaggaaagtagagtaaagatgaggaactggaattttaaaagagaacttctacttactcggagctattataatttacttttacgcatgacacactgaagtactttcttcagactgaaacacttcaggtcccagaagctgtgacatactgggtcgctaagataggatttagaaaggaaatcatctgagttgtagtaatatatgatctgtatctaaaaatagacaaactttaggagatatggtataatttcctaaggaattggtccgttaagggaaaatgttttactatggaagtaaattgtgaattctcatttcttgttattttttcttttttctttttatttgtttgagatggagtcttgctctgtcacccaggctggagtgcagtggcgcgatctcggctcactgcaacctctgcctccctggttcaagcgattctcctgcctcagcctcctgagtagctgggattacaggtgcctgccaccatgaccaactaatttttgtattttttagtagagacggggtttcaccatgttggccaggctggtttcgaactcctgacttcaggtgatccacctgcctcagcctcccaaagtgttgggattacaggtgtgagtcaccgtgcctggccttcttcttattttttaaaaatgttcctgccctttatgatgtaagctccttgagggtagagattgtttcacatcaccagtgtatcctcagctcctaacactgtgtctggtacacagtaagtacaccagtttttttgttgtggtttttaagtttttatttttttagagacagagtcttgctcagtcacccaggctggcatgtaggcctgtcacagcttactgtaacctctagctcctgggcttaagtgatcctcccacct

SEQ ID NO: 2300 - DNA, 2300 bp, Homo sapien
tgtggtttcaattcagcttgaaaaataatctcactacatgtagcagtacattatatgtacattatatgtaatgttagtatttctgctttgaatccttgatattgcaatggaattcctactttattaaatgtatttgatatgctagttattgtgtgcgatttaaactttttttgctttctccctttttttggttgtgcgctttcttttacaacaagcctctagaaacagatagtttctgagaattactgagctatgtttgtaatgcagatgtacttagggagtatgtaaaataatcattttaacaaaagaaatagatatttaaaatttaatactaactatgggaaaagggtccattgtgtaaaacatagtttatctttggattcaatgtttgtctttggttttacaaagtagcttgtattttcagtattttctacataatatggtaaaatgtagagcaattgcaatgcatcaataaaatgggtaaattttctgacttatgtggctgtttttgacttctgttataggatataaaggggatcaataaatgacatctttgaaagtggctaagcatattgtatttgaacatcagtagagtactagagacaatttcattcttcacacaaatctccatactggaaatgaatagggtttggcagggaatacttcccaagaatgcagtgtccagggtccttacttcacatcatctggatctgaccctttgaaagaggtagaagacttctgagaccggctaattaagctttgtttcctcatatgttttgccagatagcagtagcagaatgaaaagatgagtaaccacaggaagctgctatttttcccctcctttcaaactgtactgttagagtcatggtcctttttacagaaggaacctctcatcagattctgttgattctaaagtgaatagaatttctcccgataaagaaataggggtttgtttcgattaatgactgcaggtctctgagtaaatgctctatttgattttttttttcggcccgtgtgtctaccttatggcccaagtctaccttatggtggccattaattcattttgggctcctgcagccttagttgggatatagaaatgagaaacactcagaaatacccttttggaccacaaccaagagaaataaccaatagtcttttctcccagtggtaaggaagtcagaatacattgatctagactgcaacaacatatatatatatatcagattccgcccccccgcaatacatgaatgtatagtaaattagtgtgaactcactgaacactcctcagttttggtgagagactatatctggcctctttcaagcaaaggaaagccatgtaaaacagcgctgctgtcagccttaacttccagacgatcgagttaatttactaacttctcagtgacctgttttttttttttttttaatctcagttatattttcttccttgggctaaatcagatatttgcatagcccccaaagtagtaattggatagtcttgggggaaatatgcatttcagtggtgaaaacccctgtaaattcaatatatttggcttttgtggaaaattttcctcatggggtgaagtctaagccttagtttctgtattatcatgagagatgacaccagctgcttagcacaaggtggcgccaatgagctttagaataagttgggcttgaccacttgggccattgttttcctgcttcctcccttcaagcctcacctccccagctcccagcttctactgaacaaggctgaaaacccactctattgcagggaaagggaaagattaatgaaaaatgtcagtttcttaagtcagcactggtgaaactttcctaaaacaggaatggcgtttgctgagttttctctggggtctctgctttctgcagctagcttccctgcttgactgcctagaaggcctctgctttcgggtttccatctctttcccctccagaggaccctacagcctaggcgggaggtggttaaggcttctggctgctgtgcaatggggccatctgtgtttgatcaatcctggcggaaaggagggggtgggggttgtaaagagaactgaaagcattccagagtagtgagagagacccagagatcaggagagaaggcaccgcccccaccccgcctccaaagctaaccctcgggcttgaggggaagaggctgactgtacgttccttctactctggcaccactctccaggctgccatggggcccagcacccctctcctcatcttgttccttttgtcatggtcgggacccctccaaggacagcagcaccaccttgtggagtacatgg

SEQ ID NO: 2301 - DNA, 2300 bp, Homo sapien
tgccccagaaaagcctagggaacggtcatctgtctgcttggcttcatggatgctggtgaaagtgttggttcctgcaagggaaatatgtgcactgaattttataaatttcatatcagccaggcacagtagctcatgcctgtaatcccagctactcgggagggtgaggtggaagaatcacttgagcccagaagttcaagaccagactgggcaaaacagcaagaccttgtctcttaaaaaaaaatggatatgccttgtaaggatgaacagagttggggaaggttgctaagacatttgctcagtggcccatgggacaagtggctctgcctctatttttccaagcctcatgatatggaaatctgccctgatgtgggagtgtatggaaataggtagagcaggggaatgaggcggcacctgagcaacctcaagtctggagccactttgcaagaaaaggtacatccttatggattttgcaagctgctgtgttaaagacaggtattggggctagctctgcccatctgtctacctgaacctgaataatgtcctggggcatatccatagagaatggaatctgtggaaaccagagcctcatgccggttctcaaaactcttacttccattttactgaaaatccctaagagagggtcctttcaaatgtgtagtttgagacagcaggttgattaaacacctcatggtctctccataaacccaacctcatctccccatggttaaggcatagctactgctgccacatggattagtcggcagctcatttaggtgtctacaaaaatgcctttcaggcttggagtttctgatcaggtgtcacagttctccctaatttccaccagggatgtgtgcctcatctgccatctgaatgatgccagggagtacagggccctagtgggtgctcgatgtccaggagatagaaccatatgcctatgaatcacagagctggggagcagctgcttggctggcacctcctgacagattcacaggagccctggcttctgggcaacaaggtgtctcagcacatcagcgtctcgaaagctattattacctgtgagccgccctcccatttcttgagctgtgcagcataaataacaattatgatggtgaccgagacacctgtgctatgagatacactaggtttcacttcacttgggtgagtagaaaatttcagggtagaaagatgaccatgaaatacccattcagaaaactaaagaaaacaaaaggatgggaggcacatggaagttcaataaaagcatctctttgcaggatggagagaatccaagatcccactgagaaaggaaatgtcaaccagctgccctgagtctccccgggccacagctccctcattctccactgtccagaagtgggcaggaaatggcttccagggaagcagagagcagggccacttcacgccttctagatgccaaatggaaatgggattattgagacaatgggacccaaaattatgttgtcaggtggggaggacatgaacagcattgtgattgttgctgttcatttcactctgacacattgtgtctccctggccattgttgagtcctatttttaccccgccccaaaacctttatcctttggtttgtaattctggtaaaacaaaaaagccactcaaagaatagtactccacataggtaaaagaaatagtgtcattgttcagcctcatcacctttttgagtcagccagggattgacgagctgagatttagggctgtgaactgcatacctatcggcaggtgtcatgtctgatatggggccagcttccccattagtaaaagtccattaggcgctctcccaagaatactgaggtagctaaagactctgcatttattaagcacagagtgtcctcagagacaggtgtgctacataaatacaaggtggtttaattattttaacaacccactgataccatctgatgagcagcagtaggtctagggcttcggtccctttgctgcaaatgatgtttgcagacatctgtttaacatactccattcccttttctctgtccccattggcacagatccctatgtgaaagtgtccttgctctgtgatgggcggaggctgaagaagaagaaaacaaccataaagaaaaacactctcaatcctgtctacaatgaggccatcatctttgacattcccccggaaaacatggatcaagtcagcctgctcatctcagtcatggactatgatcggtaggtaggcgtcctagagggacgtaattctacccctcactcccactccagcaccagcacagggctccttgaccttagaccttgtgattcag

SEQ ID NO: 2302 - DNA, 2300 bp, Homo sapien
cctcttgaaatgaccccccattcctgtttgccagaaacttttccctcccgttgccatggagagagacggccgctgcctcccgtcgccatagcaacatgcgggtaccgcggaccgcaggattgcggagctcggaaagtcttgcagttcgcatcgcccgcctgtcttggggtcttctacctccgaagctgggactcgggggccagtctaactgctcccgtcaggaacctcggccaaggtcctcccagaccctgcctgaccgtcgctctttctgttacggggttatctatttctctgtcattcgtgtggcatgtggcagtttacccagtgttttcacaaacacgatctttctatccccagggagtccgtgaagtacttaaaatcattacacctcctttacggagaggaaaattgaggctcagagacgcccaaggtcacaccaggcagtgaatgcggagtgggaacccggactctttcctggccttgcaccctccgagattcgggacagcccggcttcccgcctcgaaacccccaccccccggactcaggccagtccctgagtgtagagggggcggccgcgaggcgccagactcgccagctgccgcgggatgccacgtgaggggcggggaccctgcggggaagtgattaaaagcagagcggagccgcagggggccgctgcagggagggtcttcttggggccgtcgtgccccgccccagtgcggccggggcgcgggttcgagctgctgctcggcaagcctgggtgtctagggcatgagcggagtgtggggggccggcgggcctcggtgccaggaggcgctcgcggtcctcgcctcgctgtgccgggcccggccgccccctctcgggctggacgtggagacttgtcggagcttcgagctgcagcccccagagcggagtcccagcgcggcaggcgcaggtaacgggagacccagggccccctcccttcctggatatccgtcctgcgatctcccttccccaaagccccggtcccaggagccccagaacctagagagaactccccagctcgggattctggattgggagccagcctcgtccagccctctggcccatcgcttgcacagccaggagagacccgaaggggagcggaggttggggtagaagcccccggccctcctgtattactactgcggaatgcgggggaccccgcagacagccaggctcccaggacggggcacccttggggcttcagtttccctcgcatctccaagctcgctctgcgggcgatttgccaggagaggggtccatggagagagcgggagacgaggggcgcccggctgaggaatagggcttgcctcctagcgagtgtcgaggtccccgggtccgtgcgtcggtctgtccgtccgtttgtgtgttctcgcggtgaacgcgggcggacccccagtctctccgggagaaacttgggtctgcggctggcacgaggtctttgtgtccgggtgtctctccggctgcgagtggttttccgcgtctccgctggggggcgggggacagggggcggggtgggggagggtatgagggtgttgcggcgtccttcccccaccccctctcgcccctataactcgctccctccgtccctctcggactcggactcggggccggtgcgcgactgagctggcgcctctagccgactttgccaagagggcgcctcctgcccgatccgcgctgaccctgcgcgggacgcagccccaggcggctgcctagccgaggcgggagcccgagctgagtcgagctcgccggagcgggtgagtcccgagcccgatccccgccgggctggaccctggcgcgcagctgcggcgtctccggggagtcgcggcagggggaatggcgtgtcgcgccctggcggcgggagctgcgggagggtcggcgacgtggcggccggcccagggtatttacctgctgcaccagtgcccggcagccacgctcgccggctgccgcggggcttctttgtcccgatatctggagggtccggggcgggagggagtactgggtcgcgtcccctccatgggggaggggctgggggagtgagaggcctggagataatgcggagtgggggtggggagatcctgcaaggaccaggacgccggggttccaggagactctgcaggctccatccctccttattcccccaccccgaccccagtagcgctgggcctaggagcactcgggagttgctcagtggctctgcaccgctggcgcgggaaggggagaaaggggctgccagaggcgggaatttggtccccacgcgctgctccagggacgagaagcca

SEQ ID NO: 2303 - DNA, 2300 bp, Homo sapien
ctgccgagtgtggaggctgaatccaggaacaatgagaaattatctgttaattctcggctcctgccacctgctctgctccaaacaagctcctttgccttcagtttagatgcaaattcccccactcgatgtaagcaaaatattgatttccctgcatcacaggtctgggcccttggaatggtcctgtgttttttcattctctgcaaaggcaaaacaaggtgctttgttctgtgaatttcccccaggaactcgcgagggggagggagaaatagcaggggagtgacagagttgccataaacacgggcaaagagcagttctccatttgtattttacataaacacaaacctgccacttgggaaactgctaataagcgtttagccagaggctcttctgggtgctgagatctgcatcgggtgatggaaaagaaattaatggggcctctaggctcctcaggtgggttttcagaagcaccaggaaggcgcatagggatgccagagccccacttgttcttggaacagcaaccaaacacctccagcaggaaggcagcccggattgcacagtatcgcctgcgtcgtgtctgcttggtccctgcctgagttcctagccttctgctatcacaggcacaggggtcagggtggaagctgcgaaccttcaacaattgcctctccctcgtcccctaaacttatgcccacgcgatggtagcaccaactgggtcttcagcaccgtggacagagccagggggcgcctcacggtggaaaagccgcctggctgggccagggtcctcacaggccttgccttagcccttggtgccccaggcaccagctgctaggggatcgcaagtccaagggccggttggcacagatggcgcgcagtggagaccgccaggagctaaggctccgaatctcctccctccggaacgtgagtcactgcccgagtcacttccaataagcgtgttaattaagaggcaagacctttctccctcgccagccactcgggcatacaccaacccagcagcctccaggggctgcagctaaagcttccttcccagctccgggagagcaaatggacctgagtctggggcttcaggcgagccccacacagaaggggccccaccgccgacaggtgtagatcaagagactcccgagataggcccctgcagggcgctggtcccccggcctccctgaccatggctcacagacttccagcgctgagtgaggcagctcgaagcctctcagccgatctgttcctgggcctcactccacagtttctgaggggatctctactttaagtctagcctcaatcctcccgttgagctttctgtctttcttgttatgcttagcagaaagatacatgatctctggtgctgtttcaccgaagcaaggaggtgggtcggcggaactgagcgccctgcgccctcttgaaatgaccccccattcctgtttgccagaaacttttccctcccgttgccatggagagagacggccgctgcctcccgtcgccatagcaacatgcgggtaccgcggaccgcaggattgcggagctcggaaagtcttgcagttcgcatcgcccgcctgtcttggggtcttctacctccgaagctgggactcgggggccagtctaactgctcccgtcaggaacctcggccaaggtcctcccagaccctgcctgaccgtcgctctttctgttacggggttatctatttctctgtcattcgtgtggcatgtggcagtttacccagtgttttcacaaacacgatctttctatccccagggagtccgtgaagtacttaaaatcattacacctcctttacggagaggaaaattgaggctcagagacgcccaaggtcacaccaggcagtgaatgcggagtgggaacccggactctttcctggccttgcaccctccgagattcgggacagcccggcttcccgcctcgaaacccccaccccccggactcaggccagtccctgagtgtagagggggcggccgcgaggcgccagactcgccagctgccgcgggatgccacgtgaggggcggggaccctgcggggaagtgattaaaagcagagcggagccgcagggggccgctgcagggagggtcttcttggggccgtcgtgccccgccccagtgcggccggggcgcgggttcgagctgctgctcggcaagcctgggtgtctagggcatgagcggagtgtggggggccggcgggcctcggtgccaggaggcgctcgcggtcctcgcctcgctgtgccgggcccggccgccccctctcgggctggacgtggagacttgtcggagcttcga

SEQ ID NO: 2304 - DNA, 2300 bp, Homo sapien
aggacttctgaaaataattaatgggaacctaagtagaatattttatcaaataacttgttgagggatggcagataacgttttcttggtctgttttgttgactggatagtggtgccctgaggaggattctgaggtgatgtctggacacagctgagagaaactggttgatgtctgctaatggttacacatgcgtccctgactttgtgactaggtctgatttccaataattttttagctgggttataataatcttgagttctgtgaccggtaggtagaattccaaatattcttatatgcattgatattcattttgacttactactttttaggtttatccaattctcacacacctgtgagacccccaagtacttctagtactggcagtcgaggcaggtgagtatattgataattatttttttcctttttgttaagaaaaatagcaaatatgtataataaaagtagaatattacagtgaacccctttatacttaacactcagctttaacagtgatcaaataatggccaatcttgtttcttctatacttctgccaattcctttctggtctgaattattttgaaacaaatctcagtcatttcactcgtgactgtttcagtatatatcacttaatgaaaggaactttaaaaatttataaccacagaaccatgatcacacctaaaaaaatttaacaactcattctttaatatcagtagagatccagttaatgtttagtgttcccaatttttgcaacaaatgcctttgaaaaaaaaaccagatgatttctttgaatcagatgcaaataagctctatacattgccatcagtttatttgtttacatcactatcagttaatttgttgtaaaaatgtagtttctcctacagtgttttcccgatttctccatcttgtcatttaagtacattgcctcctgtttttctgtctattttggtatttaggtcaagagggttgatcagatttaggtttgatttgggggaagggagagcaagaagacttggtagtgtagtggtggcatatacttcctttggggcgaattatgcctggttgggggtttttgtgatggcaaccgttaataatcattgtttagctctattatttttctgctggttgaaatattacattttaattattgtatcattctttatttctttagaatatttctgtaaagagaagctttctgtcatcaactattgggttataggaaagataggataaattctttctgtttatttccctgcttttgtggtaatgaattgatttccaacaccctccaacagtgacagttttattgttattacctttatggactgagatatttaaacatactttatatattttaatccattatatatgttacgtctgtatgtatgtatattgaacactgaacattattccatctttgtcctgtcaaagctttctcaggcttgctccttagtccttttgctataatcacagcagtcttttttaagcttccatgtttcctgtgaaacagcatttcgggttcattttgtacatttcatgcttcagacctggaatcagccactttcccaggaagttctggtagtgttagcaggaaagcaggaaaatagtgtttgaggataatattctagtactaatagcactcattgctactgaattgttcattgtttcttaggccttttcagtggacagagctaagaaataggagtgtgtgtgtgtgcgtgtgtgtgtgtgaagaaagtgcttcaaaccataaaatgtgtttttagggtcttctgaaagttgctgcataattttaaagagttttaagctaggctttataccacattccccttaactacattatgaggtatccttatcttctgtaaagttaattgtctattgtcttcactttagtgaacattacttttcatataattgtttttatttataccatatagtcaaacgtatgtgatctttatttgttgtttcttattagctgtgggtcatcaggaagaactgctgagaagacaagtcttagtttcaaatctgatcaggtgaaggtcaagcaagaacctgggactgaagatgaaatatgtagcttttcaggaggtgtaaaacaagaaaaaacagaggatggcaggaggagtgcttgcatggtaagctcccactggagtctgacagggacttaaggacatcacttcattgattctttcagctctgagtatattaagactaagtagtgggtctagaaacatttatttttgaaatttcatgcctggcacaagccagatatctctttttctaactcaacttttttgtctaagagtca

SEQ ID NO: 2305 - DNA, 2300 bp, Homo sapien
cactgccgatttgatttatttttagcaaatttcaaataggagttttctgggaaattgaagtttcagaaagagaaatgtttcctgattgaaaatttcatgctctggaaagttgaaattttggaaagagaaatattttctgattgaagatttcatgctcttaactaggttcagatgatatggggattattttttctgcaccattgaatagtaataatgaaatgatttatttgattatttccattaacctcaaattgtcaatagtttttttttttttctgtcccatctcttcatagaatcctttaaaaatattaggtgaataattacataaaaatgaaatgatgtcagtagaatgttatctctgaatggaatacatctttccagtgaaacacaatttgtgagattaaaagtactcttggccgggtgcggtggctcacgcctgtaatcccagcactttgggaggctgaggtgggtggatcacaaggtcaggagttcgagaccagcttggccaacatggtgaaaccccatctctactaaaaaaaaaaaacaaaaattagccaggcgtggtggtgtatgcctgtaatcccagctactcaggaggctgaggcaggagaattgcttgaacccgggaggtggaggttgcggtgaggcaagattgcgcctccgcactccagcctgggcgacagagcgagactccgtctcaaaaaaaaaaaaaaagtactcttgtgcagattgttaaagttgtgggtcccttttcctactgtacaccagtctgttgcatttaaccctaataggtttttccccccaaaaggacccatgtgaatagagagcacttagtaactatttttgatacacttaaacttactgtaatacatttgagctgtacgtctaaaatagtatttgtaaaaccatttcaagagtttctgaattaaaagatgcttcttaagatcccttgagcctgggaagtggagtttgcagtgaaccaggattgcaccactgcactccagcctgggggacagagtgagactctgttaaaaaaaaaaaagcctcttaaggctaaagtgtatacaaatacctaatggtaaatacgccacatactactaacatgatgataaatttaaaatagatgttttctagtgtaatatgttcttatactttgtagaagaaacgtttttctaagctttataaaagaaatgtagtaaaccatacttctctcagttgaatactcttatccattgatttacattataaaatgaacagcttctttccttaggaaaaatattgtccagaaaaaccaacttgagtcatttttgggagaaagttcttaagaaagtagtagatgagttgttcagcatgctgaatgtcaaaagtatgtaggacattacccatccctcctggggtgattttagttcccataaagcagtttatttttcctttgcagtgtttctctgaaattggtttttgcagtttggtcagtccttacttctttgttctctgtgaacttctgtgatatcaaaagtttccctaattctactcttagaactctggaagttatctttttcattttgtcttatatatttaagagagattttaacttcattctcatgccataccaggaggtggcactggtgacacaaaatttttttggcctttaaagtatattaagattacataaatttatttctaaagttagctccttatgctataaataccatatattagattaatctaataggaagacactatttttaacagacatgttgatagaaaagtgacattaactaacattcatttctatatgtggaatatcctttttagcttagagaactgacttttagtcccacttttgttagtggcttttcctctgatgataggcttgctaaataatcatggagcttattcacttagcccatttttaaaggaagtataggtattgtgcccatttgcattagaaatgtggggttgattttttttcatatggaattctacagcgaagctcttgttctgtttcagaatgttacaaaggaaagacagatgaagttactacagcagcagaatgacatcacaggcctttcccggcaggtgaagcatgttatgaacttcacaaattgggcaattgcaagtggcagcagcacagcactactatacagcaagcgactggtgagacacatactgtttttatttttctttaatggactttattaagatatatattcagtgaattgcacctgtttaaagtatacattttaattttggcaaatgtaaccaccaccacatcaagatacagaaaacttccaccaccc

SEQ ID NO: 2306 - DNA, 2300 bp, Homo sapien
ttttagagtgataagttttatttatgttttcattttccatcagaatgactatatatggtactacagtttgtgtactacacaactcatggggacttggtttatatcccagtctttggtgctttctgtaattgtgtacattataaactataaaaattacatactaatctagaatccttcttgaaggtgtggattgtgtcatttatgctgtatcctctatttcatggctgacatgtagtcagtttgttgtgttgactctggtgctattttcagttatttagcctctatgtgttacctcaacagtttatccattctgataagtcctggaacactagcaggtgaagggacagatgatctttcttctcatattagcatgtattcaagtatctctaaccaagtcagaatttataagatgatagattgtatattagttttctgttgctgctgtaacaaaattaccacaaacttagtgtcttaaaacagcacctgtcttactgttttaccattatggaggccagcagtttgaaatccctttcactgggctaaagtcaaaagtggtggcaggactggtccttctggtggctctgggagaaaatccatttccttgtctctttcagcttctagtggttgcctgtctttcttttctccggcttcttccttcatctataaagtgcatcactctactccctgcgtccattgttattataattgccttccactcttctgtagtcttaccttcctcttcctccccctgataaggtcacttgatcacgtttaggacccgctggacaaaccatctccagagccttaatcgcatctgtaaagtcccttttaccatgtaaattaatattcatagtttccgaagatcaggatctggatttcttttggggcaattattcagctaaccacatattataatgaggaagcacttcttgggaggcatcataatgcttgttttttcttttcctaaatagagtatcacttttacccaaatggaataactcgctgggttattttactgagctcttgatgctcatttctttggtcttctctgtgatgaattaatgtttctatatggacatcatgcacaatttctttattcctgaagaatattttaaaatgttgttattttatgttgtagttggtgtaatacggtgcccagtatgccgccaagaatgcagacagatagaccttgtggataattattttgtgaaagacacatctgaagctcctagcagttctgatgaaaaatcagaacaggtatgcttctcaatttttctttatattcctatcttgatatcaaactgtaagttataagaaaaacatgtttggatagttaagtcatttagggtggttctgctatggattcctgtttcaaatagaaagttaaagatagctttcttatatactctcaaacttagttaaatgagactaaagctattacttaaaatgtcaaatttgggccaggcatggtggctcacgcctgttgtcgcagcacttagggaggctgaggtgtgaggattgcttgagccccggagttcgagaccagcttgggcaacatagtgagactccatctctacaaaaaataaaagtactagccgggcgtggtggcatgcgcctttagtcccagctacttgggaggctgaggttggaggattgcttgagcccaggaagttgaggctgtagtgagccgtgattgcactactgctgtccagcctgggtgacagagcgagagcctgtctcaaaaaaaaaaaaaaaaaaagtcaaatctgcacagacttcgtgttctcagccttagatttttacctacatgaatgatctgtaaggaaaaggattttgttgaagataaatggataacaaaataattttattctgtgtacagtgaaatagtatattgaagaacaagtttttttttttttttagatctagattttatgtatttaatttagattagtgcttatttcttcttttaggtatgtactagttgtgaagacaatgcaagtgcagttggcttttgtgtagaatgtggagagtggctatgtaagacatgtatcgaagcacatcaaagagtaaaatttactaaagatcacttgatcaggaagaaagaagatgtctcaggtaagatagatgcattgtaatcattacaatgattacagttaacctccttcttttgcccctatagaattttctacttattctttataaactttggatagcaacatcaataggaatttagaaaactagacaaaaattttatgtttggttaaaaaatatttgttttattttgctacagagtctgttgg

SEQ ID NO: 2307 - DNA, 2300 bp, Homo sapien
tttcaaagggcacaaaagttaaaaaaaaaattgaagaccatttctgtacatgacctggctcccttaataactctcttatctcatgtcctactattctctcccttgttcaagccactccagccacactgactcctcctctaacaagccaagaatccgtttccctcaggccctttgcacttgttatgtgttcctctcctgctcttctccaagacaggttccttcatctgatcaacaggggccttcttcaatcacctctaaccccttttaccccacttattcttttcttcacagcacttaccactccctggcatgtatctattctcaatctttttctctattagattgtaaaccccttgaatgcagggagctcctctgttttgtaatcccagtgtatctctaaaacactatgacaataaagaggtcaggaaacatttttgaataaattttaaaaagttttcaggaggctgggcgcagtggctcatgcctgtaatgctagcatttccagcggctgaggcgggccaatcgctcgggcccaggagtttcagcctgggcaacatggtgagaccccagcctcttcgaggcaaagggaaaaaaaagatcagctaagtcatggtggcgtgcatctacggtcccaggtaattgcgaggagcacggcttgagcctgggaagtcgaggctgcaatgaaatgtgatgacgccactgcactccagccagggcgacagaacgaggaggtctcaaaaaaaaaaaaagttttcacgtggtttaaggacttacagcacctttcttgggaacactaacaggagaccaaagcatttcatgatcttaacactaaaacagttgttgcactacataaaatcctccaaatacctttttttttttttcaaataaaaaggcaactttctgaaagcttttcttttttttttgagacggagtttcgctctgtcgcccaggctggagtgtagtggcgctatctcggctcactgcagcctccgcctcctgccgggttcaagccattctcctgcctcagcctcctgagtagctcggattacaggcgcacgccattacacccggctaatttttatatttttagtagagacggggtttcaccatattggccaggctgcccacgaactcctgacctgacctcaagtgatctgcccgcctcggcctcccaaagtgctgggattacaggcgtgagccactgcgcttggcctgaaagcttctactaccattgttgtaagggcatttgtcacccagctcaacccaggacacttaaagtgggacctcagaaggacgcagtattggttatatccgtggctctccaaactgacatacataagaatcagctgaagggacttttccccctccgtcggctctctccctcacttcctgattcaggtctggggactggccctggcatctctgctttgaaaaactcctccgttgattctgatacgtagcaactcctgagaatcaccttaagatgccaaaaatagctgttaaagagtttcttcctcactcggtcttttcagcctatttctgatagatcctcagttcaaaaacaaaaagcaaaaaaaaaacaaaaaaaaaaaccaaaaccaaacaaacaataagccccgctttagtgctccacggccacccaaaggaacgcggctggtctacgcacagcagagacccaggaggtcccggcgatcgagcggcgcggcaggtgaaacttccgcggagacgcccgggacacgctcgcagggaccggaaccgtcccggctaccacccttccgtatgcaccaccgctgtgtcggagttcataaccaaccccagccaaaggctacccagcgtcaacggcctctggctttaaaaaaaaaatctcccttcgggttaaagagccgcggcactgacgcaaggaactggcttcgagggtccgggaccgctccgcgcccgcgaaccgagttcccgcctccctcgggaggacgtccgtgcgtacgtgcgcgtgccgcaaccgccctccttcaaacgcgcgacgcgagggcgggggcgccgcgtgcgcgcgcgctctcgttggttcgctctctcgctagctctcggctgccgctcttgctgcggctgcggctggggctgggggcggcggcggcggcgacgcgggcggcgggcggcgcggggcggtccggcgggttcaaagaggaaaacatggcggaaaacaaaggcggcggcgaggctgagagcggcggcgggggcagcggcagcgcgccggtaactgccggggccgccgggcccgccgcgcaggaggcggagccgcctctcac

SEQ ID NO: 2308 - DNA, 2300 bp, Homo sapien
acctccgcctcccggcttcaagcaattctcctgcctcagcctcctgagtagctggaattataggcacccgccaccacacctggctaattttgtacttttagtggagacgggggtttcaccatgttggccaggctggtctcgaactcctgacctcaggtgatccacccaccttggcctcccaaagtgctgggattacaggcatgagtcactgcacccggcctgtgtgtgtgtgtgtgtgtgtgtgtgtgtgttttcaaactcatgggcaaattcaagttcagatggtgcacttttcattgattaatgttatagcaaatgtcagtttgttttcttcagtttctgctgatggttttaactggcacagaaagtatttattcaaccttacaaaactgtgtaagttgtattgtgatacagtttattgacttgtacagtattgtcattacaacccattcaggtatgcatgaatctgaagcagaacaccatttaagactggtgctgtataatataattcctacagatgtgggtccagggaatagaactgagcctgtcttttttttaatgttaagcaggttacccccagtggggcttctactagacatctctccatttggtctcttcttacactccaacccagcaggaacagttaataattggatgtttataaaatgggggtaaaagggtttactgtgatggatcctggctatccctctaggaggagacctttgcttcagcaatggtgtcttcatcctcgcagcctgaagctgcttcatttccttaggtctgttgtgttttctgtaaagtgttaggaattctggatatttttgtaaaagaatcaagatttgtataaaatgttgtttacagatcttttaatgaataaatacataaaccccccacagatcccttggagaattctttaagatcttttatgtcacttaaatctatagctagcacatttacctaatggtacttcggtaataagaattagtcttagactgaccaggcttaataacggaggtcaacatttccaggctcttggcagacaaaggctgggtctagactgcacactgggcagggcatatagtctgacaactttatttggtttttacctgcttaatcaaagggaggctgcttagtccaggagccatgcagaagagagtgcatgggcagcagcttgagtggttcggaggcagtgaggaatgccattctattaccgttaagtcctaaaggcaaaatgacaggatttttaaggaactgaggttccttttgatacgcagaccataaagcttcacaattttaattggagactggcgcccaattctagagtctctttaaaaaatgtacttacccaatgcaaaggttttaagggcaccgagggggaaggatagttggggtacagcaaggaagtaaaagaggaatgacccggggtgcagtggctcacgcctgtattccccacattttgggaggccaggagttcgaggctaggcttggcaacatagaaaggctccatctctacaaaaaaaattaaaaattagccaggcatggtggtgtgcacctctaggcccagctactcgggaggctgaggtggaaggatcgcttgggcccggggggttgaggctgcagtgagctatgatcacgccactgcactccaacctgggcagcagaacaaagaccctgtgtctacaataaaaaaggaaaaaagtctcgcacagaggaagagaagattaaggggagaaggtgggagtaagcagaggtgggaaaccagtttatctctccccgccaaatgctgcagccagttccctccaaaagtgttaaggggctccctttccagatatcaatgttttggaggaaacgaaaagccccaacttcaaatcgccgccattcgcaggcaaaaaaaggggcagtaagcagaggacaggaaattgaggcctttcgctgacgcagacaagccaagacgttacgtcacgtccgcccaaaacaaaccagcccggcaatttctagataccgggcggacccgccttcaaaattagcaactgagcatgcactaacgtcaatacggagggaacgtgattacatcagtgtcaggcgccggcgtaattaaatataactgagtttacgcagacgcagaaaacgcaggcaaacctgaggtcctcagaatggcgggcacaggtttggtggctggagaggttgtggtggatgcgctgccgtattttgatcaaggttatgaagcccctggtgtgcgggaagcggtgagtgcggggtgtctttgtagctgactcactgctagctggctcggtactgaa

SEQ ID NO: 2309 - DNA, 2300 bp, Homo sapien
tacaggcgcctgccacctcgcccggctaattttttgtatttttagtagagatggggtttcaccatgttagccaggatggtctcgatctcctgacctcgtgatccgcccgcctcagcctcccaaagtgctgggattacaggcgtgagccaccgcgcccggccaagttcaataatttttatagtgccattatatgtgatagcaaaaactaaaagcagggtgaatatccattttcaggagaataaagccttaagaatgaattttttttttgagataaggtttcattctgtcaaccaggctggagtgcaagtgttgtgatcatggcccactgcagcctttatcccctatgctcaagcaatcctccttcctcagcctcttgagtagctgggaccacacttctgtgccaccacgctcagctaattctttaattttttgtagagatggagtctatgttgcccagccttgtcctaagctcttgggctcaggtgagctgcctgcttcagtctcctgaagtgttgggattacaggcatgagccattttagctgcacccagctaaaaatgaatcttaaaaacatatattgaataaaacagtaagttgcagaagaatacaatattttgtataccgttcaaagacatacaaaaacctactaatatgctattggggttttatgtgtgtatagtgaaactataatgcagggcaagggaataacaaatacaaaattccatggtcactctgttggaaagtagaagaagaatgccattggagtcgcataggaaacttcaaagacattagtaatgttctgtttctaagctttgtttgtggtagagaatttattcatttcacttgtgatgttataaaatattcatacatatcaaagaatatgtaaagtatatacattaaaaaggaaagaataaagaaattatagaaaaacataatttttaaaagaaagaaattaagatgtagcagtgaggcaaaagtgttgaagataaatgcagtgttggggctgggtgtggtggctcatacctatgatctcaagcactttgggaggtcaaggcaggataagttcaataccagcctgagcaacatagcaagaccccatctctacaaaaaaaaattaattaaaaaaaagaaaaaagataaatgcagtgatgaacatggattctcagctgcagaaggaaagagatgagaaggaagggtgttggacaaaatataacaaaaacctagattacagtcaaaatgtaattcagaaagagaccttggaaatcacctggtcagccctgctagctgcatagatatggacaggccaactgagaaaagtgagccacccactattatgcaactgctttatggtagaactctgactaaatttaggttcctgattcccatcctgtgtggatccctgggaaaagagcaagagacagtgtgaagagggcggggggaaaaagacgatttggatatggaagaaaaagagggagtgtaagtcgaatctgaagtttgagcctgggacctggaaggcaatataatgtagtatattatagggattaaaaatcacctgacttgtgagtccagcatcttcacttactaggtgggatgaccctggagaatttatttaatcatttggcatctcagtttcctctgtaaaagaaaaataaaaataatagattattatgtttgtagaagcacttaatacagtacaacatacctttagcactcaaatcactatttttatggaataattatagtgcagtatgaaatggcaatgtcagccaggcatggtggctcacatctgtaatgccagcactttggaatgctgaggtgggagaattgcttgagcccaggagtttgagacaagtgcctgggcaacatagcaagaccttgtctgtattttggggaaaaaaaatctttatttaaaaaaatgggaatattgagagggaaacttatttggtggggaaatataatgggtttagctttagatatgtattgtttgtttaattgattcatagtccaagttccaaaaagaacctgatatagtgacctttagacagatggaacttatgtgctaatgggacagccaaataataaccacccgtaggtagcctgaaaatgtagaagatgagataacagggctggaaaactaaggtttggaattacagtattatcatagccagctctatctctgtgccagttagccctttacggaagggaatgttgaagaggagtgtctgagcaccatgctcaggaagagaaagaaaggacaagagaaaaataactgctttgtcatcaagtcaggaaaggaatcag

SEQ ID NO: 2310 - DNA, 2300 bp, Homo sapien
taatgaacttttttcttttttttgagacagggtcttgctctgtcacccaggctggagtgcagtgcagtggtgtaatcacagttcaccgcggcctcggcctcccaggctcaggtgatcctcttacctcagacttccgagtagccaggactacaggcacatgccaccacacccagctacttttttgaaccttttgtagagacgcggtttcaccatgtcaccccagctggtctcaaactcctatgctcaagcgatccatgtgccttggcctcccaaagtactgggattacaggcgtgagccactgtgcccagcctgaactttcaaatggaaaaaaaattgaaagcaaatttctgcacgtttctatattctacacatgcagccataagcataggtgtaaccctgatggcatgtttgtactagctctggtgtaagaatctcttcctgatttctgaagttgaagttttgtttgttgagtatttgtgaaccctttaaagaaccagattttattttaccttggcctcctcatcatcaaaatagtacaaattgctacattaaacactgtattctcagacttcaaagggcattaactaccattatgtatatctccatcttacccatgagagggcagtagaatacatacatgtgaattcatttattaatctataaatttggtttcatacgtgatacttggaattcaacctgccttattttgccaaataatcttcctgaatgcaggggtcaaaaaatacatttctgggctgggtgcagtggctcatgtctgtaatcccagcactttgggaggctgaggcaggaggactgcttgagctcgggagttggagaccagcctgggcaacatagcgagaccctgtctctacaaaaaaataaaaataaaaatattagccgggggtggtggtgcatgcttataatactagctgcttgggaggccgaggtgggacgattctttgagcctaggaagttgagacttcaagtgagctatgattgggccaccgcactccagtgtgagtgacacaaagagaccctgtctcaataaataaatagatagacacattatataagaatttttttttttttggtgggggaagcccataatgatcagtgtgcaaaatttactacaaacaatatccacatttatttcctcattgggacatgattttttttaagtatgtcattacttttttttcccccatcatagaatgtaatttctgttttactgtctacaggtgatagtttcacaacggtttgggatatgctacctttattgtttgggttaagtttgcttgtgacagtcatccgtgatacgtaactaaacacctctctttctggtagtcttctattttggtacctctgtgtgaacaaatgtaggaagagtttggtcaccagacccaagaggctctggctgggtggggtggggtggggtggggcggggcgaggcggggtggggtggttagcgagtgcctgggaaacaggctcaactgatccttgtcccgcagcctcggtgaaactgggttacagcttgcagtaggcacaacaccacgcacatacctaagcaagagcgtgttgcaggcggagcgcttaggcatgtgtgtctcaacagggcgtgggggctgacctcacgcactgggagtatcaaggcacccccgttctgagattccaagcctgaggtgccgcgagagttatttgcttctcttgacgtttcaagttggcaccgtagtgcaattgtttgctcactgaggtcagcctaggaaacagtgcttggattccctgattaagccaggctttatcttgttgagtagttgtgaagagtaaaccttcacatgaagcatagggccgtctccgtggggccgatgcgacggcaggcgaaggcgatggagctctggctcgagggcttggccggacgacggtgacactggtcgcccgcctgctggaactgcagtgaccgaggtcctggcaaggttctggccatacagcggacttgaggcgtggtggttcccctcaccgccggccggggcggtgtcggaggcgggcatagcgtgaggggtgggaataggagccaataagaactgagccttgccagggagggcggggctagggggtggggctgcagccgggacggggccttcggcagggcctgcgggggcgggacggagcggacccgagtgatacccgggagactagcttggccacaggagacaacgttgaggtacagacaggtaagagtcggggtgattcggcgcggggttttaagccgcaggggcttcggactctcggggctgtcggcatc

SEQ ID NO: 2311 - DNA, 2300 bp, Homo sapien
ttttgcttaccaaagtaaaatgtacatataacttttaagaagcatgcctattacttaaggtcaggtgaaattccaaatgggcagatgatacttccacacatacaactgtgttggcatctagtggctgggctgacatttcattcaacttattcaataaacaattattgatcaaatagctaaattatcaggtactattctaaacaccaaaggtatacagaataagatttcattcctatcctctagttgtcctcagcatgaagttatagtgtggctacaagtaaaaaatagaattttgtgaaatgtcttcaaaagtaatgaacttttttcttttttttgagacagggtcttgctctgtcacccaggctggagtgcagtgcagtggtgtaatcacagttcaccgcggcctcggcctcccaggctcaggtgatcctcttacctcagacttccgagtagccaggactacaggcacatgccaccacacccagctacttttttgaaccttttgtagagacgcggtttcaccatgtcaccccagctggtctcaaactcctatgctcaagcgatccatgtgccttggcctcccaaagtactgggattacaggcgtgagccactgtgcccagcctgaactttcaaatggaaaaaaaattgaaagcaaatttctgcacgtttctatattctacacatgcagccataagcataggtgtaaccctgatggcatgtttgtactagctctggtgtaagaatctcttcctgatttctgaagttgaagttttgtttgttgagtatttgtgaaccctttaaagaaccagattttattttaccttggcctcctcatcatcaaaatagtacaaattgctacattaaacactgtattctcagacttcaaagggcattaactaccattatgtatatctccatcttacccatgagagggcagtagaatacatacatgtgaattcatttattaatctataaatttggtttcatacgtgatacttggaattcaacctgccttattttgccaaataatcttcctgaatgcaggggtcaaaaaatacatttctgggctgggtgcagtggctcatgtctgtaatcccagcactttgggaggctgaggcaggaggactgcttgagctcgggagttggagaccagcctgggcaacatagcgagaccctgtctctacaaaaaaataaaaataaaaatattagccgggggtggtggtgcatgcttataatactagctgcttgggaggccgaggtgggacgattctttgagcctaggaagttgagacttcaagtgagctatgattgggccaccgcactccagtgtgagtgacacaaagagaccctgtctcaataaataaatagatagacacattatataagaatttttttttttttggtgggggaagcccataatgatcagtgtgcaaaatttactacaaacaatatccacatttatttcctcattgggacatgattttttttaagtatgtcattacttttttttcccccatcatagaatgtaatttctgttttactgtctacaggtgatagtttcacaacggtttgggatatgctacctttattgtttgggttaagtttgcttgtgacagtcatccgtgatacgtaactaaacacctctctttctggtagtcttctattttggtacctctgtgtgaacaaatgtaggaagagtttggtcaccagacccaagaggctctggctgggtggggtggggtggggtggggcggggcgaggcggggtggggtggttagcgagtgcctgggaaacaggctcaactgatccttgtcccgcagcctcggtgaaactgggttacagcttgcagtaggcacaacaccacgcacatacctaagcaagagcgtgttgcaggcggagcgcttaggcatgtgtgtctcaacagggcgtgggggctgacctcacgcactgggagtatcaaggcacccccgttctgagattccaagcctgaggtgccgcgagagttatttgcttctcttgacgtttcaagttggcaccgtagtgcaattgtttgctcactgaggtcagcctaggaaacagtgcttggattccctgattaagccaggctttatcttgttgagtagttgtgaagagtaaaccttcacatgaagcatagggccgtctccgtggggccgatgcgacggcaggcgaaggcgatggagctctggctcgagggcttggccggacgacggtgacactggtcgcccgcctgctggaactgcagtgaccgaggtcctggcaaggttctggccatacagcg

SEQ ID NO: 2312 - DNA, 2300 bp, Homo sapien
gtcaaaactcctgtgctgattttagtagtaggatcactcctgtcaataaccactacaccctggcctgagcaacatagtgagaccctgtctcttaaaaaaattccttaattaaacaagaattctaaatatgggaagtcctggactaatatggtggctttaggatgccatcagggaccctaattatttgtttctgttcagatagtcttcatgtggctcttgtcctgctcaccatttgtgttaaaacaatggttggtttggaggcccctatccacatatttcctttttcaggcaggaagaagaggaagggcaaaaggcaaaacatatgccagctgagctggtcccttttaaaagaacttttggagacatcccacccagcaattctgcttacatcactttggccaggctgtgtcaaatggccgcttctagccacaaaggattctagcaaatgctgttttttggctgagcacattaatgctcaaaccaaagaagtttttgtttgtaagaaaggtagggaaaatgatctttgggtaggcaactagggtatttacacaattggaatgagaaaattggagtgtaacttatataaagataggaattactgaaggagaagcaggttcatggaggaagatgcttggtttggatgtatcaatttgtggatactgttgggaaatccaggtaaaaatgtaacaaaaaggagttggaaagaaatgaacaaatattttggttcagtaacacctttgtaatgtgttgcaatattgttgattgagaggttggccataaggctaagcactaaaatattgttaagttttgccaacaaaaaggcttgtcccaattttcaaaaagaaatagttaatagtaaaaagatcatttggtctatgcccataattctgttgctaatctgaagtgccaagctcatcttcaatataagctgttataatttaaaatttctgctgagtctagcagcgtactttctttacctagcagcaactatcaaatatttagtcataactggccgggcgcagtggctcacgcctgtaatcccagcactttgggaggccaaggcaggtggatcatgaggtcaggagatcaagaccatcctggctaacacagtgaaaccacatctctactaaaaatacaaaaaatattagccgggcatggtggcaggcgcctgtagtcccagctactcgggaggctcaggcaagagaatggcgtgaacccgggaggcagagcttgcagtgagccgagatcgcgccactgcactccagcccgggcaacagagcgagactctgtctcgaaaaaaatatatgtatatacacatatatatacatatatacatatatatacacacacatatatacagtcataactaagactgtgtgttattatggaaagagcgtgagatttgggtccagagagccttggctttgccatttatgatgaacagaatgactttgagcaagatacctgtcagagccccagttttcttatttgggaaacagggataaggtattacttgccttacaggattgtaattagtatcaaatagataatgtttgccaaatgttttacatacaataaaatgttatacaaaacaaagctattgttcttattataacaataggtagagaagtggtaactggatactctggaggacagttgagtttctgtaaaagacttgaagtaaatttaacacttaattcattaaactgtcaactgaagttctgctaagtcagacacattactaataaaaacatgcattcctgagcgtgtgtgcgtgtgcgtgtgtgtctgttgagagcttgatgaatgtaccagcatattcaccaaccacagaaagctgtttgcgtgatgtgaaaccctgaggatcatagcttcagaaaccggaaagacttcactgtatttcactagggtgggatatcaccatcagtggtcctacacttgccaaagatccagtctgtaagaagatttagagagtattgaaatgcaatttttggcccaccacagatatcttctaatcccaaagtaaagactgaaagcttcacctgtttttcactatcaaatgcctcaagctataaataggtccaaagctcatctctctccacttagcagagaagaatcaaatttccgggggcaaagcaaaataataaaatgaatgtcaggatattttatagtgtcagtcagtcaccccacagtctcctctctcttcttttctactgtgctatcctagaatcaaggatttcagcaacaatgcctctgttcaaactcccaggtaggtgtacaaagtgtttggagagctcagt

SEQ ID NO: 2313 - DNA, 2300 bp, Homo sapien
cttgattgcattcaagtctagggtctgcaaatgattccttccattcctattaagttgggaccttgagttggggataataatacataaacaaacttgtctgtcctgtctttctagctaggtatatgaggcaagagtcccatcataaaaagtgagtcatttgggcagttaggtggaaaacacactcctttgcaagtgcttgctgtctgcccaccaagtgtggtttcttctcatcttttgacttaattacagtgagggccccaaggctgttgcagctcctcgacctgatcggttggtcaatcgcttgaagaatatcactctggatgatgccagtgctcctcgcctaatggttcttcgtcagccaaggggaccagataactcaatggtatgagggcatacaaggcttgggggaggccaactgatagaccaacataaaatatgtggtcctatttaaacaataggtcaggaaacttaatgaagcagggagacttccatattgcttataactagttaggactttctacacattggttcagccccctaacctaatggttgcttacagtaagaagcacatttcttttcttgatgctttgaagacagtttaggtaatgaatgggtcaggagtgcttactgtggattttctcctctaggaaagaattagtactgcataagatgattaaaaataatgcttttgtagtttcatttcggaatagtgaatgtactatgattgttgtgcgctcaaatcattaactgcagggttttttttttctcccccccacaggggtttggtgcagaaagaaagatccgtcaagctggtgtcattgactaaccacatccacaaagcacaccattaatccactatgatcaagttggggggaatctggtgaagggttctgaatatctccctcttcatccctcccgaaatctggaatacttattctattgagctattacaccagttttaacaccttcctcgtgttatgtttaaaaaaataaataaatttaagaaaaccattttaaataatgcacagttgcagcctggaaaaacttaaggtggcgccttatagtatcaattttaggagctttatttggtgcatttaacgcaactggtaattgcagaatccactttgcctgtgtaagtgaaaaatatagactgttatcttgttggccctatgaaattctgcacttttcattatatactctaccttcattaattacttctggcaagatgttctgccttagcactcagttgcattcttttcctttttcttcctgttcattatgctttaattctgaggaccatatgagggtagaatatattatcttttaaaaattacaaaaatttgtataggcaaaccatttcttaaagttgatggccaaattttaaaatgttatttttcatatcatttataatcttgtcacaatccacttaaagaagtttggttatatttcagtgaaaattttcttccagagtaggttttttttcgtgggttggggggtaactttactacaattagtaagtatggtgcagaatttcatgcaaatgaggagtgccagcagtgtgataatttaaacatatttaaacaaaaacaaaaaaaatgaatgcacaaacttgctgctgcttagatcactgcagcttctaggacccggtttcttttactgatttaaaaacaaaacaaaaaaaaataaaaaagttgtgcctgaaatgaatcttgtttttttttataagtagccgcctggttactgtgtcctgtaaaatacagacacttgacccttggtgtagcttctgttcaactttatatcacgggaatggatgggtctgatttcttggccctcttcttgaattggccatatacagggtccctggccagtggactgaaggctttgtctaagatgacaagggtcagctcaggggatgtgggggagggcggttttatcttcccccttgtcgtttgaggttttgatctctgggtaaagaggccgtttatctttgtaaacacgaaacatttttgctttctccagttttctgttaatggcgaaagaatggaagcgaataaagttttactgatttttgagacactagcacctagcgctttcattattgaaacgtcccgtgtgggaggggcgggtctgggtgcggcctgccgcatgactcgtggttcggaggcccacgtggccggggcggggactcaggcgcctggggcgccgactgattacgtagcgggcggggccggaagtgccgctccttggtgggggctgttcatggcggttccggggtctccaacatttttcccggctgtggt

SEQ ID NO: 2314 - DNA, 2300 bp, Homo sapien
tgttgatgttgaagttggtgagttaagagcaaaaggtgaacagtaagcttttgagtttggttgtggaaaagttgatgacattggagtcagacctgagttcactgacattgttcttaaccaaactcaaatcctctggattattttgcgctgggttttgtaaccttggtaaggtttacttaattcctcagatttccccaatttgtaaaatgagggaaaagagaaactatggagatgattttgtacaagattaatttgataatacataatacctggtaatgttgtaagtgttcaataaattattatatagcagttatggaaggaatgtgattggtagaagaggaaaatgaattggttttgaatatatcgtagtttgtaatgaggactggagtttaggaaggaagtcagggctagagtagggacatgggcattatcttcatagaaatgttgaaaccataaaatcagtataatttatgtagttgctgtacactgtcattacttaacggtgtgattcaatacgacacacctgaactttcttagacttttatttttttagtcaagtgcagtagtgagaaggggggaaagaggagaacaaggaagttcgatctgtaactgactgaacaatcgagataacccactaccttcagaccagcccttagattttttaagagttaatcattcttacacgtacgatgactgaaatgttgtttctccttgaagtctggtattaaaaaaaattgttgaaatactagtatgtcataatttttaatcatctactttatgtcaagtacttgaactgtgctagatcatacaccaaattatcctgcattgttaagtatattgattgacattatatattaaatactgtgcaaggtgctgtgtgctactaaaagaggatacttcagcagcttctttaggaaatactaaagcttcttgcccttatagaatttccacttccttggaagtaacatgcccagtttaatttctgattggctatgaggagcgcaggtgtattaaacattttcagtaagcttttttctcctcaatagcaaaaattagattcttaagattgaaagaccaattaaaaattacagcagactgagctaggcttaaggcaagactaccttttattcatatgaataatcttttagaaaatgctggaataagacatttttacagctgtaccaatcctttggcacaagaatatgtaagaactatagttgtttttattggtttttgttcttgagattgttttcattctgtttttgactgtatctctttaggaggctgaggatggcattattgcttatgatgactgtggggtgaaactgactattgcttttcaagccaaggatgtggaaggatctacttctcctcaaataggagataaggcaagataattctgctcattcgagagagggttaagagttgtcatcttaatcataaatcctgcaggatgggttcttcaaattttatcaagttttgctgaaatatattttgtgtttaagagaaatacatgaatatcttgtatttgaaagcagcttattaaaagtgtctgtcaagctctttgttaatcaaagccttgttaatctagctgtttaaacgttagataaaacatgcttaataaaatcgttattggtaagaaagttaaaacagttactactgaaacattatcaaagtaaaagcacaccaaagattttacgttgttgttcattttttctcatacttaatatgtttggtttttggatagccctctagagaaattcagaatctataaggaatacagactgaaagataaaagtttgatcctttgtgaaaagtgggatgagacataaatgttttggtgaaaatcaatttcattgaagtaataacaaaggatatttggaatgaaaagcatgcgctgggggagttataggtcttgttttctgagttaaggagattggtgtggaagtgatatggtgttaatgagcatccttaattttcacaggttgaatttagtattagtgacaaacagaggcctggacagcaggttgcaacttgtgtgcgacttttaggtcgtaattctaactccaagaggctcttgggttatgtggcaactctgaaggataattttggatttattgaaacagccaatcatgataaggaaatctttttccattacaggtaaggcgtgactttcaggaactttacagctaacttaccatccattctttggtgttggaataaaaaacatttagtattgattgattatacttgttgaggttcagatttcatattggtagaattatggcaagatataaact

SEQ ID NO: 2315 - DNA, 2300 bp, Homo sapien
gagatggcgccattgcactccatcctgggcgactgagtgagactccgtctccaaaaaaaaaatttagaccttgttctgtacttcaaggaaaagatttcttttggataatgacatcaggtatgtgctttgggagagtaatggcagcaatatgaagcctagatgggatggagaaagacaaaagatgaaaaggattactatgaaattacttggatagttaaggtagtccttgaactaggcacacagatagtgactatagacaagtgaaggtacatgagagatactggaaagtcatgttataatttaataattgctattagccagaaagagcaaggctagtatcttgcttatcacttactgtagcttgggaaattatttcacctctgagcttcagtttttaaatttcaaaaatgattgtgtaatagtttaaaaagccctcgaagtacctagctcataataggaatttcgcatgtgacagatgatactgttaacaaaaataaaaatacacttcagttgggcttatttttaataacttttaattcttggaatgctctgcttcccaaatgtgtctggcaaaactggcttgatgaagagagcctttgtgtgagactttccctgccattttttgtttttttttctttcttagtccaacagtaccctagtaaatcctctgtcatcatgcttcttacagtatataacatttacctgttaatgaatctgtctctgctgcactggactccctcagggcagggattctcctatctctatttaatatatttgatgtatagtatattgtcagctgttgatgttgaagttggtgagttaagagcaaaaggtgaacagtaagcttttgagtttggttgtggaaaagttgatgacattggagtcagacctgagttcactgacattgttcttaaccaaactcaaatcctctggattattttgcgctgggttttgtaaccttggtaaggtttacttaattcctcagatttccccaatttgtaaaatgagggaaaagagaaactatggagatgattttgtacaagattaatttgataatacataatacctggtaatgttgtaagtgttcaataaattattatatagcagttatggaaggaatgtgattggtagaagaggaaaatgaattggttttgaatatatcgtagtttgtaatgaggactggagtttaggaaggaagtcagggctagagtagggacatgggcattatcttcatagaaatgttgaaaccataaaatcagtataatttatgtagttgctgtacactgtcattacttaacggtgtgattcaatacgacacacctgaactttcttagacttttatttttttagtcaagtgcagtagtgagaaggggggaaagaggagaacaaggaagttcgatctgtaactgactgaacaatcgagataacccactaccttcagaccagcccttagattttttaagagttaatcattcttacacgtacgatgactgaaatgttgtttctccttgaagtctggtattaaaaaaaattgttgaaatactagtatgtcataatttttaatcatctactttatgtcaagtacttgaactgtgctagatcatacaccaaattatcctgcattgttaagtatattgattgacattatatattaaatactgtgcaaggtgctgtgtgctactaaaagaggatacttcagcagcttctttaggaaatactaaagcttcttgcccttatagaatttccacttccttggaagtaacatgcccagtttaatttctgattggctatgaggagcgcaggtgtattaaacattttcagtaagcttttttctcctcaatagcaaaaattagattcttaagattgaaagaccaattaaaaattacagcagactgagctaggcttaaggcaagactaccttttattcatatgaataatcttttagaaaatgctggaataagacatttttacagctgtaccaatcctttggcacaagaatatgtaagaactatagttgtttttattggtttttgttcttgagattgttttcattctgtttttgactgtatctctttaggaggctgaggatggcattattgcttatgatgactgtggggtgaaactgactattgcttttcaagccaaggatgtggaaggatctacttctcctcaaataggagataaggcaagataattctgctcattcgagagagggttaagagttgtcatcttaatcataaatcctgcaggatgggttcttcaaattttatcaagttttgctgaaatatattttgtgttta

SEQ ID NO: 2316 - DNA, 2300 bp, Homo sapien
atttcctattgctgtgatatttgagaatgtatactaaaagtagaattacctaattacctaattagtttcacatgacctcatatctagcgcaagagcctggtacagtttctctataacattagattagaatacacagaccagctgtattgcaggaaggggagatctcgatttaagaactgggtgaattaaacaaaacagctggtttgaaatatttacattctgggccaggcgtggtggctcatgcctgcaatcccagcactttggtaggccgaggtgggcggatcacctgaggtaaggagttggagaccagcctgaccaacatggagaaactctgtctctactaaaaatacaaaattaggtcgggtgcggtggctcatgcctgtaatcccagcactttgggaggctgaggcgggtggatcacgacatctggagttcgagaccagcctggccaacatggtgaaaccctgtctctaccaaaaatacaaaaattagccgggtgtggtggtgcacgcctgtaatcccacctactcaggaggctgaggcaggagaattgcttgaacccgggaggcggaggttgcagtgagctgagatcatgccattgcactccagcctaggcaacacgagtgaactccatctgaaaaaaaaaaaaatttacattctgtagtttcccagaaatatattccaatttctaacaacttatcatactgttgtccagtgctatttattcaacaagcttttgagagttgttgagagcgggcactgtcaacaaccagggatgcaaagatgaatttcataagctctgtgctagagtattactacctagtaaaaactaataattacaatagagtgagctatgaaagcattgaaaatgaagcaaatatttgtgcttaggaaagcgtgggaaggcatcaaagagagcaaaaaggcagttttgaggtgttatacatgggactggacaccagcaacaaaggtggtgaggaaatttttgaacagaaatgggacacggcctcctcttagaattcaagaggttgaattgaaggttgtctttccttcattgcacttattccaatgtgtatgtttagatttgtttttgtgatcatcaatgatgctagactaaaagttccttgaggacaagtctatatccgattttctttacaactgtatacttcccagtggttacacatacaacatgtcaaataaatgtgttgtaagcaaaaagtgggtaggagagttctcagaagactggctgctcattatttatccaatactgtcaagtgagagagccagtgaatctgtgaaaacagaagcattgaatctgggaaaagcattcctctcaccagaggagcatgctctactgtctggcaggggataatccattgaacttcctgtggtcataattacccatttttctccttccttcttcccccattggatgaatcatctctttgctcttatttcaaccttttaattactgatccaccctctttgattacctgacacaacaggaatatctttcgtaacttgaaaggtcagttgactgaatttgtttcattttgtttagtgattatgcagccttgctcactcttgtgcatctgttgcaatgtttttcgtggaaaacaaaggtctcatttagatttctaaattaccttgctacaaagctgactctatactaatgaaattcctctaaaacagtagacgtaagaaagaatgcttgcactataagaagaaacgagtgtgaggtccttccggatttttgctgggaaaagataaatcattttttatgactcctgaatatgccatcagaattgttggccttcaaggtttaccccattattgtgggctaaaacgtattcaaacgctcgaagactagagacgcctaaagccacccgccacccctagtgtccaggaggagtcagtaaacaccgagattgcttcccgcagcacacccaagaaggaatgtaatgtaatgcagccaccatgttggttgtggttaagtgcagcaaactgcttggcgtcacttagccctgctgcgcaagcgtgttgagagtacgcttcactccgccccttctcgtgcacgcgcccggagcccgcaactctcgcgagagaagcgagatttattcctacgtaccgggccgtgctgcttatggcggcgctggagagggggcgctgagctgttggggtgagtacgacctcagggtccaactgggggtagcagaaacccaggggaagggctgagaataagaccaaggctaacgagaagccttctgagtcaaggtgggcactcgtagagctctaggtgg

SEQ ID NO: 2317 - DNA, 2300 bp, Homo sapien
tccagtcaggtcatagactccggtatcacacctccagctccttgaaaaggtccttatcaggtgatattaactaatccttgtgcttttaagttatagggacttacacatatctcatccaaagaaggcatcaactcctgccagtatctgacactaaactgcaattaaccaaagcctcatcgttagactcaggcaaaggcgacaaagtaaactgctttcatgagacacagggacagtcttgtgttcaaaaatattaagattcatttaacaattctgcctctatctgaattaatataatttattctgtgccttgatactaaataatttaagtgtttagctacctatgaacttcttttcctgttattctcaaaactaggcagggtttatgacctttgtgtttgaaatgttgttaattctttctgttttgttttacctacaaaagttgaaactcttcaatcccgccatgcctagagactataacgtaatgttgtaagggccagtattgagagctaaaattagttcagaccctacaaatcaaggatgacacagatgccaaaacagctaaacaaaatgcttgcattttgtatagctaattgcaacaagccaagattacagcagctcaatgcatagaatttatagataagtcaattttgtaacccttgccttttggtttttgcctcttaacattgcttaagaggggttttaaggttaatgagtgcctgcccacctccttcccatctgacctagaacgtttaattggctgtaactcttttgactctaagtcagttggccgcaggagggacatgatggactcagggcaggtagcacaccaccctggcattgatatgggacaaaattaaagtttggacactgatactgtctctgggataccttgaccaaaaaaaaaaaaaaagtggaatgctgttttgaaggcatgagcctagccattccccatctgcgagcatttgattagtaaagctttcaccacaggtcacttctcatgtttttggcctctaggcagcaagcagccagacgtgagccagttgcaatagcagcattattgacaatagcaaaaggtggaagcaacccaactgtccatccacggatgaatggataaacaaaacgtggtatatatatattattcagccttaaaaaggaaggaaattctaacatatgctactatatggatgaaactcgtggacattacactaagtgaaataaggcagttatataaatacaaatgctgtatgatttcactcatgtcaggtacccagaatagtcagatttgtagagacacaaagtagaatggtggctgccaggagctggggataaggaagaatgaggaattattgtttaatgagtacagaacttcagtactgcaagatgaaagagttctagagatggatgctgatggtggctgtataacaatatgaatgtacaactgaactgtacacttataaatggctgagatattaaattttatgtgtattttgccacaatttaaaaaaaattaaatgaaagtaggccaggcgcgggggctcacacctgtaatcccagcactttgggaggccgaggcgggcggatcacttgaggtcaggagttcgaaaccggcctggccaacatgtgaaaccccgtttctactaaaaatagaaaaatcagccggcgtggtggcgcatgcctgtaatcccagctactcgagaggctgaggcaggagaatcgcttgaaccctggaggcagaggttgcaatgagccaagatcgcgccactgcactccagcctggacaagagcaagattccgtctcaaaaaagaaaaaaataatgaaaataaaaagaaactaactgtgactgaagaacaacccacatcaatgaaaaccagtagggaaaggagaccttcccactgcccagctaatcatagcctgaccaccaggctgtggtaactggaaaccaacggcgtggcaagtgtaggtctggggctccgcgcaaggaaggactgcaaggaagccgcaggttaaagcgggtcaacccgcaaaataggctgccactgcgcaggcgcccattgcgcctaccaagacaccttgtaaacgtgcccggaaatgacgcctgtaatgctgagacagactcccagaagatctgagcgagtcgcgtagctgagcccggcaggggctggggtggtgctgctgctatgagctgcaccatcgagaagatcctgacagacgccaagacgctgctggagaggctacgggagcacgatgcggccgccgagtcgctggtggatcagtcggcggcgctgcaccggcgggtagc

SEQ ID NO: 2318 - DNA, 2300 bp, Homo sapien
taatataacactaggagtagcattttggttttcaataaagaaaaaagtgaccatagttgaaattttcactgttgtaaaacttttaaaaatattgggatattagatttatagcctcaattgaataaaaatttttaattagatcaattattgcctctggtggtactttgtgtatattcttagtatcatctctctgagggagtatcttatctttttcagagtatctagactcagtttccctaaatagtaaaatgaaggagttaaactggatcatcctttactgctcaaaaattttattttatcgggaatgattgtttctgattatacaaaatgagctattaaaaatattgctaaagtccttagaaaaagcatcaattatattatgatgcccagagaaagttggaaaacaaagtcaatggtatattcaaaatggagctcattattttattgctcaaaattaagtaacttagcactaggatgatgataatagctagttactcaagcctgaaaccaggtagtcatcttagactgctccctttctttcacttcttactactaaaaagttataaaattctactaattttacttcttaaatatcttttacatttgacacctcctcttcactccactgtccgtgtcatagctcaagtcctcatgtctcacccaggctattaaaactgtctcgctactctggtctcttaagcctaaaccattcttcatactacaagttttcttctgaactcgatcgtgtaatcctttctgctcaaaattcttcaagatctccgtccacaaagtcaaaaatccagacacttttccaaggcctttctataatacttgctttctctttctctctttttttttttttttttttttgtgagacggagtctcactctgtggcccaggctggaatgcaatggggcaatctcggctcactgcgacgtctgcctccccgggggttcaggcgattctcctgcctcagcctcccgagtcactgggactacaggcgtgtgccacgtgcctggctaattttggatgtttactggagacagggtttcgtcatgttggtcaggctagtctcaaactcttgacctcaagtgatccgcccttcttggcctcccaaagtgctgggattacagaagtgagccaccgcgctcggctaatacttgctcttgaaatctctagtgtcatctcttgccattttccccacttaatcctcacacagaacgcttcttggacttagttgtaataatctctctcacaactccaatgcctttgctcgccttgcgtcagccagcaatactctttccccattccctctccctctccctctcccccttcccccgctctcccctctctcccctctttccctactctcctccgtttcctccctctgcctcctttctctcctctgtctcctctctctctctctttgagacagaatctggctctgttgcccagactggagccagtggcaggattattagctcactgcagcctctgtctccaagactcaagtgatcttcccgcctcagccttttaagtagctgaggacacaggtgcgcaccaccacacccggctattttaggagaggcagggtctcactacgttgcccagactggtcttgaactccttcctgggctcaagcagtcctcccgccttggcctcccaaagtgttgggattacaggcgtgagccaccggcccgcctagccaactctccattcactcattcttatgtgaaacagtaacagaactataccacatctgtggagcttctcctgactccccaagccaccctaagagccactttgcctacgtccttatcataggaattaccctaaatgattataggacattttaattgtttgcccatctgtttccttcctaagattgtgacctcttggagggcagaaatggatttttcactctcagcttcagtctgtcatagagcctgacagtttccctagcattctttgacaatagcagaagcctaaagaacttccactccaaggaaatacagaatccgggaaacaattgttcctagcgattagggaaatctcgcgagattcaggtcctgggagcctggcaagcccacacagcgacggttatttagccgttgaactgccagccgcccggggcccacgcgctccgggccgctcaggctgagcgatttcccgccttttctgaggttctgaggcgggagccattggttctttctgttgccctcatagaccgtatgtagcagttcgcgtgggcacagaacccacggtttcccgctagttcttcaaaggtgagggcaggtgcc

SEQ ID NO: 2319 - DNA, 2300 bp, Homo sapien
cgggaatgattgtttctgattatacaaaatgagctattaaaaatattgctaaagtccttagaaaaagcatcaattatattatgatgcccagagaaagttggaaaacaaagtcaatggtatattcaaaatggagctcattattttattgctcaaaattaagtaacttagcactaggatgatgataatagctagttactcaagcctgaaaccaggtagtcatcttagactgctccctttctttcacttcttactactaaaaagttataaaattctactaattttacttcttaaatatcttttacatttgacacctcctcttcactccactgtccgtgtcatagctcaagtcctcatgtctcacccaggctattaaaactgtctcgctactctggtctcttaagcctaaaccattcttcatactacaagttttcttctgaactcgatcgtgtaatcctttctgctcaaaattcttcaagatctccgtccacaaagtcaaaaatccagacacttttccaaggcctttctataatacttgctttctctttctctctttttttttttttttttttttgtgagacggagtctcactctgtggcccaggctggaatgcaatggggcaatctcggctcactgcgacgtctgcctccccgggggttcaggcgattctcctgcctcagcctcccgagtcactgggactacaggcgtgtgccacgtgcctggctaattttggatgtttactggagacagggtttcgtcatgttggtcaggctagtctcaaactcttgacctcaagtgatccgcccttcttggcctcccaaagtgctgggattacagaagtgagccaccgcgctcggctaatacttgctcttgaaatctctagtgtcatctcttgccattttccccacttaatcctcacacagaacgcttcttggacttagttgtaataatctctctcacaactccaatgcctttgctcgccttgcgtcagccagcaatactctttccccattccctctccctctccctctcccccttcccccgctctcccctctctcccctctttccctactctcctccgtttcctccctctgcctcctttctctcctctgtctcctctctctctctctttgagacagaatctggctctgttgcccagactggagccagtggcaggattattagctcactgcagcctctgtctccaagactcaagtgatcttcccgcctcagccttttaagtagctgaggacacaggtgcgcaccaccacacccggctattttaggagaggcagggtctcactacgttgcccagactggtcttgaactccttcctgggctcaagcagtcctcccgccttggcctcccaaagtgttgggattacaggcgtgagccaccggcccgcctagccaactctccattcactcattcttatgtgaaacagtaacagaactataccacatctgtggagcttctcctgactccccaagccaccctaagagccactttgcctacgtccttatcataggaattaccctaaatgattataggacattttaattgtttgcccatctgtttccttcctaagattgtgacctcttggagggcagaaatggatttttcactctcagcttcagtctgtcatagagcctgacagtttccctagcattctttgacaatagcagaagcctaaagaacttccactccaaggaaatacagaatccgggaaacaattgttcctagcgattagggaaatctcgcgagattcaggtcctgggagcctggcaagcccacacagcgacggttatttagccgttgaactgccagccgcccggggcccacgcgctccgggccgctcaggctgagcgatttcccgccttttctgaggttctgaggcgggagccattggttctttctgttgccctcatagaccgtatgtagcagttcgcgtgggcacagaacccacggtttcccgctagttcttcaaaggtgagggcaggtgccccgagttattttcctggggactgagcccagagcggggcgatgttgtgctactgcacctccccgccgcagccctccgctgttttcttttgggtagtggtccaggaacttaagacagttcctcctggcgatgtgatggaatttaatgggacaggagaagggaacgggctttcttttcaggccagcgtggcagcgggcggtagggcgaaagggagaaggaaacgagggtttattccgttgcccactccgcggtaagcgacgttgtagggctccactgtagcgagagccccgtggattccttt

SEQ ID NO: 2320 - DNA, 2300 bp, Homo sapien
tattttatatattttgtactgttttataattattttaggtgagaaagtaaacctggatcagaagcacaaattcaacatgcctggattcttttaacagtatgagatcatatacactaaggcctctttagcaagaaaatcactacccaaatgcatggtatttattatagttcttttagtaacaggccaagtgtctatcagttgtccattacatatgtacacacacacatacatacatatatctcccagggataggtatataaatccgctagaaaatgagttcctgaatcaatgctttatacaaaggaggcactaattccattagaaacacacatccaacattcttccatttatcatattcctgtgttagcatcttgtctgaaattaggttggcacactcatttccagtttccctgttttcaaaattatcttactacatagtagctcacattcccaagaccttggaccctggcatggccatttctaggtatatatctgttaaactaaatgtggcctgaggatacctctgttttgtgagttcctacataatgaactgcaacctaacttagtatgtacactacctgaaagcctaacttaggagtatacttttgtaacagacagctgaatttcagctcatcacagcagctgagcttcagtcaattacaggcagccagctgatcagactttgtccaagtaaggcaagtgctgatgtataatgaaatcaagctgtttcgatatctcatttctactttctgtccataaatgctgtctgcccacattgaggagcagagctctgtgaatctcttctgattctgagggctgcctgatttgacaatcattcttttttcaattaaactgacaaaaacaagcaatggggaaaagattccctgtacaataaatggtgctgagataactggctagccatatgcagaagactgaaactggatcccttccctacaccatatagaaaaatcaactcaacgtggattaaagacttacatgtaaaacctaaaactgtaaaaaccctcgaggataacctaggaaatatcattccagatgtaggaccgggcagagatttcatgacgaagacgacaaatggagtttcaacaagaacaaaagttgacaaatgggacctttaactaaagggcttctgcattatggcccagaaactttctccaggcagtttctccctgtttgtttcccatctctctaggatcgtgtacttttgttacctgatgtaacaggaaaagaaactatcaacataataaacacacaacctacagaatgggagaaaatatttgcaaactatgcatctgacaaaggtctaatatccagaatctataaggagcttaaacaatttataagcaaaaactgaagaaccccgttaaaaagtgggcaaaagacataaacagacacttttcaaaagaagatatatacatggccaataagcatatgaaaaaatgctcacaccacaaatcattagagaagtgatattaccttttaatagaaactgaagaggtcaagcatgccaatgtcatatggcaagtaaatggcagggccaaaattttatctcaggtcagcttgacatcctgtcagatgtggccatgttcctcagagtcattctttcacatgtgtaaattttacttaatatcttaaaatcccccaaaaatattttgaactacacattttgttctaaacaaaatttttagatgaggaataattttatatatctttacatgaacatttaggtaaaacttgaagccctcaagccccaaataaatttttattcccaagacttatttagatgatgttagagtgttttttgaatttggtttttcccattctgtatctatcttttattaatattaataaataaatattaataaagaatatatttaaaaggtaattttattttgaaacagaagagaggaaaatgcatgctttaataatgtcagtttccaggtaaagatattgtgagcttgtttgtctaaatacattttatttggaattcagtatgaattttcaatagatgcttttcagataagaaagcagtaaatcaaatgcaattgtataaacaagaagatcagagggattatcctgaagggtataaaatgaaccaagagcttttagtttgggtcaccacagcatctgctcaccaatgcaaagtaaggtaggtgtctatagtgagaaggctctgtgaaatgatatgttcttaagctattttttttcactttcaccattttatcattttttagaaagtggcaaatgctgaaagataatttgcttcaacaggctgtaatatc

SEQ ID NO: 2321 - DNA, 2300 bp, Homo sapien
tgttagtttagagttctacatttataggagaaacttcaaaaaaatatagagtatccatagttagtatgacaataggaaaaccaaaacaaattttcatcctacattttaaaaagggtcaggtgtacttgtcactttctattttgcagatggggaaataacactcaaacagattatatattttagtcaagttctcatagatttatggaagaattctgtttcttaatttttagaccaatattttcatcaccaggtcaccacattgattttatacagaattatagagctaaaagttaaaatatgtgaagttagttgtttcctatagaaaaaactcagtagctggctgtctaaacaagcaagaactataatggccatgatgggtaagcattttacataatttaccagttagtaattttaagatcctacagaggatcatcaagttctgtatctctaaaatactggaagcaactctgtaccatagagggagctcacatttgagaagcgcttgagaaagccagattccatgagtaaggaatttgtatgtttttgctccttaactcaaataccaaacaaaccttccgtggaatgtttgaatatgcaacatttcatttaaaagaatttgtgagaaaaacccctgttattttaacctttaaaagttaagtcttcctaaaatgggttagtttactttcttgtgtaataagaagtatagtaaacataaatctttgataattgtaggtcttaaagtcttaatttggactctttcagagcactagaacaatctgcgtttttattatttgtgttcatattagctcctccactggacagtcagccctttaggtaaaggaccgtagcttttccgtttgtgtttgtcagtgcctggttcagatgctcaatatatgtttatctaatttatctacaattctcattctaggaatagaaggttgattgaaatgaccactgatctctggaatttgacatttaaaataaatccctggtaacctgtgtaatgtggttttcatggtttcttataagttgattgaaaaaaaaatcctggttaaccaaggccgaacctatgaggtttcagtttacagaggttttagtgtatatagcttaaagatgctgttgggatataactgacagatttggggaaatcttggtacttctgattattgaacaaaatatttagtaaattatattttatttaatagaacaagcaaacaagtttatgttcatagaccacaatactactccattaaggtatatattttctttactgacaatgatacttgagaaggaaaaaaatccaaacacatctagctagctgtacaatatttgtaagattaaaaaaattcttcttaatcttcaaggtgatcaacttacattcaaaagtctgaaatttaattacccttcctcagtagtagacctaaaataattatgtcataacattatccagagggataatgatatcaatatcaatatcatatcaatatcatattgatatgatatatccaatatgatatcatatccaatataactatatccaatcaatacatattgataatgatatccaattgatattgaacaagttcttcatcacgcaggctctattgagatgcatgttctgtttctgcctgaggcactgtggatcctctattttcttccatgcatccaaaaattatttaatattcctggctaacccataatggagctgtcatccttgattgtattcttctaattgtgtcaaccttttttttttttttgcctgttaatctttttgagaacaaattacatacctgttctgtgtaaaataatctttaatttgtcccagctgtacatatttccaccttaaagggatatcctaagggtttggaagtgggatcagggggttcctagatttctgagttagccccttaacaccagttgtaatttcagttgaccttttttggactttatctttctggtgtcttccttgaccaaatggtagaattataagcatgatcatatgcattgggatggtactgaagtttggttatactttttcttggtttctttgccctttctgattttaacaaataggttctttaattttatctttgatttagcatgactgctctctttctgatgtccatgctttttggccttacatgtgggcaagcgatgtctttttgtattccaactgagtatacaatgcacatcgaaaggagagagtgtgcttattgcctaaccatcaacaccaccatctgtgctggatattgtatgacacgggtatgtagttcatgtcacttcttttggctgtaaattat

SEQ ID NO: 2322 - DNA, 2300 bp, Homo sapien
caatttgtttcctgaactaactacaagggaaatgggattaccttcgcctattcctctcaagggtcagcttcccttaagacatacaactttgtgaaagggcgactgggcaagtctatactaaagatctgaaactgttatgttggacaggcaaccaccatctgtctctaatacatgtgtgctaaaatcgtagcatgaaaaaaacaaacaatagatgtatatgttacaataggggttctcttccctctatataatctctagacatattttgtcttagagatgtaaaattcaacgatatatttaaagtataatatcattgttcattcagttgatttactgaacgccttctatgtaccagacactactctttaacttagttcttttcctttatactaaaacagaggtgacagatatagaactataagtgtttgattgaagctaatgattcacttctctctgcatacctaatgacttccatctttgtctttatttcattgttggagacatgtttattactagaatcagcactttcatttttctgtctttgactcgtttttataaatgagtcgatattcaaacaaatgtccaaagacacagaggtaggcaaagatggcaacatggtagaaactgaatggttgactgataagagtgtgatacaataatactaacccttatgcagtacttaatctgtgccaggcactgttctaggcacttcacaaatactaactcatttatcttcacaactctatgaggggagtactattacctccatgttgcacgtggggacactcggggccaatgacagtttggcacattggtcagccgactgaaagctgtgatttggctcctgccttcctgactcactctgcccccaccaggcttcactcgggctaactgcggttctcagaactcccttggaggccttgttctctccagctctgtgcttttgcgcatgctgtcttcctggactgatcttttccgcctgggctccgtcttctagaccagatcaggcccctctccttagcaatgccttttctggttaaggcagtcaggccaggcacacctgtctagcacccagcccttctctcctcaccctatttgcttacagatctgtctccaacaccagagactgtggttctgggcctggctgtctcctcattgttgagtccctggggcttgctactatgtctggcctataataggcactcaaagttttgctgaatttatgcataagctctccgaattttgctttcttgtctcccccatactgtctgacaccacatattgtagacacttagtcaatggaagtgggagtctgattttcctgccaacagcctaacttaataaaaacaaagcaaaacaaaaaccgcccccttcccctttctcccatctccacatcataattaagatcccgaaaatttgggatccttccaagccctccgatcagtggaacccggcaggacatgagaagtcagactccctccactggccggctgggttgagggcagcccacaggactcagggcgccgcctcccgcaccctctctcagttcttgcctattaaggtaagagtcccccgaggaggggggaggggccggagggagggtcccctagaagctgcttgtgtgcttgctccgcgccgcggagccgcagccctggacactcagtcaggtgccccgcgactggtcctgccagcttcggggcaacctccgaccccacttagctcttctacccgaggtcaccttcctagatttccatagccacgagaccaagtgcttatccctcaagcatcgcccgggcctcaaaccggtctccgcacagggcgctgattaaatgggtccccagtccccggtgggcgctcccgccctgcaggtgctccgatagccggcggcggtgcgcccactggagggaaggaaggtggtccctgggtccgggagaagagcgaacgtgctccctcgggctgctcgatctccacccgctggcgcccccacccgtcgccagccacgccgcttggggtccacgcgcccctccccgccgggccccgccccgccccccggaggccccgccccggtcctccccgctccgccccctccccgccggagcctgccgctccccgcgctcgtagcgcgggcctggggactggggatcccgccgccgggccgcagcatggggcgcttccgcgggggcctgcggtgcatcaagtacctgctgcttggcttcaacctgctcttctgggtgagaccaggagccgggagggccggtcagggcagggggccgggtggcgggcgcggggccggggtcccc

SEQ ID NO: 2323 - DNA, 2300 bp, Homo sapien
gtgcttttaagtcagtgggtgggtgcatgtgagtgtagaatgtgcacttcttggctgcttcttagcttccaggggttattcacacatatacacacacacataagcacacacactatccttgtgtgtgtatgtttgtatattgtgtctatttctgtgcatatatgtatatgtagctgtgtgtactgtatatttacatatgtttcatatacaatgatttattatgtaccaaacattggaccaaatgccttacaatacaatgaagtaggttctcttattttcacctacattttacatgtaagaaaactgcagtgcagagagagaagtaatttgtccagtgtcactcagccaagctatgggtgaggccaggctttatccctgatggtctgatcttgctcttgataccagcctctgaaaattacccagatgtgtcacatgcctcagggaggaccctgttttcaactgagaccattaacgcatttatggctaacacaaggtaggtgcggggataggaggagataggctgtggatggtggggatggagaaaaagatggaaactaagttctgtcttcccttccttaggacattgattgcctgccacatgcaagattgggtccaggtgctgaagaaacacagatgtgctgcatccttgactttaaggagcatccctgggttggagggattctctgcaggctgctgtggtggagggaagatttgcccaacttactcttggcgctggaccccctgagccatcttcacacacccaggtgaactttgggaaggtaacagcttttcagttgcaaacccaagtgaattagagcaaaacagatcccacgtgcttgacacatggaaactttcagagccaatggtttataaacttaccaagagctgggggagtaaacacatcccagggaactgtggagcacttctctggcattgatacacataagcagaaagcacagccttccccgacacttgccttaagatagtcttttgtcttagaacccagaggcttacctgagctaaaccacataaagtgcttagtgcgatgccttgaacataccaagctcttaataaacgctaaggtcactattagcattgcttgtcatggaataaacctaggatacatctataaaactgtccataatcttccttgccttgtggaaagttgttccactattccaacatccttttaggggttctcagctaatctacctttcaaaacgaaaatttattatacacttcttaagtgctaggtagttttgtatatttatgtgtattatctcattaaatgatctctcagccctctgagaaaagcactattatcatccatatttcacagatgaagaaatcgtcagagtttccatatatcattgtcagagatgttaagcaacttgcttaaggttacacagccttagcagaagtacttgtttgactccaaagcctaccattatgctggaatcactagaatccaggtggcctatctgaacccggattcaggcatctgaagctgaatagctgccattcttgcttttaacctcctggtaaaagcaggctatgcctgatctatctatctatctatctatctatctatctatctatctatctatctatcaatcatctatctatctgtctatctatctatctatcatggcctggctatgccacatctatattccatgatgtccactgaccagagggtttcccttatccaatccatacatgtgccaataaacaaacatttagtgagcaccaacatagttgcttctctcctataatcaacacaggaatggttaagtttggaataaattacttttcctaacacttgcataggactggactgtttgctttcaaatacttggttttgcttcatgctcacaactctgggatataggaatgattattttcatttcacagctgcaagaaccaagctcaaagaggaactgctgcttgccaaagtttcacagatagaaatgggggagctggggccagaacccagctctgctgacaccaagcccagagtttgtaccatgacactgggctgctccctcggagctgggtttggctgatgacctcaactctgagcacccgttgcctcccactgttccgttcaggcctgtgcgagaaagactcccaggcccctgggttctccatagcccacacttccactcggctccgcttctcttgcccagctgtctctcctccaaggagcggacagggcggacacgagacccgggtgcccttttgtcctctattccagctctgggcggatcctcctcccatgatgtggatgatgctgagga

SEQ ID NO: 2324 - DNA, 2300 bp, Homo sapien
tagaggtagttaggggcagaaaggagctcttattaaatcaacatgtgcaagaagaatatgaccaacaatttagggggtgaggatggagcatataagcaaacttataatctgcttacatcacttaaagtttcccccttacataccacatggaaaagaaccacaagtgtcccaaatccttttgtccttctgaatgatgccacaagaacacatacaaatgctctgcattcaacaaccaaattctctgttattctaaaagtttaatttcatacccaaattctcaggcagctattatgtaaggcttggggctagtgctttccaaacaagtttatacatgacatgattgatggatgaattcatcctgttatctggaaattcttttgtttaattgacgatgataaatttcctaatggatcacctcgactatgatactacttttgtagaaagggccattcacagtgttccctggcctcttgccctcacttccaaagtgtgttcatacaccagcctgtatctgaacaagtcagaagtggacaagcctaaggctgggaaacaacaaggtcacaccaaagctaaggctgacttccaattccagggctttttgcctatttcatccttctcagagcatgtgtaaatggaatgaactttcttatgggagcaaacgtgaaaatagaaagaagtaagacctcaagactaatctgaatcaagggagttggaaatgcctagtcagggcttcatcttgctcaagtgccatccattaagggtaaatgaccacccccagacttaggacaggaatcatctgcttcactaaatcccagttccctggagggtgcccttctgctaagttgcactggctggtgttaccagcaatagggagattctgtgccccaccttccctccctgttactctcctcacacctacttctcctctgtggcatccatacagggtaggggtccaacccacctttgctataggaagaagcgaaggcacagacaagctcaacacgggagggagtggggctgtaaatttccaaagagctacgaatcccctggaatgctacaattaatgatgcacatttggtgacaaatttgacttcaggggtatttctcccttgctcattttatgctggggtgggaacagccctggcagaggggcaggggaaagtcaggcaagctctcctgtcaggctgaatcgagggaactcaagaaattttgaagggtcaggaagaatttgtgtggggcctggagtgtggagaggggggcatgggggcctagggtttgctggctatatcagtctggggtcacagaccccttgcaaaactgatgaaagctgcggaccttcagctcagaaaagaatattagcattgcacacagtcgcgcaaatcagcctacagtttcagaggggccaaggactccgggaagttcctggaacccagggccttaagttaaggtcccggctctagctcctgactcctgaagtcctctgccccttgtccccatgctggacttgccgggcctgggggccttctagctggttctgcagccgccttcccttgtcagaggagcttgggcacctgcccctcgcggagctccccctgggtgctcacctatcctgggataaggaaaggcgccccgaagaaaaggagcagccgatgcctggggcaccgagggcgacgccgggcagaccagggaggcactggcgaagggcaacgcgcgggggcagggcggagaggtgagggaagctgcgagcaactccgcccagccccagccagtcggcccaacgacccctgccggtgccccagaaactccccctcccggctttgcgcgcgcggcccctcagaccccagtgggtttccctttgacctctgaaggtttaaagtccttctctggctgggtctggccagccctccaggagcgatccgtctgtagtccccaggaccccctccagccgggcaccacagcccagccacagcaggtgcggggctggtggtggggaggggagggatgggggccaggatttggagcgtgtgactcaggagtacgggaggaggggctaagaattcaagaagcctgtgtgagagcagctcggcgctccggcacagcagagagcgctgggagccggaggggagcgcagcggtgagtcaggctgccccgagccgatcccgagaggggcgcagcgcgggcgcgggcaggggtggctgggcttcgcgggagagtttgcaaggataccggtctggcgagctctctggttacccccgaggctcccgcaggccgaagagcagccctgagaaatgtcccgagtg

SEQ ID NO: 2325 - DNA, 2300 bp, Homo sapien
attgatcttgctgggagctgcatactggagctgttcctattcagccatcttgcccaggtcccccggcatgtttttttttttttttttttaattgagatggagtctcgttttgcccaggctggagtgcagtggcatgatatcagctcactgcaacatctgcctcctaggttcaagcaattctcctgcctcagcctcctgagtagctgggattacaggtgcctgccaccacgcctggctaatttttttatttttagtagagatggggtttcgccatgttggccaggctggtcttgaacgcatgaccccaagtgatctgcccatctcagcctcccaaagtgttgggattacaagcttcagccaccaagcccggcctctacatggcatttaaaggtgaatttattattttaaaataggttatttgcaactacccctctttcccacaaaacatcatctggtaaggtggctagacataagaacctaagtgaattagaattactttctgaaaactcattgaagatctctgtgttaattggagctattcaggtacatgactagaattggaaatccctggcctgtttgaactttgaaagttctacattttagagatgagagagacatgtttttataatgttctacatttctgaccctgagtgctgatttgggtgaatagaccattggctttacccataggaacctggctgcctgagtcagcaacatctgctctctggagcctactgggaggctgggggtgggggaggaagatggtctaggccactgagtggggcagcagagcctggggactaggagtggtgaaaatcagccacattgaacatatgggtgtcttctcaaggaaatgtgacatatgcgagagaaaatggagtctagaagggatgaggaagaggtgatcaagggagtgaggggttcttggagccaaggttccctgattaaggctagtcagggtgggcctgcatttccccaccccaaatgcccgcaatactcctgtagacaactcttaggaaattcagcacttcattatacactgcttccactggaaaatcctgccacgtaagcagctttgggtcccagctagattggagatgatcagtaaggaaccctaatgctaccaacacaagacaactaagaaaagtgcaaatattcatgaaaatcgttgccaactgttttgtaatcctcaccacaatcctgcaaggtggacagcagcatcctcaccacttttcagacaggtaaacaaaggctcagaaaggaaacagtacctggttggaatcagcactgaagcttcagctacctgcctgcagagatgtgctcatctagcagtttctaggagactaggctggcggcagtgcctgctctgataagggaggaggaggggagaggcttgctgtggtggcttgtagggggtgtgtgtgtgtgtgtgtgtgtgtgtgtgtgtgtgtctatttgtggggtcatttccagggctacatgtgagtttaagtgtgtgtatatgggttgagatatggtgtatatggatatttgtcggtcagttcttggaaagtgtgtatatgagtgtgtgttgagtggggttggggggttagtccctgagccgtgtgaatatgtggatgggggcactcgtgagggcaaatgggctcggattttgtgcatgattgtgtgtgtgtgtgtgtgtgtgtgagcttgagattccaagtatgtgggggagggagggggcggtgtcggagatcaatccctgggccatgtgtttatagtgtgtgtgtctgcccagaagagagtgggttactgggctgtgcacgtctgtgtagggtgagtgtgtgtatgagggtgaatgagtgtgggaggtgtcattccctggtccgtgtgtaagagtgtgaccgcgcacgccttcgtgtgtgtcccgggtgtgtggggtcggggcggtgacgaggtgagggggacgccggccgagccccgccctccgctgcaggtgggccggccccgcggcggggccggcagcgctagctgttcttggctcgcggccgcgccgggctcgcagggctgggctcgggctgcggggcggcgccgggacaggaagcggaaagcagcagtgcagcggcggcggcggcggggctctgcctctccaggagcccagcgcaggccgcagagccggggccgctgtgagccgagaccgcgggccgcggagctcgggcggccggcgcggaggtgagtcccgcgagaggccgagcgctgcgcggcggcggtccccggggcagaccgttggctgggagacgcccccacctcggaccccgcgt

SEQ ID NO: 2326 - DNA, 2300 bp, Homo sapien
ctgatttgggtgaatagaccattggctttacccataggaacctggctgcctgagtcagcaacatctgctctctggagcctactgggaggctgggggtgggggaggaagatggtctaggccactgagtggggcagcagagcctggggactaggagtggtgaaaatcagccacattgaacatatgggtgtcttctcaaggaaatgtgacatatgcgagagaaaatggagtctagaagggatgaggaagaggtgatcaagggagtgaggggttcttggagccaaggttccctgattaaggctagtcagggtgggcctgcatttccccaccccaaatgcccgcaatactcctgtagacaactcttaggaaattcagcacttcattatacactgcttccactggaaaatcctgccacgtaagcagctttgggtcccagctagattggagatgatcagtaaggaaccctaatgctaccaacacaagacaactaagaaaagtgcaaatattcatgaaaatcgttgccaactgttttgtaatcctcaccacaatcctgcaaggtggacagcagcatcctcaccacttttcagacaggtaaacaaaggctcagaaaggaaacagtacctggttggaatcagcactgaagcttcagctacctgcctgcagagatgtgctcatctagcagtttctaggagactaggctggcggcagtgcctgctctgataagggaggaggaggggagaggcttgctgtggtggcttgtagggggtgtgtgtgtgtgtgtgtgtgtgtgtgtgtgtgtgtctatttgtggggtcatttccagggctacatgtgagtttaagtgtgtgtatatgggttgagatatggtgtatatggatatttgtcggtcagttcttggaaagtgtgtatatgagtgtgtgttgagtggggttggggggttagtccctgagccgtgtgaatatgtggatgggggcactcgtgagggcaaatgggctcggattttgtgcatgattgtgtgtgtgtgtgtgtgtgtgtgagcttgagattccaagtatgtgggggagggagggggcggtgtcggagatcaatccctgggccatgtgtttatagtgtgtgtgtctgcccagaagagagtgggttactgggctgtgcacgtctgtgtagggtgagtgtgtgtatgagggtgaatgagtgtgggaggtgtcattccctggtccgtgtgtaagagtgtgaccgcgcacgccttcgtgtgtgtcccgggtgtgtggggtcggggcggtgacgaggtgagggggacgccggccgagccccgccctccgctgcaggtgggccggccccgcggcggggccggcagcgctagctgttcttggctcgcggccgcgccgggctcgcagggctgggctcgggctgcggggcggcgccgggacaggaagcggaaagcagcagtgcagcggcggcggcggcggggctctgcctctccaggagcccagcgcaggccgcagagccggggccgctgtgagccgagaccgcgggccgcggagctcgggcggccggcgcggaggtgagtcccgcgagaggccgagcgctgcgcggcggcggtccccggggcagaccgttggctgggagacgcccccacctcggaccccgcgtgcccctgcgccctcctcccgcattcgccccgccggacttcgaccccgggtggccggctcccgcctcgggccgggggctccctcccctcctccggagcgctccgggtagtgcttcctctgactccactcttctccccatgcgttgcgcccctcctggccctgccgtgcgatctccgccgcaccccactccttggggtcccggggttccctgctcacacctcggacgtccctttctccccgggctggcctttggagtgcgccccttcggtgcgcgtgccggggcggcgggcaggccggcagggagtggccgagcgttggaggcaccgggcggctgcagcagccgtgcagggcgggagccgggcgcgcaccggggttcccacccctggcggggctcgacccgggcgccgcctggcccttcgccaggaaccgggacagagctggtctgtgtgcacacctcgctcacaaaaaattgagccggccctggaggcctggggggcgagtccggttgcgcctcggagagcgcaacaggcaggtaggagtttactttcaaaaacgccggggtggagcagaggcgcctggcgggtctctgcccaaggtgtccctgctggaggaaatctcaccgcgccggggcagccttcgccaccggcaggacct

SEQ ID NO: 2327 - DNA, 2300 bp, Homo sapien
cccccaccataataggctgccttgcttcctttttatggattgggaagtctctgaggctccaaggagaaactgctttgcccaggtgtacagctagttagtaggcagcggactgagatgtgtgctccgttctgtctgactgcaggtgagccttgtggcaggaaggccggcacagagactctgctctgcttctttccaagcatttctctcattaaaaagacagaggaacaagcatttcggaacccgcaaagagagtgctgatagacagtgactttcgtttacctagcacatctggagctcgcgctgggtgccttcatagttgttagctcatttggtcttcacggcaaccctgatatttgcattttacagttacatgttcaaagaggtttactaattttgactggggcctgatagctaataagtgagtaaaacccgagattggaacccacctttggaaactgtgtctgcttatattttcagatctacctgtgaggtcggtggctggttggtttaccctgtttaacagatgaggaaactgaggcataagaaagcaagtggcttatcccaggttgtactaaacagtggctgggctcagactagaactcaggtttccccagggctagccttgggctcctgatggcagaggagaagtgaaatggtaagtcagggcatcagggacaaaggaggctggccctgggtggcagaccttggaagtgatcgtacctgactcccaggaagaatgaatggtaagggtaaatacaccctaactgggattagaggctgtgggggctgtattggtggtgtatggcaatttgtgctgacctgattccctccagacttatgtgttgttgctggggtcagggaaacttggcctcctcccaggagggttagggtatggcatttacagctcctttgttttttcttcacacttatctcactggctgtgtttgcagtttcagcttccagcggctggaagaaggaaccctgttgagctgagactagctctggggtgaggggtgcagaaagagacagaacttgtggatctcggttttctagaagtaaaaattttagcatgtgggagctcaggaatgtacttggaaatgtttccaatttatttttattgcaaagcaatatctaatgaaaatgtgggagaagacccaggagcctgcaaataataaattgcctgctttcattttctgtgtctccttttaaaaatctttgtccttacataagcaattttatacaattgtaactgtaatgttggttcactgtgtatcaacaatactgtatcctgcttttaaaattcatcattataagagtttctattctttataatgatcattttaaacatatgtgatacttttctggtggatgaaccatgttttccttacctattcctgtattctgggggcattcagattgtttctagcattttattatttatagacaatgagaccacaataatttttctttaaaaaagaaatcagttccctcagataaattcccagaaattcggatcctagatcaaaaagattgaagatcttttttttttttaattgacttttggaaattatgaccaaatcccttaaaagcaacttcgctgggtattgtttttttaaccagcaaactggcagtggggggctgggcattgtgtggagggtcgcagatgtggaaagccacctcctaaagccagtgagcaggggtcaggtcatcctgaggacgtggacaagtgcctcccattttcctgctgctgtggtaggggttcagcttgctcagcgcctatcctgtctccctcccagacacctgggaaaactggttgctgcatgggtggagcatttacagttcagttgcttcaccctcactcgcttgttccatgatagagaccccagagaggaggtgtggctttgtcatttatctttcagccccattaaggttggctctgaagattaatgtctttttttttccccctctttcccagaatttgttcctgttgaagagtggctcctcttctaatttccagactccttgaggttttaggagtctggtaggtgaaattttctacctctaaggagaaacagtacctgctccttcctcaagcgcaagccctccattgctatggataccgaatccacttattctggatattcttactattcaagtcattcgaaaaaatctcacagacaagggtatgtaagttgttcattattacacttttccttttggggaaacctacaggttggtggggttctctacactcacttttcagtgactcagcgctggacatttggtcggttggtgcatga

SEQ ID NO: 2328 - DNA, 2300 bp, Homo sapien
ttggggtaggatgtgaggtaattggcattgttagatgcgtctctgggtaaacaaccaaattttctgcttatttggctgtttccctagctgccttgttaaaacaaaacacctgagttgaccagaacacctctgtttttagaatctaactttgcagttgtattagtctcttcttgcattgccataaagaaatacctgacaccttcataaagaaatgaggtttaactggctcacggtcctgcaggctttacaggaagcatggtactgacatctacttggcttctagagaggcctcaggaagcttacagtcatggcagaaagtgaagcagtagcaggcacatcacatggtgaaagcgggagcaagagagacagttgggagaggaggcgccacacacttttaaacaaccagatctcccaagaactcactcactatcgtgaagatagcaccaagccatgaggggtctgtccccatgatccagacacctctcaccaggccccacctccagcactggggattacaattgagcatgagatttgggtagggacaactatctgaactgtatcagcaatagagtgtgattataagttatgctgtaggaatagaattgttgtcactgaaagattcccttggccatgggagcctcctggctctatgaaggaatcagccaatgcttatcccagggaggtaatgataaggtcgaagtttgacaagaaatctacgttttcttaagctaagtagtaggttaacagaagatatgttgtgtgttaatagttctatttacatctctttctccaaggttatacacactctgcatcactaagtcaagacaccattctttgacactggctaatagtaatagcaatcatagccactgtgcattagcacttactccacatccttgtactgagcactacttacattatgtggtgttgtcattgtcaccatttcatacataaagaaaccaaggttttcagagattgaataacttgtgcaagatcacacatctggtagggcagatccaagatctgtttgtctccaaaatctgcttctgtcctgcctgggagaccttgggaatgacggcaagtggttgtaggaaggagggctgatgtcaaggtggctgtgggggcaggaggctgagggaactcactgacccttgagggactccttaggtgggggattctgggtttcctgttggcagctggagggggagtgccagttcccataagtggttattgcccaggttgtgaccttggcttggccagtgattggttcattttggaatttcatgagtgacccccaggcagggttcttacaatcacgctggaagaccacccaggaagttcctgtggggtaaaatgatgcagcagcctgctttcctcaggaggtctgaaaccctccccatgtacacacacacacacacacaaacacacacacatccacccacacaccctccacccctcttggtgtctttggccttttttcctagcttgtttgtttctatgggtgtcttcaagttcaactagaacctatgggaatgacttagttttgaacctgtaagaatgagaagtaaacaattctttgtactgactttgaatttcctttcttctgttgtccaaaggtgaagggtgacaatgtgtcccagatttttttggatattctacaaaaaaatagatatttttttgtagaaaaaagcttattctacagtgttgtcccaattttaaaagccctagaaaactggttaaggcaaattataaccaaatcaaatcactaattattacaataaagtgtaactagctacaaaaatcctaaaattacaattttaggctttgagaaaatatcactgatgatagaggaagagtgacagtctttgttttgggtcttgggatggcagaaagaaaatatttagtagggagtaaagatcagtgtaccccttgaagtgtggtgaagatgggtgggttttgatgctctgtgtgtgtgtgtgtgtgtgtgtgtgtgtgtgtgtatgtagaatttccctaaattcaaaatgatacttacattttgataaacccagagagttaattaacatggcataaatgtgctagctcattgttgtttttcagggaaagaactagagagagacacaagtcaccccggaataaagacggcagagggtcagaaaagtctgtcaccattcaacctcccactggagagcccctgttgggaaatgattctactcggacagaggaagttcaggtaaggatcaaaggtggtctgtaagcacactgccacttggccaagactcctgtctgtaaatgttttc

SEQ ID NO: 2329 - DNA, 2300 bp, Homo sapien
cctagtatgtgctaggcacgttggaaattcaaattaaagaaacaaaacatacttcctgcccttcaagagagtgaagtgtagtgtggggagcagacatgcaagtcagcaatcactttgaaagtaaagggtcacacgagagtcagtgattacaggagcctgaaggaggacatgttaatctgcctgagaggttcaagagaagagccttaagaagatttgaagggcagggaagaatgagctgaatgacagtgtttagctggaggaacagcacatgtatcagaactccatcgagccaggtgccactggagcagagaactcaggagagggaagggggcatcaggcctgggcatcccctggactggccatgtgcacacttagcccaacatggaataaccattgcttgcttaccatgtcgggcattgctgtgagtgctttttgagagctaacactttcatccttacggcagccctgtgacttaggtagtgtcattgcgtccactaatagagagtgtaaatgacttgtgcagaatcactgccagtaaatggtagcgcatgcgttcttattcatgcaagtatatgcagcttgtatttcctgactgctcctttgggcccgacacagccctggccctgagaaacttttggttcaggaggaggaagacatggagaaacacatcaagtaggaccataccctaagaatggagtgatgcagccatgacggcttccagccagacactgacaccagccaccccattttccctcccctctgtgggtaccactattcttgcgcttggtggatagtaggtaaaggggagtgaggaagtccaagaagtcttccctccccagtaatgactcagttgtgagggtctgatgggaattgagtgtgatgagctgggctctggtctaagctggtttatttggaaaaagttctttatagatgtgagagtggatagccgcctggcagtactgcccttaaaacaggctgtttcttccctaatggcctttctcctctgcttccaggccttcctagaacggtacctcagtgcgggccccaccctgcaatatgacaaggaccgctggctctctacacagtggaggcttgtcagtgatgaggctgtgactaatggattacgggatggaattgtgttcgtccttaagtgcttggacttcagcctcgtagtcaatgtgaagaaaattccattcatcatactctctgaagagttcatagaccccaaatctcacaaatttgtccttcgcttacagtctgagacatccgtttaaaagttctatatttgtggctttattaaaaaaaaaagaaaaatatatagagagatatatatctatgccagaggggtgtcttttttaaaaattcttcttcattgctgactgaaactggcagatgattgaccagtatcctttgaccatctgcactttatttggaaggaagcaggggctgtccaccctgaaaaagagtgactgatgacatctgacttttgtcgatgggacttctcaagaagccattccttggagcttctgttacagctgtaaaccaaagtggagctggtgcttcttgggagcctcgccttacaactaattcctgcctttcgtccagtaccaagtcccccgttgcttctggtcagcccacttgtagacttccaggggacacatctttattctgtttcaggaaaccagtcacgacacgtccacatatgtatttgtgtatgttaatgtccagtatcacatcacccatgaaagtcgtgggcagttcaggagatacctgccttcatctttgttctttgttgccttaggttcttcagagaaagatcacaacaaaaaatgtacactgtcgtttacagctattaagtgatttgattttgtttttttcccaaagagaaaacctacctgccctgtttctgatcccacccctctgctggcttgaagcaggtaaccctttcccagccctgcagctgcccacctggcctccatgccatcctgcccccacctggctggcagccctggctctccatgtgtgccctccggctctgtgtgaagcctcaagtcagtcccagcattgtttccatagggaagtgtggggtgcccagcaggtaaagcacagggagagagggcagtgggaatgccacctttaggctgcagcaggagccccacactgcccagttttcctccccactgttctacaccaaccaggggagactaacactgtgactctgggattggcaggtgcaacttggagccacttaatttcctggggacgtaagttcttcccaagcttagagcaagctgccctgc

SEQ ID NO: 2330 - DNA, 2300 bp, Homo sapien
caccggccataaagaccccttctaggcctgacacagtgactcacatctgtaatcctgcactttggaaagctgaggcaggatcacttgagcccaggagttcaaaaccaacctgggcaacaatgtgagacccctgtctgcacaaaataaaacaataaaatttaaaagactagctgggcatagtggcacacacctgtagttttagctacttgtgaggctgacacaggaggatcactggagcctgggaggtcgaggctgctgtgagctatgatcccaccacgcactccagcctgggcaacagacaaaaaaaaaaaaaggaactatttctccactagaggtcgctgtgcttcccaggtaataaggcctaagggggctcagcctgaatcttcagtgtgagctagcaacagtgactacaccaactcaaaaactcaaagtagagttgctaagaatagtatgcgttttgcctggaatgcattagagataaagaagtgtagaaaaaaacttttaccaagagtccaaaagagccaaacaaaagctagcattcctggagagaggagaggtttgctaaacagaggccatagggaggagctcaagtttgctgagactccagacaaaagaagaaaaactgtgcaaagaaagcacagttaattgaattcccaagtagctggtgagttacttgtattcaacgtataaatttcaagccacaaattcagctatgcaagaaatgtaactttattatttagaactgaacctaaatttcaattttgagtgtataccactgagtggtggaagctggggctgataattaaggtcctccaccccaaccccactatcccaagggatccagggtctctctggttcccaggcatatctgagtggggtgcacatctggtatgggtcatcgttacctgttcaagttcctcagaatgacaagacaactccatggggccttctgacaggcttttctgccctagtgctcctatactagggggttctctaagggattctgggatcttttcatttgcctgagtttaattctgaaacaaatcatgggtcttctatactctgggattccctgaaacaatggagattctgtacgtggacacacatgcacacatggcttgtgtttctgcacatgcacgcgtgcacacacacacgcacacacacatacacacacgcacgcacacacatacacacacgcacgcacacacacacaggcacagtttattattctcagggaccttccagaatctaaactattttttctgtttctagctgggggctggggagtggtgctgagggttgagagtatgctatctcttactaaacgttctcctaaaatttttgtttatggcaaaaattgtatgctcctagtccttcaaggtttaggcttttaaagctaacaagtttgtgttcttgaagcttataaagctcctctctgcttttcttaggaatcatcccacccctggggcaatgactgctgctgactgaacagagggagggcccagtatacaaggaaatagggagggagggagggagggaagccccatttactatctcagagctgtgaaaccaactgtaaatcagaagctcgtttggtttgaaggttttagcaattcctggttgtagaaaactaagggtccaggcttagacattcttggtccttagagcaaatgttattggggactctaggggacagcaaagcatctgtttcaagagatcgcacaggatcagtaaggacaggcaggaatttctctgttccgtgactgactttctgacccaaggctgggcagttttcacaaatgaagtttggcttccagtgaaaaaccagccagttctctgtgaacttttaatcctttgttcaaattttttattgtttcctttgtataatctgctctgtgcctggagctctcatctgactcattctatagaataatcctataattgagggtgagcaccaaatgtcctaagaagtcctcgtggaaaaatcacactctgctctccacattagaagctgtgtatgtgcaggggttactcaactctcttgaatcctgtttcagatggctacgaattcctggagatcctgaaacaggttgcccgggacaatactgacaaccccgatctgagcatcctgtggatcgacccggacgactttcctctggtgagtggctccagccagcgccccaccctcagttgctgtcacaacctcatgattgcgttcagcatctgaggaggtgaaataggcaggggcacttgaagaaacccagtggcggtcctcacccagtgtgggaggtcttggccct

SEQ ID NO: 2331 - DNA, 2300 bp, Homo sapien
agaggaaaaacaaaaataggaaaatgaaaggcagacagaaaataagcctggtacgttaaatgtaaactatgaaaacctaccttttgctgagagtggggcatgaatgtagacctcatatctaccatggatgcttgggggaaacctgatcaccacagcatatgtcagtggctgcatgtcctcagggctgggctgcctggcccaaatcgagtccatgatctaggggcaggaactttccacagctcgggctttttgtagtaaaccagagttgaaggctaaactaaagtttaaaaaattatttcttttcccttatagttttgtcaattataagtcagaaggaaattaaaagactctgactttaaatagcttccaatttttcagtaacagttaaaaaaaacctacttacatattaagaaaagtggagcaaattctaaataaaggtaacccagtgagatcgagacaactgggaacagtctggggaggctgacctcaaaaagacaagacacacattgtttcactcggaaatctttttccccttaaatttcctaaagaaagcagagatcttgcatgcttgccactgacttggaaagctaagtgcaccttagaatggatattcttggctccatcttttgaaaacttagagactacaccattagaaagaacggaataccgtcaagggttttagtgatgggttcttcaaggccccaactttctgcacatgagagtgtagcatcaagacaaccccttatcagcctgactctcagtgtaaggccgtctgactgcaggggagccttgctttactcagagaggccacggatcttctctttgccttctagcccctgcagaagctgtgcatgacagagtactctgtctttccaaagctgatttataactgaaggagaacaaaaacttggtcagaatcatgaatgccctagatgcctttgaagagtggagagacatgactggactagggttggactggaagagatggtcaagaaggtacttaagaaaaggggtgtctgcaagggaatcacccagagtcagaggcaaaacagccaggagcagcagctttgaggcagggttggattcttgctccggcagttagaaatgctgcaaactcagacaagttgctgttagctcagcggtaggatgagccctgatcccttttgccccaattgcctactggattcaaggagaaaatggacaagaaagggttcacaaaccattcatattagaaacagacaaatatccattatataaccaatgttccaccagctccaatgagaagtaagtataatagctactatttttgagcacctattttgtgccatgctttttcatctatgtgtttgaaactttatggttattatcagccccactttacatagaggggaactgagaatcagagagggcaagtgaccctccaaagttcattagctgttaaaaggcagagtagggatttgaactgtgaaccttgtttcattttagtttaatgaggacaggttcttctggtgtcagctgggttcagcagggtgtccctgcacccctcgcccagtggctggcagaggatttttaagaagagaggagggaaggcagaaaaagacaggagtagaacatgaagaagtctacctcggggctccattttgttccatgttgcagtgaggaacagaggatgaacaaccaccgtgaggggacaggctgagttaccaccctggggtgatttaacaattcagtaatgtatgagtgtcattccgtatgtttgaactctccatttgcttattggcaccatagtcccttatctctctccctctcgagtttctttctcttctttgacctttctagcctccttatttcatgcgtgtacattcttgtctttttccttctgcctcttccctcttcaccagtcggacagactgtatcagcgaatccctctacagtgtcgtatctaacttttttattcattgcatgatttatttttagcctgaaacaactgcatcctaaaaatggagttcctaatgagacagaggctgagcagagctatgtaaggtatctggggcttggcctcccagcctccctagcttggctgtttttctactctcatgcgtgcgtgcgtgcgtgcgtgtgtgtgtgtgtgtgcctctgctctttgtcctgagcccacgattccagagctggctggacccaaggaggtgaagagtcacttttcagccccaggaagggcaaagaagagagaaaatcagcctgtctgctctctccttggctcaacaaggcctctaacagtcttctgtcctctattctgcaca

SEQ ID NO: 2332 - DNA, 2300 bp, Homo sapien
atttatgtcttctatttgtaagcaatacatttcgcatttttatactagccacaggtttttgcagatgtcattcttcttatctcaaggttggtccagggctcaattttttttcttgtttgcggatgccctgtcttgaatctgtgtactgattggatgtttgagtattacaatagtaatacacaccttgttcttaataagtgccatgaggattgagagtcatcacatcagggatcttcttctcactgccattaaatagctatgtgttttagtgtaggtcactccttgggcctcagtttcccaactctaatttgaagaggctgggttagagagttattaagttttcttttagaggcaaagaatccacaattcaagtaatattttatataaacactatacttcttttcctcattgtagaatgatctatgtcaccatcatatgtagggcatctatttatgggactgatccacgtccaaatttgagcatcaaatatttcactacataaatatgtttatgttaagattttgttgtgcttaccagttcctttctaaggaattgagtccattaagatatttcatgctcagctaacatgtccattatttttagacagtgtgcttaaaataaaagagaggactttatttgatacctttatttatatgcaaaacagcgcaccattcatgagatatgaaaaactcgtcagatagaaaccagattatatctattttcactacaaaatattgcattatataaagcaacagagacacaaaaaaaccctgaaaaagactaaaatctttggatagcagatgtggtttttttcccttgtctctaaaatacactccttgttttaagagtttcacagcagagaacatgaaacattttcaggttatagacttttctttttggtgtcacagaggaaagtagttctgaattctttttttcttttttttttaggaaaataacttaatttgctaaattcatcacacgcacaaacatcacacacacaaagaagctactctccttataaacagcttgtaaaggacttctcagacataactacagataagaataatacactttttaaaaaactataatagtgaagtgctagtgttgctgatctcacaacaaaagaacctttcaagaacaaacatcttaatatataaaatatgtttagaaacagggagaagtgggaaatttgttatacaagtgcaatataattagagcagaaagaaagaccacagtataatctcaacaaacacgtaaaaagttagacataattattccacaggaaaaagtgtaaacacttgactataaataaattggcacagagtatccaaagtaaaagtatcaccactctgaaaaataaatgtcttgaaaaaaatactctactccttctaacataaataaaaataggttgtctttttctaactgcacctatgggtccacatgtttaaggtcacaaatagatgtttttggatatataaaggggcacttcgcctgcaaaagtaatcagatattaaagtttccatttaaatatggattttcctgtctaccttggtgtcatatcttggggataaaatatcaccaagctcagatcctcccacagtgtgtctacttgttctcaatttgtctttttaaacttactaaatattcagggtttatttggattctaatataatctttattttcacaacagaaaggaaagtttccagtcgcacctttctgtgccttccatctctatgggagagatccctcctctctcctccttcccagtgtttggtgatttgtccattagaaaaattccagatagcctaaagttatgagcctgcatactctgaacttctgccctcattctttcaacacattaagatttgtggcggatgaatgtaggagaactcaaagtctccagtgggttaaaaccacaacccttggggagccccagaagtggctcatctcgggtgtctccacgaggttctcctggcctggaaaatcccccctgcgagcccccgggctcgccagacaaccccacctgcctgcgtcggaaaccttccctcgtcgccctgctgaccagagagaacaggtagcgagcttcttccccggccgtctctcgaggcggccgtctcgctgggccaccgcagcctccgccacccgagcgacggcgcccgtccggatccgtagcgtttcgcggacgccgggacaggcggccccccgcggcgcaccccgccctacacgtccaggacgtggttgagataggagatgtagcagatggccaggcgcaggatctcgatcttggagagcttcttgtc

SEQ ID NO: 2333 - DNA, 2300 bp, Homo sapien
caagaaccaagaatcacggtacacaatatgtagtctctaagggagacatgaaaggagtgcttatggagcacagaaggaggggccatctgtgccagggaggtcttagaaaaggcaaaggggtgggggagggggaggctttgatggaagaaagaatgtgtgtgtgtgaatgtgaatccatgtctgtgtctatgacagtgtggctaggcatcactaagtatggatctgagtgtgtacctgtttatacaggcttacttctgtaagcattaatttttgtgtatgctggctgctggtatagaatgagtaagcctgaacataaaagggaatttgtctggtatcacacacaccatagcagaattggacctgccctgataggcacaccctgtcatgactccccaacaccaggggaaccagagatgctggtcctttcccactgtagcagctgcccactctagagctatggtgattagacccaccagtttttttcaatccatcagtatggatgtgtggtggtctaatagagccagccagcttgtatgatgaagggggaggaggtacaggtgtctgtgggtgtgcatctgtgtgcacacttctggttgtgtgtgaatgcttagcattggctgttcctaactagagtgagaaaacctcccttctcccttcattgtcaccaccttggggtgtttatccactcacccatttccattgccacctgtatgggaccggcttccatcttcactttaacgttctggggatatctaaaatatacctctgtgctggggttaggcagaagcaaggctggggagtgttggtgcccttatttgttggaggcactccctcctttccccgacccctgccccattgtggtccaggaatctctcaaaggagcaaaaatgtgggcaaaggcaaatagtacttgtggaagccatgaaaaacccggagggtcactcccaggggtgggctgctcaatgtgcctcccctggtgataaaatctgcttttagggcaaaattaaggaagacaagtgaggactcctctctccacaaatgttcccctaggaactggcggggtgggagtaaggctgtaatgctcttttatttctttaagcttgtatgatcaaaacaagctaaaataatcacaaataatatgttattgatattaactatgagtatcttcataaagtggcaaaataattgaactagattttattttttattataaggtatacaaattcagggccatgggatcatgtaaggcaaaggcattatgtactgggacacactggtaatttgtgtttacatcttggcacaagcactgccacgcagtacaatatattagcatgttaagatgggcaagaatgaagtgcaataatcaacacatgtagcatgtcatatttcagcttgaatgaatgagtgggtggagagaaaaacaaacatacagaaaagtagaattatctcatgtcgtggtccgtgaatatgtggattctctttctagttccaccaatggcttaatctattgaaaggttcttaccatctattgataagttagtctcatagcagatcatttctcaaaaatgttaatatgcttaatcaaaccttactgaagtatcttttaaaatgtaaatgatctctaataaatgttggctgttgcatgtctaaatactttattgcagcatcttatatagtatatatttccatgttctggacacaaatatttttctaaatattaagggaaagtggtggctttgtaatatgccaggggaattctttgatagtcaatatattgtttatttgtacttaaatatttcatcaataatctggaaaagagaaatagcctgactacggctagatactgtttagaggctaagatttctatcatgaactgcttttcaattgttatattttatggcacagattcagtgggaatctgatctgctaaaatatttgggctgtgaaaactcccacactgtgacagatgtcaagtccaattaagtgactcatgtccaggtttctgtccaataggatttcccattaaatatcaatttaggggaaaaaaattccatcccccttcctaagcctttatctcttccaccatctccaggctgaatcaattggtaccaggagagcccagaagccacacacgcatctctgcctctttgctctggctctcccaccctcttcccgtctttctctgcttccttgtcactgttactccaggagacgttcacttttcaccaacctttctccaagcatctccaagccactgactatatatattttgctacaaggtaaagagaagaggggctggg

SEQ ID NO: 2334 - DNA, 2300 bp, Homo sapien
ctttgtgactgtttcaatattacccccatgaaagcttttttttatgtacctttgagtacattataattgtcttatattttaaagtcattagttgggctttactgttcttgctattgtatgacatatacatctgcctggatatatttttactcttgaccaaagttttataagaacaatataagatttagggtaggggcatggggaggaaggatattttattaagaactacttaaaagaactacttgctgggcacggtggctcacacctgtaatcccagcactttggaaggctgaggcaggcggatcacaaggttaggagatcgaggccatcctggctaacacagtgaaaccctgtctctcctaaaaatacaaaaaaattaactgggtgtggtggcgggcgcccgtagtcccagctacttgggaggctgaggcgggagaatgggtgtgaacccaggaggcggagcttgcagtgagccgagatcatgtcactgcactccagcctgggtgacagggcgagactgtctcaaaaaaaaaaaaaaaaaaaaaaaaagaactacatatatcaaaatatattttattaagagctacttatctgtaagcttgaactcacaagtatagttttagctatctagactctaacagcttttgctttaaaactattaaagcatttgtggtttttttgttttgtttttgtttttttcttttttgagaccagagtcttgctctgttgcccaggctggatctcggctgcaacctccacctcccgggttcaagtgattctcctgcctcaacctcccaagtagctgggattacaggcacccgcaaccacacttggctaatttttgtatttttagtagagacggggtttcaccatgttggtcaggctggtctcgaactcctgacctcgtgatctgcccgcctcagcctcccaaagtgctgggattacaggcatgagccaccgcacctcgccgggtaatgattcttgagacaagaggtggttaagtagcattattatgtaatgtttatataccatggagtttttacaagaagataaatctatttcctctgagggccactattaacaatgtacttccttaaatttagttaagtgatcgtaatacgtgctgcatttgcacattgcattaagttatgatgagctgaattgttacaaattatagcaaaaagaagtgtaaacttggctaaaatccttccattctttgtatttttttaaagatttttattccttaaatgcaaaatgactacctaatttttttatgtaaattcattaaattcaaagagaaaaaaagattagtcattgaacagtaacaacaacgaaaacaaattagagatactctgaaatcttagagttcacatatgacaaaaatttgatggaaatttcctaaaactgtgatcccaagcatttatgtgatagtacaaataatgagttatgaagctcacagaaacttttccaaattcttaatgaaaaacaaatttgatcaaccatgctactggaaagactaatctatctttatatgtaccctcttgatagaaaatactacaaaaatctttgttatatgaagtcgtgacccaagaatatatagagccaaaaaatgaaggcataattatataggggtgtcagggcaattaagtaccatgtatatatatatatttttaattttgtgattcttgtggcagttaaatatttttaaaatgtgtaattgatagcaatttcttttctcactttaaatcaacactcaaacctaattttgtataaatattcttgtcatctttttcttttaaaaagcctctaaaattatgtaagcttcagaccccaaaaggagtaacttatcaagaggaaaagatcctagattcacttctgcttctacttattctacttctggatttattaaaccattactcagattttaaaacacaccacacacaaagaaaagtttctaaaataaatgagctaacatggatttttttcatattctccatcttcttgatagcccagagatcctgatactctttggactttggtagtggaatggtagatgtgtgttgagaatggaagggagttaaggatggggttctagaattcagatgccctcttagggtttgaaatgtgggggaaaaaaaaagagaatcactgcttatcttagtctgttcgggtagctgtaacaaaataccatacctgagtgacttacaagtaatagaaatgttatttctcacatttctggagtctgggaagcccaagatcaaggtgctagcagatttggtgtctggtaagggctaacttcc

SEQ ID NO: 2335 - DNA, 2300 bp, Homo sapien
gactataggcctgtgccaccacgtccggctaatttttgtatttttagtagagacggagtttcaccatgtttgccaggctggacttgaactcctaacctcaggtgatccaccagctttggcctcccaaagtgctgggattacaggcgtgagccactgagcccagccacacataattattcttcaaaaagaaatattaaaagcaaagaagctaaacttcaagtcatgtggctagtaaaagaattacaaagtaacaaaagtaaaaaaaaaaaaaggaaagaattcatataatcaatgaaataaaaaaattcacaaaactttttaaaaaataataaagtagacaaacctctggcaagactgataagattggaacaataaagatgaacactattcagaatgaaaaatgggacataaacagttagacccttatttttaaaaatcccaagaaaacaatatgaactagtttattccaaaaacaatttctaaactagataaaatagaaacatttctagaaaaaaagtggttcaagaagaaatgcaaagacatacgaatatatctagttatacacacctatttatctttacccattatctataaatctgtaataaagaggctccccctgcaaaacaagctaagtctagatggttgcaggagagttttaccaaacactcacactcatgttatgaaagcactataaaatcttactgccaaatctagacataagcatcaggaagaaaagaaaattataggcctagttcgctagtcacagatgtaaagtccctagacaaaacactagcaaattaaatttggcaataaatagcaatatcgtgagcaagtattaataggatttattccagtaaagttcaatatcaaaaaaactattaccataatgtacccgattatcagattcaagaagaaaaacaataggatcatgtcaataaatgcaaaaagcacttattaaacttcagcatttattaataatgaggattcgtaggaaacagccaaagaaggaaactttttaaactattaatagtacttatacagaaaacgtttccttaagtaagagagagaaaaaaatcttaagagtttatagagtttacagtttccaacccactgataaattcaattacagtgagcattcatttaattgctaaaaaaagaaagcagctgaccagtaaagcctagctaccaatacgctgcaacagacatcacaattaacggaaaattttggaagcataagaaggatactggcaggtcaaggacactagctggtcgccatttctattcaatgttaaactagaagtcatggtctagacaatggaatactatgcagctgttaaaaagacaacacataataaacaaaaaggcaaatgaggttaggaggtggaggcatgaggggactaacgcaggtgtccagcgtcccttggccctgccacgctttttttttttaatttccacctgacaaactgccgtttatcctttaaataccttggcagccatcacatcctgccccttcgtcttttgcacttcctttgtacctcgtgcatacttctataagcaaatgtatccgacggttttacaagaatttgcttgcctaccagtgtacttaacccatggctagcacagaataggactggaaagaaatgctgcacagacagcacttttctctgaaggctctagggctccccaagcccccgcattaaactggtttgggcaaaacgacaggcattgctgagagccgccaggccgcccgccagctgcgggtcccctgtaggcagagccctgggtcacacgcggacgcggtcccgatgtttcttctcaggccctcagcccggcccacttcctctttcctcactttaaggcgcagacagcggtccctctcaaaacaaaacgtacaccaaaacaccattttttttttaaacaggaagtccagaggcccgggtccagggcatccagccccggatctcgaacgccctcctcgcccctcgccccgcgtagcccggctgcgctccccgctccccgcccggcgtccacctctcgagcctgacagccccgccgcccgcgcaggcgccccgccccggcccggcccgccccggccccgccgccagcgcttccatccccgccccggcgggtccaagccggtgccgggcgcccaggggttgccgcgctgggcgggagggcagcgcctgagagggcggtggggtggcggggttcctgcgcgcggcccgccatggaggtggaggaggcgttccaggcggtgggggagatgggcatctaccagatgtacttgtgcttcctgctgg

SEQ ID NO: 2336 - DNA, 2300 bp, Homo sapien
tcagaagtaaagcatacattagtaaggggacattattctcatctgtttttcccaattcctgagccttttggtgggtggttttgcatagagatgtccagaagctgtcttgtcaagacctttatcaatccagtcttacaagactaggagggaaggagagaagttagatgtactttgagccatgatgactggttgtggaagcatcagaagggagtgatctgaaaagtggagagagcaactgaagattctttattgcaagttctcgaggaggaggagcccttcacacacctgtcagcactgattctagcgaaggggaccaggaagaggaaggatgagtggtctcttggttctctgaggttattctgtgacatgggttcacttttattcttataaccaaatatcatctttaacacatcactagacaagacttgagatagtggtgttttaaccagagaatggttgctttctctttaagttcctaagtttccctaaagtagaagatactaaaggagtttcttttgtcataaatatacgtgatataaaatttaccattttattcacatttaagtgtgtagtttcagatgcattgcatacattcaaattgctgtgttaccattgccactattcatctccaggacgctttcaacattccaaactgaaactctgttccattatgcaataattccctgttcccccctccttctggcgcctggtaaccacccattctattttctgcctctatgaagttgactattccaggtacctcatataaatagaatcatgctatatttgtgtttctgtgtctggcttatttcatacagtataatgtcttcagagtttaggttgtagcatgaatcagaatttttttcctttttattttattttattttattttttatttttgagacggagtctcgctctgtctcccaggctggagtgcagtggcgcgatctcagctcagtgcaagctccgcctcccgggttcacaccattctcctgcctcagcctcccaagtagctgggactacaggcgtccaccaccacgcccggctaattttttgtatttttcagtagatacagggtttcaccatgttagccaggatggtcttgatctcctaaccttgtgatctgcccccctcagcctcttcctttttatttttttaattttattgacataattatatttatgggctacatggtgatgttttaatacatacaatgtatagtgatcaaataagggtaattagcatttctgtcatctcaaatatttatcatttgtattgggaacatttgatatcctccttctagctatttgaagctgtatattattgttagctatagtcatcctacagtgatatggatactagaacttattcttcctatctagctgtaattttgtatcctttaacaaatctctggctattctctcattccttcttaaagctgagtaatattccactgtatgtgcatacaacattttgtttattccttcatccatcgatagacacaggttgtttccacctttagctattgcaaatacaggtgctatgaacatgggtgtacaaatatcttttcgtgtccctgcttttagttcttttgggtatatgcctggaaatggaattgccagatcatatggtaattctgtgtttaatctttttgagggaaatactcaagagattttaaacccataagccaattggacaaaaagttcatgtatttattgcttcatatatgtcatatagtgtattaggcatcagagaatggaaataaatgggacaaggctcctctcaagaaacacagagccttaggatgtgggacatagtcaatagatgcataagtaattagctattatacattgtgttcaattctgtaataagatatgtatagagtactgtgggagtgcatcataataatagtgatttctagtgtttctgaagataaaatctgattggacgttgtctgagatagacaaattctactgaattctggttaatagtggatcatgcagtatagaaattctggtgtacaagtttttgttgcacatttggttttttaatagctaactgaatcctacatgtctctcttttgttttatcttcctctagtggtttttaattgccaacagatcctacaaagtcagtgcagcaagctcttttttcttcagtggtgtatttgttggagttatctcttttggtcagctttcagatcgcttcggaaggaaaaaagtctatctcacaggtaatctattagagtattcataaactggatgagagggcttatttctctaagattcttagggaaataat

SEQ ID NO: 2337 - DNA, 2300 bp, Homo sapien
atgtttattgagggccagttgtgcgttaggtactgaggcttctctggagatacagaacagactggcccctgcctcgggttgttcactactgtggacttcagcacatcacagacgattatctctgcctggtattctgcattgtcagattcagtctgagtcatcttgggattacaggaaatcttttaaaaagtcagagtttgttcctggctaatatggtgaaatcccgtctctactgaaaatacaaaaaaattggcaaggcgtggtggcgggcgcctgtagtcctagctactggcgaggctgaggcaggagaatggcatgaacctgggaggcggagcttgcagtgagccgagattgcgccactgcactccagcctgggcgacagagcgagactccgtctcaaaaaaaaaaaaaaagtcagagtttgtaatcctgcaaactttaacaaatttgtatatttaaggttgattttgatcaagctaaccttcctccttcttggaattaaaatctcagacactaagtaaatcagtaacaaacacttctgctggtaaaccagggctagcattatctccccgggacttctcagattggcagcgtagggttttgcatgccttgttaacctgacttgtaataagttcttagtcttcacaatggaaactgagccaaagcaggtttacatttccgtacttgcatttggtgtgagtcatgagaaaggagaatatttattttctgaggaaggaagagaacctgagctaactttgaatttcctcagtggcctagcatacaagtgccttaggcttactgtaattcaatccttttgcgaatcctatatccaattacccagatatctacatctaaaaaaagcttgtcttcatcaaactgtcagacaggagctgtcagagagtctatttgtgggactgccctgtatttcagagcatttgcccataaggagctaaatcatggagtagggaattgggttgtgcccccacaacacacctattccctggatatgacatcctggtaaaatcggactgtgtagcttccctgagcacatgattatttcttcgtttcctgattgctcagttggccctgttggttgctttccctgctcacagccggcaattgtcgctggatcgtagggcaagagaatattccagttataacattttgatcagctgcggtactggagcaatcaagatagggcagccacaggtgcaaaaataatgaaagtttgtgcatctgatgacaggtgtctggggtaaccctcgaacattaggaaagaccccaccggaggaaagggactcacaagttaatgattacagtgaaagcagaagtaacaacaaaaatgagcacatgagagaaacagtgggactttcgtaatgttgaaaatgaggtggagagagaattctaaattgcaagttcagagaaagaggctcttgctgtctgtgaaaaacaaatagtttggcactactatgataagaaaagcccagggaataagattctgaaaaatttgggagcacttgatatcaaaagaaggagatttagaattacatatagaaacaaatggaaaatcaaggctgttttgaggggtgctatcagagggtcattggagaggatgtagctttacaatatttatatcaggctgtgcattggcaggagttctgtagaagttggactgaaagctggaggtaatgacgtgggtggggcacagagcagctagggagctctgatgcggcttttgcttggggcagagtatgggaagatatgcaaacgctgaggccccaaatagtgcagtggcctttgtgggcagcacttacaggtgggcttggaaacacttgcctttggaacattgtttaaaagtaagtagtgctcccagaagggctgtaatttctttagattatctgatagcagactccgtgatgtttaccagcttcaaggagatcagaccattgtgaaattttttttttttttctgtagtaaaactagccccagccagcccaactgggaatttactgcctgagctgttttccaacataagttttgctggcaaaaccagacgtgagtgttccctcgactctaaagggacctgtttacactgactttatttttactgccagctttcaagttggaagagggaaattacgtttaaaggtcagcaggtgagcagaaggattcctgaccagccattcctgtgggtgtgtgcccgtgtgcactctgtgtacgtgtgtgtgcctgtgtatatgtgtgtgcctgtgtgtacgtgtgtgcctgtgtatatgtgtgtgcctgtgtgtacgtgtgtg

SEQ ID NO: 2338 - DNA, 2300 bp, Homo sapien
atcagggttattttgttgagtgaatgaatgagaattttacttatgaggggagaaaaaggagatcagctggcaggagaaatctacgttgttccgacccgtgctttatatatttagttgttgccgcggcacttttcccattcagaccagggcccaaggagtaattaatctttgtttttatttttatttatttatttttttgagatggatcctcactctgtcaccaggctggagtgcagtggcgccatctcagctcactgcaacctccgattctgtggttcaagcgaatctcccgcctcagtctcccgagtagctgggattacaggcatgtgccactacgcccagctagtttttttttgtatttttagtggagacggggtttcaccaggttggccaggatggtcttgatctcctgacctcatgatccgcccgcttcggcctcccaaagtgctgggattacaggcgtgagccacagtgcctggcccaggagtaattaatcttaaacaagctatctttagcaagcaaaagcatcttacaaagtacagtaactgaggctatcaagcatgtaaagaaagcattttctagaagcttagagatggatccccgaacactctgtaaccctctgttaacagtctaaggaattctgttctgaatttgggggctcttctccaggcagtcagggttttgaattctatttacaattcctctgctctctatggcctagaatgattgaaccaagtctctagatcactgtaggagacatcaacctttaacaatacattcttgaggagaagagactcgtgtaagaaactatcttgtaagaagggatgagaattaccctaatgatgtaactgacaacacagtttctagtttttcctttctttccttccttctccattttttccagtttcatatccttgtttgttcatgctacatgaatacttgaagttgatagagttggctttaacttaggaacctttgcttagaaagtcaatatcctggcctttcccagagtacttgacttcctgcaaaccttgttaataatactttgttttttaaaatgttggagaacttcagccattgcagcctcttgctaagaagcaaaagctataatgacagagaagccccaaagtgcagtggaaccagggatctccggggagagtggtggtttcctgggcccccccagagaacccaaggctgtgctggagatgctgccgtgacaggtggaggcgtggagaggcacctggcaagtcctcaaacgcctcccccttgatttagctcctctagctaaggatacgcattcctttgggtttcaggtttttcttccctaaaaagagaatccccaaactggacaagcaggttacattcacacaatagcgtgaatgaattcgctggtcgcccttcagattctcattttggaatctcgaagaaagagaggtggtgggaggagggcgcttgaaacttctggcgatgccagttcagatcgattccagctatgacggagcgggaagtggataaagaggaccccaagtcacaggaggcactctgagagcaccaagcgcccggggaggccatccgcaggtgggcgcggggcctggattccacagaggggcggagtccctcagtcaggcgctggctgcaatcacacccgagcgccagccccctccagcatccctgagtcccagaggagatcgccgaagcgctggaaaagccgttccgcccacgacttctggtgccgggtcggcggcgactgggggagcccagttccgagaccgtaccgcacccactgcggacctcctgggccctacatagtaggcgggtcatgcagggcagcgggaggaggggcgtgggagggccaaggccgccgagtccccgctgttcagccagcaggagcgccccgcagccctcccgggacacggtggacacgcttgtcccagacctgggcgccctcctgccgggagccaggactggccgcagcaggcgctgtccgggcccgtgggcggggtttcgggagggggcggagccaggcccacggccggtgtcaggttgctccggtaacggtgacgtttcgcggcgtgggcggggccagcacgcaggttgcatattttaggaagtgaggaggaggcgcgggctggagctgcggcggggtctggggcgcagagcagcggcgggaggaggcggacacgtggcaacagcggtagcagcccgggcggcggcagcaacagcggcggcggcatcggcccgagccgccggccgccctcccaccctcccgccccgcggcagccctagctccctccacttgg

SEQ ID NO: 2339 - DNA, 2300 bp, Homo sapien
ctgagggaccatgtttttgaaggattccatgatctttgaacttttagcttcttgatagtaggagaagcaaccagttatgattacaacggctgatagcaccacacccaggtacagctggaagggaaaagacaagttagggcccgtggctctacacaataattagggacattcaattaattttttgactgaataaaaaacagatttttaatagagaaaccaagatttcagaaatatagaactcatgttttcttatttatccttctaaagaccacacaggaagggtcagaaatggagtcaggcacaccaacacttgatcactaactggacgtttggaaaggttctagatgcatcagtttctcctgctttataaaacaaagattgtttttcaaccaacttgtggattttgaagaatggccaccaagcatttctggacaggtggatgtgccaacatgaatcgctgtgctctgccatccagtgggtggcggccggggcctgagcagagctgcctgctcacagcagcacatgcaggtgggcatcccacttgtaagagcatctacaacgtgggtggtagagagaggaaatggaaacgaaggaagaatggatgagccttgaaggcaacagctgttcataaccattaagtaatgagttcataaccattaagtaatgagtggtaattgagaagaagtgggagacaaagacggagaagatatctgatgtgtactacaaatccatatgctgaattacagaactcacattatcgttttgaggttcctcttctgtagcagcttggatgctataagccaagaaacaaagaatcgctccaatccacagtaacattgagaaccccccaaagagctgccgacaaaacttgatccattcaggagtagtgggagggggagtgagggcgttgggaccatctcgcgccaggatctcagctgcacgagcagatgttaatccctgagaagcagtggaatataaataaggcaaactgtaccagcacttacaaggcaatatacctacctggtagctggacggttgcaataaggatttaaggaagaaacaaaatgtcccaagctagagagccaaggtaaaacctagcaaattcctccatgaataattctgctgatgagccagtccccacagggttcaggcaaacaataggcccaaggaactcataacacccagattaaaactctttaaattgatccatcaataaatttgaattcagcctggtttcttctaagttttagatcaagggattaatgccaaattgcatttctgccaaaaaggtatctattttcacaaatccattcagttttgcaaattaagagctttgggttttctgtgtattgattttgtcgggaggggaaaaaaaacccctctacaaacatcaaaggagaaaaaaacttcctgtagaaatcctttgggttaacagccaagttttaaatatacagcttgattctttgcttgtctggcagggaagggctcacctccatgtgcattttagccacctcccaataaacctgttgactgaaaagtactcactggaaaaaaccactctactaaagcctgctatttttctaatgggccttaaacccaagattcactgacagcaggcaattacatataagctctcattaagagaggaaaatatgatcacttttatactctcaaaataacaagtcaaaaaaaaaataaaatatttttgtctaaagtatctatttatctgtgttttgtgctcatgttaccaaacatttgagtgctatctacatgccaggaactgaattcagtgctttaattaacttgtttaattctcatgacaatccttttttaggcattattaacctcattttataagtaaagaaatagacccgcagcatttgagtaatgggcataggtcggagagagcacacttcattaagactctaataaaaacttaagtgagatgtgaagtggctagagactgcctggcacaaagtaagcacagagtcactgttggcatgttgttctgagctgactcgaggcctcctcttggagcttaaagtgcttgtgtcaagaaaaacgctctcaaccttgttcttctctcctttttttttttttttttttttttttttttttgagatggagtttcactcttgttgtccaggctggagtgcaatggcacaaccttggctcactgcaacctccacctcccaggtttaagcagttctcctgcctcagcctcccgagtagctgggattacaggcatgcaccaccatgccaggctaattttgtatttttagtagagacggggtttctcc

SEQ ID NO: 2340 - DNA, 2300 bp, Homo sapien
tgtcttacattatcttgattcttgtatttactatactagatgataaaccccctgggcagaatgcatctgatctgtacttatcctcaaaagtagctagcatgatgtcccacattggtgctcagtaatatgtttcagttaaatgaacaagagagcagaggtatggccttgatgtttccagagaaggcagctgaggcagataattccatgatttgccaaatccaaataacttaatgtcatcatcagtgggcaagtctagaaccctaatatcctggtgctcaaaattagtgttatcaattcagtcttctccacattaaacaatttccaattcctttgaggcctggtgtgatggattctgtctttcaaatgctttttttctttcagtgactctatcgttcataaatgttaaataaaaccctcactctgttataaaaatatagactttaaaaattttccaaagtaaacactccagagaaaggtaggcgggctgaataggctgctgttgtccttcttactgcccagcgtcactgaaattttcaaaggctcctgtcctcctcgcaggtttctgccacctctttctgccagatgaacagtttcctgaagggttccagtttgacactgacgatgtgaatttccctatcgataatctgtgctttgttgggctcatctccatgattgaccctccacgggcggccgttcctgatgccgtgggcaaatgtcgaagtgctggaattaaggtagtgcccaggcgcctccttggcttcatctcttagtgccttgggacaccctactcagtgaatgttgccttttgaggtccagatggccagctgttctatctcacctggagtattaatttctcatctccaaagctttacttccacccagaaaagaccagatagtattaaaatatgatggtgtaaacacacgaggaattaaaaattttttggaaagcaattgtgtaaaaaagaaatgtaagcaaagtaaaaacagcaaaagacttgaagttttaaaatacttgcattattctaagttaatgtaccttatgcaatgaatggcatatcttctgtgttttcagttaactgtttgttaatgagtgtttggtgtcctctgtgtatctgtctttttttaagtagctgaatattactcaagtgcactaatatcctgttgctgggtatttggtttctgttttttactctcaggattttattttatttattttttgagacagagtcttgctctattgcccaggctggaatgtcatagcacgatctcggctcactgcaacctccgcctcccaggttcaagcaattctcctgccccagcctcccaagtagctggaattacaggcacccgctaccacgcccagctaatttttgtatttttaagtaaagatagggtttcgccacgttggccaggctggtctcaaactcctgacctcaggtgatctgcccacctcagcctcccaaagtgctggggttacaagcgtgagccaccacacccggcctactctcaggattaatactgccctgaaaagctttgtagaagttatttcctcaccattccgactgcttctttttaaagtatattctaagtataatcactgcatcaaaaaataacaattttgaattcttgtcacatgttgcttttcctccaagttgtgccaatttgagaatgctagccagtagcatgtggtgtcttcacagtcccaccagcatcagatttttatcctttttttttttttttttttttgctggttttagtaattttcaagtatttttatgtaactctgtagaaggaaaaatagacattgtgtatgctagtgattgtataccaagataaaacctgagtattgcctttgtgtttcctttctgtggatatatatgtttatatttttggctaatcgatgtttattagttttatatttgcattcctttccttttgatagtctaagccgaatcatccttagtatttactcttgcctactggatataagactttaaggtcatttacttggcagttgcattcaacacattgtcttgtttattacaggtcatcatggtcacaggagaccatccaatcacagctaaagctattgccaaaggtgtgggcatcatctcagaaggcaatgagaccgtggaagacattgctgcccgcctcaacatcccagtcagccaggtgaaccccaggtaaggcaggaagctcaaatcacagtctgctgtgaacaagcaaatagtgatggtttaaaatcttcagcgtggttctataatggtttgcatctaggcttgctctgagtaggaaatgta

SEQ ID NO: 2341 - DNA, 2300 bp, Homo sapien
ctgggaatcacagacagaacaagtggtggcaacaccggcctgaagattctggacagtgagtagatttacacagagtaaacaagaagctggactgagtttggtttaatctgtcactccagaaacccacaagctgacagcagagtcaattccacagtatttatgtgccttggtggctgctgctcatggtggctatttcccatgatcacatctcattattctttattaccttgtcatctggaggaggaaggatatcatcatcaatattctgtgaattcctaaattatttcacttcttccaaatgaactctgtctcactagccttgtgaccctggtgtccctcagaactctacgcagggccgggagtctagtttagccttaagtgaaggcagaataagtggctcccccactcagggtcaccagaaaaatcctaacccgtgagaatcttcctaccctgttttctgatgtctgaagtcccagggcacaaaattttcaacttcaagctctgatcccaattaaatgtagacactctcagaaagggtcactatctcttaatgaaactgcattttagccgggcgcggtggctcacgcctgtaatcccagcactttgggaggccgaggcgggcggatcacaaggtcagagatccagaccatcctggctaacacggtgaaaccccgtctctactaaaaacacaaaaattagccgggcgtggtggcgggcgcctgtagtcccagctactcaggaggctgaggcaggagaatggcgtgaacctgggaggcggagcttgcagtgaacggagatcgcgccactgcactccagcctgggcgacagagcgagataccgtctcacaaaaaaaaaaaaaaaaaaaaaaaaagtgcactttagatgttttcctggtgggggggggggggagtgggatataagtagcagtgttccaagtaccaaaacctccctgagtcatctgtgaaaagccatttggcaataatactgaaagcttttaaatgctcacattctgacttagcagtttcactcctgtgaatataacctaaggaaactgatctcaatactgaaaggactttatacacaagaatgggctgggcagcaaagtgctgtaatcccagcactttgggaggccgaggccgggtcgagggagaagcacctgaggtcagaagttcgagaccagcctggccaacatgatgaaaccccgtctctactgaaagtacaaaaattaggtgggcgtggtggcagatgcccgtaatctcagctactcaggaggctgaggcaggagaatctcttgaacctggaaggcgaaggttgcagtgagctgagatcgcgccactgcactccagcctgggcgacaagagcgagacatcgtctcaaaaaacaaacaaacaaacaaacaaacaaccaaacaaaacaaaaaagaatgaataatttataatcgtgaagctttggaagccacttgaatgttgaacatttgcgagatgctcagagaagtgacagcgtatcaacccaattttttaaagtcctgccattaaaaattataggtaggaagcgtcagtactaacacggtgaaaatgttcatgttacaaagtggaaaacaaccctggattcagtttagtatgtgcgttttaccacagctatgtagaaacaaatccatacacatggaaatcgaatgaagtgaaacgcatgcaaatggtaatgatgctgtgcttggaggcagaattggaagcagtgttaaagttatttatcatcattcgtgtttttaaaatgccgtgtgatggccgcaatacttctgtaacgaatgatgtttaagcacggagcccttcactggccgacgcgcgggtgggagataggagccgcgcccaagctcaggtggcggctgcgggcagggccgcctggggccgcagccgggcgcgctcccggcggggaccctctgctctccttgcagacggaggccgcgccgggtttggaggcatcccacagcctcaggccgaggacccgccgcgaagcgccgcctccgcgggttgaccctctgcagccgccgtagcgcagagacgaatccgcgctcccccaggctgtcgcgcgagctccccggaagctcccacctgagcggcgcatcctcagggcctgggcctggcctccttgcctgtgagatggcactgtgacggtgcccacctcgtggggtgtgtgagggccgagtgaaatcgtgcatttgcggtaagaaagtgcttatcacggtgcccagtcctaatatgggctgccagcctaagtacagagtcccaatcccagcccaaaggcca

SEQ ID NO: 2342 - DNA, 2300 bp, Homo sapien
cagccctcaggacactttatctgataggttcatggtgccagtgcatgtctcatggtgcaatttgaacctgtcagtgaggtcatggaatgcattttgatgaagttgtgacttcatagcaacctgaaagacaaaaaagcagttaccagctaagaggggtgaaagagctttccaggccaaggacggggttagtgtaaagtcttagtagatggagacaagggatgctggaggaactagaaggctgggggagtgctgggcagagacgatggctggaggggccagcagacacagtgtctcacaagccttttaggccttatgaaggattttggtcattagtctcttaggagcaattggtagccctcatatggttttaagaggaggggatagacattcaataagtaatttttagaagaataaatgagtctgttaatcacttatctcccaaatcacttatcaaattaagtagttagtcacttatcaagagcttgaatgtacgggacacagcaaaggatgttttggtagaaaaaagggatgggaaaaatccggaaggtgaggtgctgtcttagagttgaggcccagacactgtgtcacagtggggtccctgggccctgcgggaagatctgagtactgcgcacttggcatgggtgtgtggttcaagacagatatgctgaggaagaaaggggaggatattccagtgtctttaacatcaaagacgctttgcttacttcatgacttgagatcagggttaaccattcttgaatatgttgcaggtggaaaaagaggaaaacctagtgattatttgaggcctttactgagccagtcacatctcctaaaccagttagaggagttcattatctgacatggtaaaatgcagatgtccaaactgaaatgcaattcaacccttataaagacattttctgatcctgacatttactgaccctgactttctatgtctgtaaattgggaataatgatacctatctcactgggttaaatgagaacatgtacatactgtgctcagcatagtgtctgggatctgtggcagcagctattttcatggcaattattctgtatgtatgacataactttaaaacttctctagggaccaacaaggcaatgcaatcaaacaccagcacagccaataaggggcaatacggagtggtggggactgtggcaaactggagaatccttacctgtccaaagagggcaacagctcctctttagtttcagctattagctactgagcaagaactcaaaacaagtgctttctgacttttccagaaatgctggaaatcctaatgcataattttgttatccaattcaaataaaaaactgcaaacaataacaaccaccagaattagcaacactatggaacacaaaaaacaggttctggagcaaagctaggctgaaagcagctaaaacaaagttttacaaagaccaagctgttctgggaagtcagatctgcctcacagaaaagactctaaaagcatgtgaaaggtcataataaaatcaggtgcaggccaagcgcagtggctcatgcctgtaatcccagcactttgggaggccgaggcgggcagattacccgaggttgggagttcgagaccagcctaaacaacatggagaaaccctgtctctagtgaaaatacaaaattagctgggcacggtggcacatgcctataatctcagctactcaggaggctgaggcaggagaatcggttgaacccaggaggcagaggttgtggtgagccgagatcgtaccattgcactccagcctgggcaacaagagcaaaactccgtctcacaaaaaaaaaaaaaaaaaagaaaaagaaaaagaaaaagaaaaaaaaatcaggtttgaaggaagcgttccaaatacattctgtgaaatggcagcattgttagaacatgcaggcaccaacctccctcgggaaggattttgaagaggacaatgctcattgggttttaggtactggggcaattactcaaatgtaataatcttgaacacacccagcttctgggagcctggaaggtgtttgccgagctgcttttagggacagtgataccagcaatatccactgggggtctctctcatacaaataatggcatagctgttcccagcagttagaggaaatggcagccctgggacctggggggatccaagggcagtccacgtctccatgggaagatggcagcagctctgtggctcttcacagtgaagtgacgacctgttgttaaatgtttaacagaagccaaacttggcttttaggggacagctctcctgccagccagccagcttgccaaagg

SEQ ID NO: 2343 - DNA, 2300 bp, Homo sapien
tacagtgacaagaagataaaactggaccttgcaatactagtcacagcatgaaaaatacatccacccctccttttgatagcaggttctcagtatgtaaagggaatctttttggctgcctgcttaacgcattgcaggtccagcattcctgagctgcttttgattcataaaattaaccaggcatttgagggcttctaaaagtgcttgatggacagcatttctctcaatgaaagagcaggcactgctccttggtcaaaggagagtccaaccaaggaagcctaatgagttattcctcacccaatacctggagaccatgacctgggggtgaggggcttccccagccccatgtgactgggctgttctttcctcagccctgctcttaaggggcttaacagctcttgctggcagtccaaatggctgcatagctgtcagtccaaaagtcccattatcatatcccgttcctgtatgaagggataagagtagaggcattggacatggcctcagctggactccaagttctgccctttactgtgtgccctgagtaatttaccttccccaggcatcagtttcctcatttgcaaaaacaacagcagcagtaagactaagttaatccaagcaatgcacttcacacagggcctgctcaatagatgtttgctgtcatatcacttcccagctcaaaaactttctgtggctccccagtgtctgaaggtctaaccccatcctgcctttctaagttggcctgagttcctaccagcccagggcagagaacacttgatttcctcatattttatgttacacactgcccctgccttgtgttcccagtatctacagatggtagggaatatctcgagatagcaggtttgtggtagagggcattggtcccagaagtttcactgatagagataccttttaagattttatggctaacttaagaaataattcatgtctctttgcaatatggttcaagtgtcttgagtgacttcgagtccccacctggggataatggaggtgaagcagcaagaaagcacattcccactcagtttcacaacctgcaccatgtatgtgttggtggttatttgggcagcagggagtcctgttcatggaaatggattcctgctcacataataactaagagttctgtgaactccctcagctgggcaggggcaactctggtgcttctgtctgcaagaaaggggacagacagggaggctgatgtgaggagctggttctgggaatagggtcatttgttctgggatatagggatgtgaggggagggccagctcaatccagactgatgaagagcggggagagtgatgagtgcctgcctcagcttgggctggatggatgtggggaggctgggcagtgagggagatgtggatctgacatctcagcctgagggaaagtcccggttgagatgggggaagacagaaaaagaggaatctgagaagggagaaaccaaaggctggaaatcccagctccggggataagggagtatggggacgggggaggcctgcctcaggtaaccctacgcctaacagttgtctaaaatgctccctttccttgtcatgtttgaggaaaagtggttcaaagaggccgtctgatgcgggatcacacagcgctgaagggatgaggggccccgggtgctcccgcccgtcctgctgcctcctccggtggctctctgggagccacagccccgtctagccacggaggggcctacagcacgccccaaacgctaaggggaagcgcgggaggtgcggtaggaaggcagagaaacctggtttttaaaaccaagccattttcaaggaaagaatttcttactttaaaaccttggtttttaaaaccaagccattttcaaggaaagaatttcttacttaaaaatagcgtatggaatggcggcggaatgacgggagggaccgagctgggggactggacggcgccccggggacacaggaaggaggcgcgcagagccgaggccagaggcgcgcccggggagtggaagcgcgaagacaaacgcggcgccgcggagggtgggggaggaagggccggggcgggccgccggctgccagcccagggcggggcggagccctacttctggccgaccgcgtaggcggtgcttgaacttagggctgcttgtggctgggcactcgcgcagaggccggcccgacgagccatggttgctgggagcgacgcggggcgggccctgggggtcctcagcgtggtctgcctgctgcactgctttggtgagtgaagcctgccccaggggccccgcgccggccggcgggtactgggcagcacccaggctg

SEQ ID NO: 2344 - DNA, 2300 bp, Homo sapien
tgagatgagaagagtctttggccgccgaaagaagaaagccagagttacagccaggctaacctggagcaacggaaaggtctgaggtctagggtaccccttgcacagctccagtggtgtttatgtggaaggagtgcttttctgtcattgatgttgggttataaatgactaactgggttgacctgagagataatatccagcagataacacggggactgtcccatatgggtgtgttcatccaggcagatggtggcagagtgaaatgtgcttccttcaatccatgcctcttaagactggtctcttgggagctagaagctgtgacagcagctacttcattggaggggaggccctggagttgatgatgtggttttccctgtcaggaagtttggctgctagaggaagtagttaggtcactggaaagaaggggtatttgcagcaggacactggcctatatcggggggaggggctggagagcctgaggagcgggaggggtaaagctgagctggggctggaaaagaagaatgtggatgctgcttatgcatgattcttatgttttcttggggaaacagaaacctcatctgcttgaagagtgcctaggacgggatgaatgggcaagatcttgaagatagtgggaaaggctagacatgccagtctagggaaggcaggcaaggtcagagctaatgaatctacatggaattcaaacgtctctgccatgggattttttccacctcggtgttctttttagaggaacagagctagaactgggcagtggtcacagctccagtctctaacccttaactccgttttcttccccctgacttctgccgtgggtgcctatgagatacgatagctgtctaatgagattaatagccactgtacactggtacacaggttgtgatgatgctgttagtggtaatgagcccctctttggtcaccccctcatgcctggttaagcacccaactcaacaaaaattagctggatatggtggctactccggaggctgaggtgggaggatggctggagcctgggaagtcgaggctgcagtgagccacgatcatgccactacactccagcctgggcaacagaacgagaccctgtcacagtaaataagtaaataaataaaaattaaaaaaacacctagatcttaggaggctgcttgggtttagtaatcatttcagaggctgtctggctttcagcagaagtaggtacttttcctactaaagtacctactaagtacttactcagtgggaaagtacctactaaggtttaaccaggcgtgagtacttagtaggtactttcccactaaagtaggtactttcctactaaagtaagtacttagtaggtacttcactgggaaagtacctacttccattgaaatctgactagagatttgatctgacaggtggtaaactagtgaacagacattagtttttattttttctatgtaattctgttagggtttgtcatacctacatcttatttctagtattcacatggcggggggtagagagggaattttaatatagtcatctttgagcatttgttaggattgggccagcacctaggccactctgtaattttttcccacagacctcagtggggtaagtcttacaatatctgctgaaaatgtttataatgctgttgcttaaatagagttctgggtgcatatatcaaggctagatatttgtaatctaccatttgagtgatattagtagcttctcactgacctgggggtctcatctaagacatctaaagcttcagactgagccccattggtcttaactggggtaacagtttgcttagaccgtctgggctgaagtagttttgaattctctctgtgatattcaggcgtttctctggaccttagataacctgggtctgagttggattttactctcaagctaagtgctgtggtcctccccgcagttagtattgtaaagaagaggaaggatagtgggaatgtgctaatgtggtttagttggctggggccctcattcacccaggatgtgtctcttttcttacttgttctctcagacaaagaattcactgttcggctggagacagagaagcggctgcacacggtgggcgagccggtggagttcagatgcatcctggaggctcagaatgttcccgaccgttactttgctgtctcctgggccttcaacagctcgctcatcgccaccatgggtcctaacgctgtgcctgtcctcaacagcgaatttgctcaccgggaagccaggggacagcttaaggtggccaaagagagcgacagtgtctttgtgctgaagatctaccacctccg

SEQ ID NO: 2345 - DNA, 2300 bp, Homo sapien
tggagatactctcgctctgttgcccaggctggactgcagtggtgtgatctcagctcgttgcaacctctgcctcccaggttcaagcgattctcatgcctcagcctcccaagtagctgggaccacaagtgtgcaccaccacggctggctaatttttgtattttttgtagagacagggtttcgccatgttggccaggctggtctcgaactcctgacatcaagtgatccccctgccttggcctcccaaggtgctgggattataggcatgagccactgtgcccgcccacacatttctatactccacttttcttcagaacacgttacattatattatatacttgtttcattgtctgtgtttcccaccagaatgtaagcttcatgagagcagagacttttcttaacacgtagtaggtgctcaataaataaatgaaggagtctagcaaatgggaactgagagctgccagagtcacgggtgtctctgggaaagaggtaataattaacacacaaggaaagattcctggttgggcacagtagctcatgcctgtaatctctgcactttgggaggctgaggcgggcagatcaccaggtcaggagttcaacaccaggctgcccaacatggtgaaacactgtctctactaaaagtacaaaaattatccgggtgtggtggtgcacgcctgtagtcccagtgactcaggaggctgaggcaggagaatcacttgaacccgggaggtggaggttgcagtgagacaagattacaccactgcattccagcctgggtcacagagtgagaacctgtctcttaaaataaaatgaaaaataaaacgtatatctgataaccatagtcccttactcaacaccttcagtggcttcccaatggtcccaaccccttaacacaccatacaatgccctctaggttctggcactcgatttcttctcagctcatttcttgtcacttctctcctacagtcaagtttgggcccagcagactgtcctggtcctctaactgggctcctttctgggcctgcagaggtgctgtttcttcagtctgcgattccttacctcccctctgtctcttcctctgctgctgccttctgttctttggcattcaaccgagttttcctttcctctgagaagcctgggacctaccccgaccaaagctccctcctccttgcccctcccccaataacacagggttggggtctctgcatttgcttcctcaacactgtacttttcttgtcatgtctattttatggtctgtgtccccactagactgcaagttgcatgagggcagggcggtctattctgctttggtcgcctcgtgacggtgtctacccagcaagttgtgtgtgttgggtaagtagtgagaaaacgaaaaagcacttgctttacagggcggttggtcataaaataataatagcttatatttactgaccacttgtgatgtatcaggcaccattctaaatgctttacaagtatgtcacagatttctcccataaccctcttaagtaagggttatttcctccacatagcagatggggaaattgaggcacagagaggttaagtaacttgccaagggccacagcgaggaagtggaggaaccggcgttagaacccaggctgtttccagagtccaaattctatccaagagtgaagtgcaatatggggttccacttcgtgaacagattcaagtctccaaagggctttgtttttgtttccaggaggaaggacgagcttctgtgccgccggcttcccaggttatgggtggccagctgggctttgggaagggcctgtacatctcgccggcggccccggagtctgggtgtgaagccctgattaacttgccgggctgctcggcccacacgccagccctgcccaggtcctccggtgccccgggccaccctcatgcccccgccaggcccggggccgggactcgcgtctccaggggcggggccgggggcggggccgggcctctcttcgaggccgccgccctggccccgcgctcgcctcgccgagtgcggcgggccgggctggagctggaggggcggggactcgggaggggccgcagcgcggctgctggtgccgttgcgggagaagaggaagcggcgcgtcccctgaggcgtgcgcctggatggactgaaggacggtccgacgcgcgcggagggagagggccaggggcgaggtcaggctcggcgggggcgcgggcggcgcccggagggggccccggggagggaggcggggaggcgtggagcggggagcggggagcggggagtggggagcgggcccgcgccggctgagctccgggtc

SEQ ID NO: 2346 - DNA, 2300 bp, Homo sapien
tccgtttccatattataaaatgggataaccatatttaccttgtgtgcatattgttaaggatctgagggcgcagtgtctgtgtaatcacttagcacagtgcctggcccattgtaaaaagtggtcttgcctactctgcgatgtgggatattgttgttcctgctgcctgagagactcttggctagctggtcctcctgggcgtctcctgcttttcattcaagactcagctcagacacaacctcttgtgaaaccaacttagctaccctcctgcctgtcctctttcaagccatgtccctgctgctcttcgccgctgctgtggcacctctgcatgcctctgttgtaatgtgtccatgctagattgtcattctctgttgataagtcttcctcccactggactctgagcttcttcggggttggcagcttgcctttctgatctctcctcctagtgcagtgcccgcacacataagttttcaatgaagtttgttgggtgtatgaatgaagtaaagaaaaaactaattcattaattcatgtttacctacagtatatctggtggataaaagccgtggctctattctacaggccagtggcagccaccaggactaagggacagtgtatgccatagtctctatcgttcaaatgcctttggctgtaagtaacaaaagatgcaactcacaatggcttaataataggaaaatttattatgctccataacaagaaatccagaggtatgcaagctccagagatggttaatttagttcttcagtaatgtcatagaagacccagtttcttccagctcgcaccctagctatcttcatcgggttgcacttttcctcacggtaactctcctcagagtgagaagtgaggcacagctgtactaagcagatctaatccagataatatgacagtgcctgcttctctttttacaaaggggaaaacctcttttagaacccccggccctacctagtagacttctgctcatggttttggtcagaactaagtcatgggtccttttgaaaaatcagttattagcacagggaaagagggaatactatgaacagcttagggcaaacacgtggtcatgaataggacatgttgccaagcagactgaagttatgttaggaagggagaagcgcagggatacagttatattggataagcagccacacagcttgctgctgtgtgcatttattcatttattcattcaacagatattatctatcatatacccagcattgtgctggaggttgtggacagtagtgaacatgagagacaagatccctcccctgccagaccttcccctcaccccctgccctttgagatggagagggtgtccaggcctccccccttcaccctctgaggtggggaggcgtccagggcctcgcatctcagcatgggactgataggcttgccctgacctctcgcaggcatgaacactgctgtctgggccgtggcacacatgggcatttgtgtgggcaccaaagtcttcctcatctgcgaggtaaggctgaggtgagctctgtgtatgtggggagcaggagcctcctggggtgcaggctggggtctggtctgtgtgggtcaccctgggagccttcagatgaccctggtggagctaaggttccagacgttcccgtagggaaagagacggtggccatgtaaacaaataaacaagatccttgtagagtgccgtaactatcataaggaaatcagcagagcagtggacagagtgtgaacagggcctgcactggaggcggacatggaaggtcctctgagaaggtaacatttgatgaagtagggagcaacaagtccagtgcagatcaagagagaggactccaagcagagccaacagcaagtgcaaaggccctgaggcaggaatgaggtggctgtgtggctgaagcaaagtctgtgcctaatgactaatcaaaagttgcttctggcacccagcctggctcctgccccaagctgaaaacagatcaccagcaacaactctagcttcccaagcctctcctgcctagacatgcagctccacccaggtcagaggtacagctgcagggaccacaaaacaatgggcttagctctgtgaagacaggaaaagccaccatggttttgacaaagaacccaggaatggcgttaaagacttctttgggcagtgtccaatttatggagcaattttgttggccacatctacggaggtataaaaaagacagacataaggcaaggatggaactactttgtttatgtgtgttgatatcccttccccatgctcctgtacgcctcatagctcctgcagcgtggtgggtgatccc

SEQ ID NO: 2347 - DNA, 2300 bp, Homo sapien
aattttaaaacatctgtgcaatcatttctgtgggatagatttctcaaattaaaatcactaggtgagaaaaagacataaattttaaagtttggtggaaatgataaattcctttccccagaaggtattgatttacattccctctgatgttgtatgagggttcatttctccacacactcatgttaataatgtaaattatcatcttttctaattttaccaatctgatggtgaaaaatggtattttatagctaagatatatacatatatttttggtcacattagactcctcttgtaggtttgatatttcttctgcgaaatatttcttctgcaagctgatcatttatatcatttgcccattttaaaaactactttgtattgattggtaagaattattggtaagaatattttgaatattaataattttatatatattgcaaatattttgtcacgccttttcattttgttccttatttcttcatctgcatgtaaatcttacttctttatatcatcagttgtgttcatcttttctttcttactttggattatatgttatatgtagccaggccttccatactcaaactataggaatatctttctatattgtccttttagcattattgttattattttatttatttagttatttattttgagacagagtctcactctgctccccaggctggagtgcagtggcacaatcctggctcactgcaacctccgcttcccagattcaagcaatttgcctgcctcagcctcctgagtagctgggattacaggcgcacatcaccacacctggctaatttttgtatttttagtagagatgggtttcaccatgttggccaggctggtcttgaactcctgacctcaggtgaggaggtccgcctcgacctcccagagtgctgggattatagctgtgatccaccacccccggcctccttttagcattattatagtatttttgcatttaaaactttaatccaactgtagttcattattgtggatgacgctcatacaaccatgaggtaaatatttggctttcttttacccagtaacagcaaacaactgctttgacttaatttcatttccttggcaactttctgacagataatatccatatttgtacttaaagttgaaaaagaaaacgagcaccacttttgcaatttttactcactgtgacctaaagaattataaccctgaaaatgtgctttggaagtctgtcatggttatttctctttttaggcatcttttcagggcacacccgtctctgcatcactgtctgtttccttgtgtcacaaatttctgttctttttttctctccctgttccctctcatttattttttctcctaatctctcctttttcttaaccacctataatgttaatcactttaaatgcttttgactcctttgttttggtagtttaattatatttcatagtctctatgcttctttgttttggaataagtttttatttatctaactgtgaatttcactagagttgtaaaatgtatgccgaacataggatttggggattgcaagcatttacagctgatattcaatttctttcttttcaccacaaaaacgattttagaacatgaaaaatatctttggagaaacaaaaaaatcaatttcctcatcattttatgggtctacatttttcaatataatcatatgggataaatgtttgcattctgctattggcttgtgaacatttacctatatttctatgtggtcttgttagggacagtatacctaagtggataaaaggctgtgtggttgaatttggcttcttgtttacaaaagagtgatccttagtgatctacttagcctctctgttccttttctctttcactgagatgagaaaacctatccttcccaatttttttgtgtgagaattaaaatgcagcaagaaaacacacactcataaacacatctgctttggcaaaggagcacatcagaagggctggcttgtgcgcgctcttgctctctgtgtatgtgtattatgttttatgttactgtaaaagatgtaaagagaggcacgtggttaagctctcggggtgtggactccaccagtctcacttcagttccttttgcatgaagagctcagaatcaaaagaggaaaccaacccctaagatgagctttccatgtaaatttgtagccagcttccttctgattttcaatgtttcttccaaaggtaagcataagagtcaaagaagtcccaacccagctttccctgaaagtgactctcagtaactcttttgctttttataggtgcagtctccaaagagattacgaatgccttgg

SEQ ID NO: 2348 - DNA, 2300 bp, Homo sapien
tgagctgaaatctgagcttctgaaggtgccaggcctcacatttctctgaagctccactaccttccaaggcctaacattaggcttgaattcaaggttgattgaatgaaattgggaaacttccctgcgagattctagggaagaattgggatggggaagagaaaggaattacagtgtgtatgaacagaaccaggaaaggcttggcggcagaaataaattttaaaaaaattattgtgtaaaatgtacatagcacaaaatttaccattttaaccttaaaaatttttttttagagacggtgtctcacaatgttgcccgagtggtctcaaacttctagcctcaaataaaaaaaaaaaagaaagaaaaaagaaaaagaagaaaaagtgccagcccagtggctcagacctgtaatcccagtctttggggaggccgaggcgggagaatcgcttgagcccaggagctcgagacccgcctggccaacatagggagactccagtgtctacaaaaaataaaaacaattagcgagagtgtggtggcacacatctgtggttccagctacttgagaggtggaggtgggaggattgcttgagcctgggaggtcaaggcagcagtgatccctgatcgcaccactgcactccggcctgggtgacagatcctcattttgagaccctgtctcaaaaatgaaagaaagaaagaagacaaaacaaataaaaactcctggcctcaagcaacaccatccctgccccccgcctccccctgcccccccaacctcagccttctgagtagctagcattacaagtaccagttaccaggcctggcaattttaaacatttctaagtgtaccattcagtggcattaagtacaataacgttgcaccaccaggaatgaatttttaagtctctttccaaagatacctggctaatcacacatttgatagtggggaaataagaaacatttgttggttgaaagacggatgcatgagagtaaaagcagtgttcttccccagtgtgggcagtttccgcataagcatctgcgatccgttttgcatgtgaatgaaagcccagtgacgggcagtgggcaccagtgctgctccttgcgtgtttgaatcatgcttgctaagtttcaagcaaggaatgctccatttctcccaaccaagtcgggccttttgtattcaaatcaaaagcacaaaactctattgtagggggaaaaatgagtctttattggcaatcagtggtgtccacttagagcaataaatattaagtcttaagagtacattctatatgaagtactatagctattaatacacttgggttttgtttgttttttaaatgggtgtctttgtggggtgctgttctaatcagtgccacaggcgccgaggagagggagggagctgggtaaggaaggagacaggcccaccctagccaccggggagtgggcagagtcaggagagcggggttctgattttgccccttccctgtgaatccttgggcacctcaccgaaacacttaaggcctctgtatggtagaggttggaatccgtggcctttaaaagtcctttcagctccttcgctcctatctgcataatttttggcataggccaagcggctggttggtggggtgtttagctcaggacgagaggccgaacgagcggggagttggctgaggatagactagacacgcgtgggtgactccagcgtgatggaacgcggggtgtcccgggatagggctaaagcgatgggatttccagacgagtctttcccaggccaacttttaaaggtcggaggaaagtttctcgtggggtgggggcccagaggggatggcagggtgggctccgacgcctcctcgcctttaagcgggtggccccggctcttcctccgttacctggagcggggaggggcttgggaaagtttgtgtttgttgctggcaaagcgccggatgggaggcgcgggcgggcgctgcggttcttcccttctgctttcgggaagcggtcggggctgcacactcggatcggcggggccggctcccgggcccggccggctggaggagggagggaaggaggcgggagggagcgagcggagccaggggcgcacgtacgccccagcgctgggatttatcggctcgcgaggagagcggagcaggcgcgcggcccaggcggaggagcgccgactctggagcagccggagctggaagaggaggaggaggagaggcggcggggaaggaggaggagggggagagtcgctcccgccgggcgagcatggggcgcctggcctcgaggccgctgctgctggcgctcctgtcgttgggtga

SEQ ID NO: 2349 - DNA, 2300 bp, Homo sapien
gttaaaattgacttagaatctggctacttttcacactctgccatttatggcgccacccttgcctggattacatccctggcctcccagatcgtctccttgctctgccctagcacacagcagctggaacaatcctgttaaatataagtcaggtcctgaaactccttcactctaaactttcaaagcctccccatctcactcagagcaaaacccagagtcctctaagtggtcttagatgttctgtaccaactggtcacattaccttctggcctcacctagcaccctccccagcacccactccatccagccactctgcccttccaggctcctcaaatacaccaagtgtgctccggccttgtagctttctgcctgctgttccatcagtctagaatgctcttcccaagatagataggacttgctccctcacctccttcaggtcctttttatttattttatttttaattttaattttatttttttagaatcacagtcttgctctctcacccaggctctctcacccaggctggagtgcagtggcaccatcataactcgttgtcgcctcaaactcctggactcaagcctctcaagtagctgggactataggcacatgctctgtgcctggctaattatttaattttatttttagaggcacggggttttgctatgttgtccaggttgatcccaaactcctggcctcatgcaatcctctcgcctcagcctctctaatcagtgagattacaggaatgagccactacacccagctcaggttctttttaaaatgttgcctcctcagtgaggatgtccctgatcactctatttacggttgtggcacacacaccttccttccaaatacaaatccacgctttttctcttccttggctgcttattatctcttaaacatttatcaccatataaccataccatatattttatttgtttatttcatttgtcttccttcactggcatataaagggagggatttttgtatttatttgttcaccgttatgtttccagtacctgcagtatggaaggctgtcaataaatatatgtttaaattgatgaatgaatgaccgaactcacaggaaaatcaagaaagaatgtggtggctcagtagaagctcagcagtcagtggttctggagagagttcttaatatacatgttctgctaatcggtttggtggaacaagtgttccaaaaaatctaacgtaaaaatctcatcttgtaactggatggattataggattaatcatcttattaaaggataaaaagaatgtatctaattcatttattcatccactcaacaaatatttaagcaccttccaagtgcctgacgttgtgctactataatagatgaattctaatgtgtacatgcataggcattgttgttttgacagagacacaaggagtaatccacttaaacctaaagttagcgtagccatagacacctctcaaaatgtttaaacagcatttctgaaattaaagtgtaaagcaagtggaaattattagatctgcaaatacatacgctacagtcattttagcaatacatctgttctgtaatgtcactatcatatgattaaacagggagaattcatttctcccttgctgcattcctccctgcaggctagcttagctaggggcacttcccctgcacttagcagacccctggggaggagaggcaaatggtatggccaggagcctggcttggaggtcatggtgttgtgttcagccatgtctttcccacctttataggagtgtcctctgccttgcatcttttggagcaccaatagcgggttcccagattcttcctggtgaaacttcttaaggacttaaaaatccttaaaaccagttctcaccataatttcctctctcctgacacccactgattcatttcagactattactttcaatggggtggttttagcctgcttatagatacacatgattttctttctgagtttccagattttcgtaggtgcttttgtgtggcaatttgcaaatacatttctgtttcttggttattttgcttttagttgcatttttattttaactgatcttgttggaaatcacatccttctggtcattcattccagattccgtgcttgtggtgaaggcgaggcagccaaagcctttctttgctgccggaaatacatttgagatgacttgcaaagtatcttccaagaatattaagtcgccacgctactctgttctcatcatggctgagaagcctgtcggcgacctctccagtcccaatgaaacgaagtacatcatctctctggaccaggattctgtggtgaagctggagaa

SEQ ID NO: 2350 - DNA, 2300 bp, Homo sapien
tggattgagggagtgttctcaggagaacactgagggagggagggacttgagatagagctggagaagaaggcaagtcgaggtgtgaattcagagcaagtccacctccccacggggagttctggagcatgagtgtactgcagagtaggcccaccggagggaaggggactgggcttttctgtcccttcactagtcagtcattgtccacaggctgagtggcaaagaagcgagagcagttcataacctccaggtggcggcttccatcagcctaagcccggcctctggaggggggagggtacaggtgtgtgaattttaacagccagtacctgcagtggccagaggcccagcccaccagctggggtggactggccaccagctgcatttgctgcagctggtaatgcccttccccttagcaggtctgtgtgtaggagcatgtgtgttgagctgtggagataatgttgttcatggtgaccaacttttattgagtacttactgtgttccaggtgctgttctaagcattttaataaatgtggtaaatttaaccctgggttttgtcattttcattttgcagatgaggaaactaagtctcagtgaacttggggaactcgcccaggtcacatggttcattagtgctggtgctgggatgctagcccaggcagcctggccctggagcctggctcccacaccataaggcacagcggggatcagggcttagagtctgggaacccggtttggctttttgccttcagcaaccacccagcacctgcaggtgacagcagcactgagttaagagttttcactgaagacgagagtgatgcgggtgtccactctgcccttggcactgtgagagcatgaggctgtttatggcactccctctgcccccagggagctagtttccttggagagacactgggaacaaaaaaaaaaaaaaaaaaaaaaaattatgctcaagtgccacagtgggtcaatgggagaaaaagagaagatattacatgtttagagtgagctaaggaagaattatcatttggataatttcatagaaattcttgcttttagttctgcttacttttttaatatgtaagcatctgaaaataatttatttgccttatgtgctttttgaggctattagtgtatttttactaaatgaacaaatgttatctcttgttcggcaaaaaattgtgttatttgacatttatataaaacgctttctcaagtggatttaagacaacagtgtcatggctgttgtcttttgttgctggatgaatctcagagccgacacagctgataatggttggtaccagtcaagggaagaggtcaagggcttatgatgtgtgctctgttttcacattccatgagaattaccacttgtgccaaagtcttctttctcttatgcccatattaatttatttgaggctgttagaatcttaattttgcagagtactttacgattcagcattactctctgggactgttaaactgtgttccattttctcagcttgacattttttttcctcttgttttgaacttaagcacttctgcaaggaaagaaaaaccatagtgtacaataaaatctaaactgtttacaactctaaatttggtgcaattcattttatgtacattttgttccatatgactttagtgtccttccagtcttgggttcttctgcctaaactgtcaaaggagctggctttctttgggagagagagcctgcagtgtcctggcataccagctttcggatcagtgttctctgtgggagacagtttttggccctgactcttcttcctgtggccccttagtctgggtggcagcagtgcagtggttaagaggctgggctctggagctgtactccctgggttaagctgcacactctgctacctgctgactacatgaccttgagcaggtatatagtctggcaataatggcagaataaaagtatgatagtgccttcatcatagggctgttgtgaggatccagtgagaccgaaggcatgtagtgttgtgcttgccatacgtagtaagggcctcatacatggatgtggccatacatatgacttctgcccattgcactgaccccagggttttggcttggtaatccgtagatgacatggcctttgatgtgtcctggtttgcggtgcactcttttggcctggacaaggctcctgtgctcctgtcttccctggatcggaagggcatcgtgaccacctcccggagggactggaagagcgacctcagcctggagcgcgtgagtgtgctggaattcttgctgcaagtgcatggctccgaggaccaggactttggcaacta

SEQ ID NO: 2351 - DNA, 2300 bp, Homo sapien
ctgtgtgttactattcatgccacacggtttttccccaactgtaccttggccccctgcctctctagatgactcattgactcacctggcccagcccaatccatcttgaccttccctcctgcctaccaattttccccaccccctataggtgccccactgattgttgacacattgcattgtgattatctgatttaagtggaagcttcctgagaactctagcactagcgtagtattagtctaggttcagggccaactgttgcatttagatactcctctgccatccttgatacctgggttcacatcggtgtaactgcccattagcgtaactgcccaacaggtttctccttgcctgctgcccagatagaacagacttatcaagacaggagaattgcaatagagaaagagtttaattcacacagaaccagctaaatgggaaaccagagttttattactcaaatcagtctccccggaaattcagagactggagttagtaaggataatttggcaggccagggagtggggagtgctgattggtcaggtaggagatgaaatcacaggggatcaaagggggttcttgcagtcttccgttcctaagtgggatcaaagaactggtggaaccagatcaccagcctggatggtgtcagctggtgcatcaggatgcagggtctgaaaaataccttgagcaccaatttaggttttacaatagtgatgttatccctaggaacagttggggaggttggaattgtgtggcctctggctgcatgactcctaaaccataatttctaatgttgtggctaatttgttagtcttactagggaagtctgctccccaggcaagaagggggtttgtttccagaaagggctgttatcctctttgtttcaaaattaaactaagctaaattcctcccaaagttagtttggcctacaaccaggaattaacaagggcagcttggaagttagaagcaagatggagatggtgaggtcagatccctttcactgtcataactttctcactgttacaatttttgcaaaggcagtttcacagggcagatgaagatttacttaaatgtctcatgatggtgatgatggtagctaatattcattgagcagttactatgtaccagatattgttctaagtgctttaaataaattagcttgaaactatcattctcagcaaactatctcaagaacaaaaaaccaaacactgcatgttctcactcataggtgggaattgaacagtgagaacacttggacacaggaaggggaacatcacacaccggggcctgtcatagggtcgggggaagggggagggaaagcattaggagatatacctaatgtaaatgacgagttaatgggtgcagcacaccaacatggcacatgtatacatatgtaacaaatttgcacgttgtgcacatgtaccctagaacttaaagtataataataataaaaaaaagtaaaatacaaaaaaaaagaaataaaaaaataattaaaaaattagctcatttggcattcacagtaatcttacagggtacctactattagtatcctcattttagcaatgagggttaggaaaagttaattaagttttctaagattgcacagttactaaaactagaatctgcatgcaaacccaggcagcctgactctagagcctgtaaccttcagcaccacctcatgtcgccccaagttcatgtttttcaggggccttctcccatttctcagtcatttcctctctcaagagaggaggagaaggaagggccaagaagacaacattgctggtgccttttttatttattcagtttacctaaattctctcatcattaccaaatgacacatactgtgagccaggttgagacccatcttttcttagttttatcgatatctgtttacttaaccacaaagataacttttttactcccaaatttgagtgattagtaaagagctacataatgtaaccagttttgcttttcacaagacatctctatttctcagtgggctgaaaaccacacttttgcttcctctttactttgcagtgagagcacagcatttgtcactcaacctctgaatgttagtgacactattgggacgaaaaaggactgtgctggcccaaatggcaggcatctcatatgtggcatctttctttctccttctgagtaagtttcataatcctttatgtttctcttgtcacaggagttcatcaactcagggtgctgagtgatggaacaggacaatttggtctctacaggaacaactatgccatatatttctgatgttagcaataatttttgacttactaatgacagt

SEQ ID NO: 2352 - DNA, 2300 bp, Homo sapien
ttttaaaaatgtttccagttatgaccatctttcgtccaatctcaaacttatttttttcaatcttgtaaatatgatgaggtggaataagttgtccagggacttaacattttgatctagtatatttttaatttatggaagaaatattcctcctgtctgtgatttggctgtgcacacttttgtgaggttggactggagataccgacttgggtacttgcagaggaggagcttcttccttaacgggatatttaagaggccccgattttgccttgtttcgaaaattattcaagaaataattaattaccatgcccctctttctgcaaatcctgtattcatggtatactacctccaatacagcatctattaaacatgtacaaatacatcatttgcaagaataacaatcttggaataatgaaaatgcttctacctatttgttgttcctgtcttatctctaagttcatctaagtttcggaagggtagttatgtataaaggaacttcactttggaaattccatttttctctagtcctagagagttactgctaactccattcattttgacatttaaatactattttatattgttatttaagtgttcaacatgtactagttcagtctcctcaaaatactgagtaagttccttgtgcttagaatagttgtttcaaactttgtgtgtgtgaatgaatgaattttacatttctcaagcacctagtccacaacgggcacaaaaaagctatttagtaagtactgtttaattaataaatgatacctcaggtttgtctcccttcctccggatccccataacatgtacatttatcacatcgcccagatttcctagacattacagattttctgttctacggcccccataagaacagtgcaggtgccacaccatatgtctgggacatatggtcctcaatagctgcaatatgaaactatttctattgcaataaatctaatatctattcctctctgtttactaatagttttgattacaacttcaaattttaaaaatcgaggatgaagttaaatagaagggaactgtcccctttcttctatttaacctcgtcttcgatttttaaaattacaaaagcataatagtaaaaaaaagtttgacaatacaaaatgataaagtaaaattcgccttcaccaaaagtcatctatttccccttctgtggtttccacgttgcggctggtaactcggggcttccacgctgggcgagcctagagaacatccagtacacacaggaagcagcagcgcgggccaaatggcgctgagacctgcgcacctgtccacggaccgcccactcgccaactctgaccttgggtgagtctctcaaacttgagtctcggaatcttccacaaaatgctacccatctcaccaggtcgagtgaggagggtcgtgttatgtgtaagcactttgtgaaatctaaagcacgaggcaaacgtaaagcattgtagggggtcctagagaagtctttgtgcctgcctatcagagccgtttcagttccccgcagcagcttccaaggacctcccaccatgcccgccgcttcggctcctgcactgcaaatctcgcggctcggcctgcagcggcggcttcccctggcctcccaccccagcgactgagcgcggagcccagcgcgcacgagcgccagcctggctcagagacacccacgaagccagggcctttcagcgcctgctaactggcgctacccctagggccgcctctcggttttaaacgtaaacaagagttgcccttccgtcttccaagacctgcaaatcgaagcttcttttcctccagaagccccgccaccttctaagcttctccccagcctcagccacgccccagcctgcaaaagccgggtcctttacgccccctggctccgtatttgatttcggcgcgcgccatacctgagggcagctgtgattggttggaggtgagcgaagttcctatatgattggctgatagcggctaggacgggtgaaggccaagggcggagaattatgggagggattaagactgcaagagctgagtgatggttggttcctgaacaaagagggcggagtaaaaggcggaagcagaattgggggcggggctttgtggaacttgggggacccagcgaaatggaagaagttaggtgtccagagcacggtaaggggctagggtctcagcgtcccggggcctgttgatttagcgtggcgtaatcgttgttcactttcttctctcttcagggactttctgctttcttaagaccggcgtccgcgatggcccgaataaaggaaagagcttctacgtgtgccggg

SEQ ID NO: 2353 - DNA, 2300 bp, Homo sapien
gtaaatcatctaactcatgaaacagaaacatgggaagttagtatacatgttgaaagggcacttttctaatactgatatccattatgtactctacatctgacacggagaaaaataacttttctctaccaagttttgctgaatagagagcaggagatgtttaatgatgtgatgatagttttaaaattcacatagaaaatgtagacacttggtactgtgaaaacattaacacttgacaaactattaactttcctcactttagagaagatgcttaacatttctgactctctcctcccacctcagcctcacgagtagctgggactacaggcgtgtgataccatgcctagacaattttttttaatttttcgtagagacgggatttcaccatgttgcccaggctggtttcgaacccctgggctcaagcgattcgctcgccttcgcctcccaaagtgctgggattacaggcgtcacacaccgcgccaggccctccgttgtttcttccagcgctaatttctttgaattatcaatttcaccatttagatgcagagaatcctacttaaaaataagaaggctaacaactaatcactagagtgttttaagctcaaacatttaaaaaaaaccgtcgggcctaaaactagtgcaaaacagggacaaattattttccactatgtctgctgtgtgtccttactcctttaaagggggagggactgtctgggcaggagaagggagtggttaaggcctgtcaagtgaatagaaacccagagctggaaaacaccggatcctcaattttacaggtaggggaaccatcggcccagagaggggggtaaccagcctcgggtcacacagccagaattagctgggcgtcttccgaacacgccacgctgccctgggatcaccaattgcttaaagggtcctgacaccgcaaactagggccccaccactcctcggccctgtgacgcccgacagcggggagcgggaagctcctctcgggaggccccgggcagccacagggagtggggcccagctccagacctactcggtggcccgcacgaagctgcacgtgtctgcccggcacacgtagaagctctttcctttattcgggccatcgcggacgccggtcttaagaaagcagaaagtccctgaagagagaagaaagtgaacaacgattacgccacgctaaatcaacaggccccgggacgctgagaccctagccccttaccgtgctctggacacctaacttcttccatttcgctgggtcccccaagttccacaaagccccgcccccaattctgcttccgccttttactccgccctctttgttcaggaaccaaccatcactcagctcttgcagtcttaatccctcccataattctccgcccttggccttcacccgtcctagccgctatcagccaatcatataggaacttcgctcacctccaaccaatcacagctgccctcaggtatggcgcgcgccgaaatcaaatacggagccagggggcgtaaaggacccggcttttgcaggctggggcgtggctgaggctggggagaagcttagaaggtggcggggcttctggaggaaaagaagcttcgatttgcaggtcttggaagacggaagggcaactcttgtttacgtttaaaaccgagaggcggccctaggggtagcgccagttagcaggcgctgaaaggccctggcttcgtgggtgtctctgagccaggctggcgctcgtgcgcgctgggctccgcgctcagtcgctggggtgggaggccaggggaagccgccgctgcaggccgagccgcgagatttgcagtgcaggagccgaagcggcgggcatggtgggaggtccttggaagctgctgcggggaactgaaacggctctgataggcaggcacaaagacttctctaggaccccctacaatgctttacgtttgcctcgtgctttagatttcacaaagtgcttacacataacacgaccctcctcactcgacctggtgagatgggtagcattttgtggaagattccgagactcaagtttgagagactcacccaaggtcagagttggcgagtgggcggtccgtggacaggtgcgcaggtctcagcgccatttggcccgcgctgctgcttcctgtgtgtactggatgttctctaggctcgcccagcgtggaagccccgagttaccagccgcaacgtggaaaccacagaaggggaaatagatgacttttggtgaaggcgaattttactttatcattttgtattgtcaaacttttttttactattatgcttttgtaattttaaaaatcgaaga

SEQ ID NO: 2354 - DNA, 2300 bp, Homo sapien
ttgggaggccgaggcgggtggatcacctgaggtcaggagttcgagaggagcctgcccaacatggtgaaatccagtctctactaaaaatacaaaaaattagccaggtgtggtggtgcatgcctgtaattccagctacctgggaggctgaggcaggagaatcgcttgaaccctggaggtggaggttgcagtgtgccgagatcctgccattgcattccggcctaggcaacaagagcaaaactcaatctcaaaaaaagaaaaaaaaaaaaagggaaaggtagaggtagcccgaatataatcttagatatggcatcataaggttgtgttcaagttccagatatgttaacttgggctggccatccaagacctggcaagacctctttgaggccatttccttacaatattgttaaaggttaaatgagatactgctaaatgagatattgcacgtgtaaattatgaagtacttctgaaacaagagaagcttgaaactactaccacaagaaatgtgatacagtatgaacaagagatgaagtaaagcacagccaagcagcagggagggtaaaggtgaagttcaaagcaagaatatatagcaaacccaagtccacacagtttttgtgacttcctccagcctactggagaggcgaatgccgattttgagagtagatgcaagaaggacaagaggctgaaaaaaatctaggtaaggactatttaaaaatctttggagatatgcttaacatttggaaattacttgcacattttatataaaggtggcatttgactcattggcgtgttatattttggaaatggccaaacatttcatttttatattttataatggttttttttttttttttcatattttggggttaactttttttcagattccatacttttaaaagcttaggctccagacactatgcctatagcatgaaacagataatgaaggaatcaagtgaaacagtcgcccactgggtacaaattaagtagggaaggtcatgaacaaagaaagcagtgagggcccagtagacaagctgacgcaactggagataacaacaggtggaggggaaaggagcagctgtttccatttttggaattttggagaatcaggagacgcctggtaaggccagagaaggtggccgtgtaattataaagttaaaggggtcggacgtgttcatcttcccaattagttttaagcccacaaagggcttgtccctcattgccaccgtccattgtctcactgtgaccaggcaggagccctccgtgattgactgataaaaacagcgggtccaactcgctcagctcgtttctgttacacaggactgtggaatcccgggtgacattcaactccttaggtcatctgcactccccccggaccggaaaacaaagccttcccgagcccgacaaggagggtggcgctccctggcccggccgaagtaagccctccattcgacacctcggctccacggtctcccgaaccggtccccgtaacgcgagcctgagatgccctcacccccgaaaaatacccaaagtcggggagccgcgggagtgcttgtacccagcacgctaggcctgagggacctgtgagctacagtaagcgcctgaggacagaggggagcctcgcagcctcaaacccgcgtggaggagaaacgtctggcgcccccgagcggccgagacctcgggagcccgaaaaacgtctcccactcccagcgcagagccaactgacagtgccatccaccaatgggagaacccagtctgcgttcgtgggacgagtccgagggcagaaagaaggccgtcccggcgccaaatcagcgtggctttttaagaggtcctgaggcctctctggtcaccacagagagagggacagtccctgtgaaacggtgacgctgactacactatgccgctcgctccgagccttggccttttcctcccgccgcactctaagcccttcggccgccccgcccacggccttgtcaggtcccgccccccgcgtgagtggactggcgaagatgtggaatttccaaaacttattggatgcttagtggcgtcactctggagggcggcggggcccggagcggcgagggccgccgctctcggacggtgattggactcgccggagtagaccgggctgggattggtgtgaggaggggccagagcccgcgggcgtcccgggccgaggcgcgggagaggcggtggacaccgagaagcccgccggcggcttgcaattccctcacccggcgcgcgcctttcgcagagggaaggagcaagagggcccctacctcatcgtgcgcgggtggggtcggcgc

SEQ ID NO: 2355 - DNA, 2300 bp, Homo sapien
tgggttgtcttgattttccctccagggtcatccttagctgtccctttagtgatgatgcatggctagaagagagaaactccatggctctgccccagggtgtttgaggtggggctgcttttttgttttttttttaagacagcatcttgctttgttgcccatcgtggagtatactggcacgatcatggctcactgcagcttcaagccccactcaagtgatcctcccaccccagcctcctgagcagctgggactatatgcccagctaattttttgtttgttttcctgttactagatggattctttttttttttttttaaattttgtagagacgaagtctcagtatgctgctcaggctagtttcgaactgctaggctcaagaattcctcctaccagccaggcgcagtggctcatgcctgtaattccagtacttggggaagtcgaggtgggtggatcacttgaggttgggagttcgagaccagcttggccaatatggagaaaccccgtctctactaaaaatacaaaaattagctgagtgcggtggtgcacctataatcccatctacttgggatgctgaggcaggagaatcgcttgaacccaggaggcagaggttacagttacagagccaagattgtaccattgcactccagcctggacaacagagcgagactcagtctcaaaaaaaaaaaattcctcctaccttggcctcccaaaatattgggattataagcttgagccactgtgcccagctgaagctgctcttcttaaggctcattgaggggtagggcagaatccctgtgcctttggttggaattacagaaaccactgctcccactgccctcagcttccccagacccgggaagtgaccattcagcactggcactgcatagattccagggcatcaccctttacttattctggggaagggaaagcacatagacccgcctctcatttatccctcactgcaacccagtgagacacacattgaagtaaagtgatgttctcaaagccacatgattaattaggaacccaggaattgaacctagctgtttgactctaaaggtctttccactgtgaccttgccctctcctgctgccttattttcaccactcagttctctctgctccatctttactcaatggttgctccacctgcccatacgcaaacactaggaggatgctgctgaaggcctggagcaccttcactgcaaacatagtcagtcagcagcagcagtaagccaggcaaccagtcatgaaactttcccatccaaggtacttctgggggctggaggaaacaataaggagagagagagagaataagagagagagagagcaacgtttaggctttaacgagaatcttgcctagttggcaatctgctggatgaaatgtcagagatttttgctaacccactcacctttgacagcaatagcttctgagtattgggatctccagagagaggggcagttgaagcagagcacattcagtgtctttttggagtctcaaaaaaattgcaaggtgggaagtgctggccctctcctgctcccactgaaatgaagctggaagagaattgcacacccagctgggcatctcaggagacctaggcaagttcagtcttgagtgacaaactcagtggtcttgtcacttcagctcatggccttcctgaggtcccccagcatgagtctcctccacgagagacctgaccaatggtgacccagcctctgtttgagcgtcatctaccagcagagatggggactcctggccccaaggctcccagcatagcctgacactttgagctattccagtcctttcttattttgagattaaatctccctccctacagctcccttccacagtcaggaggaaagtcctgctgaatgcaggccctgaagcaagggccagggaagcttttcctcgtcaccctcccaaagtcaagacttggaaaggcagctctgagcccctggcttggctggctggccggagcaggcagccactgtgcctgcagggaattctgcacagccagtttcctcatacctgagccgtctacagctgcacgcaccactcccggcctcaacacactatttaaggccaatacacgggagctggttgtgagtcaccaaggaaggcagcggcagctccactcagccagtacccagatacgctgggaaccttccccagccatggcttccctggggcagatcctcttctggaggtagtatatactcttctctctatccttatgggtgaagggaacagcagtgaggtcttttggggatgctgagcactgctgggctgtcccataggaccc

SEQ ID NO: 2356 - DNA, 2300 bp, Homo sapien
gtcaactaggttatgtcaggtttcatgattgaaatctcttgtggttaagtctagtgttaacctaggtaatatttatttttcaagatttatataacttgctatttcattcagagttcagtatttatttcccctgaacttttcatggaaactaatgatctcaacagtaggaaaacagtgtgttcttccccgcctccccaccgccccccccactttggcttacggagtctcaacattagagacttattcttaaatttggcacattttataaagacatattgggaaggctaaaagtttcttatatctactcttcacaaatgttcaacataaatctcactagggaccgggcactccttgcttaccagtctccctgggtgaactggtgagaggtggccctcaatatttttactttttatttggtgaagcaggatcaatgacaatgacttttgtcatgtggtaggcagttagatatgcagagcttctagaaataatgcagactgggagactggaatgtagttacaagtgtgccaatgaacatgagacttttctgcttgatttttaagctaaggctgacttactctcctgacatttaagggcctcctctccaattcccagtcatcagtaaaggatgtgtacagggaatgacaatattagaacaaaaacaacctgcaagtaaatcggatgcaagagtctatgtatcttgcaaggaaatcttttgcacttaatcacaacatggctctcctcaatactacggagaacagaattgattcagattgtttttaagcctgaacgtaaacaatattgtcgcctttttgggtttcagcacctccttattcatccattttctcttttatgggaagggggttgatgaggtgtgtgaagatgatagaacgtgccccagaaactgaacaatgaagagacgcctgtcatatcgggggtacctagattcctctgaaaggaagcccagctgaaggagcagggtcaccactttattttaaaaacgtaacatggcacatgttggtgctctattaatcgagcctcgggggcccaataacgtgagcatgggctgctgcgtggaagtttgagaccctgttgctgaatcctcgggcctgacggtctatcgctgaagacaagacttccaaagaatcacagtaaacgttaacctaagccatcagaagccattaactccggtgacactacatttcagcgaaaccttcgcgacccaacccctcgctccctctcgcccaaacgctgggtcaaccccacgaactggcggtggcaaggccctgggcaccggtgaagttctcgtggcagcgcagatcggcgaccttctcttctttcgcgctcagacggcggcggcagcagtacgctttcgggctgctggagccggcagcggcgcgaggccggagcccgggcagccaggctgggtgggggaggggcggcggcagcggagccgggagcgtgcgcgcgcacctcacactccgccgcccggggacgcccactcgcgagccggggccggtaggccggcccgggtcccatcgcccccgccctccggttcctctccggcgtgagcccaacgggtgtcggcccagcagctgctgcgctcaccaggcctggggaggcagggtacggggaccgggccgcagccccgagcggcgtgggcgcgctgcctctctggcagccgccgccagagccagcagctgcgagccaccggaggcggcgcggaggaggcccccgcggccgggcaggaaggagacgcggccgacctctgcccgcccgaggcgcggctgctcccgcgcgcccaggccctcccgccgctccagggctgagtgaggaatgagccggcgcctaccccgggctctcggagcgtgggccccggctcggcttcttaggcgcgagggctcggccactgcggccggcggcctagctcggggagcaggcgccggggttcactgaaccggccgcggagaggaggaggaggaggaggaagaggaggaggaggaggaggaggagctcggcgggggcggccgccgcgcctcccctcccccaggacacgccggggcttctcagtggccgccggaggaggaagttccgctccctgacagacccgtgcggtagcaacagcggcggcggccgcggcggctggccggactcaggtgtttcggacgctattgcccttcgcgccagccgtcgagtgggcagcagcgggactcagccgggcgccaggttcctgccaggcagcgccgggaagcgcgggcggccgagaactccttcctgctacttcgcccagcgccgctgcttcg

SEQ ID NO: 2357 - DNA, 2300 bp, Homo sapien
gtctttcctgcttctgttatactattgcaaagtgtgttttcagtttaattttaaaaaggcaatctgttttttcccttgttttaatattttattttttgctttgttgttctgtaattctattactatatgtctatgtgtgggttattctttaaaggactcataatgtttcatcaatctgaagacttacattttcatcaagtttagtaggttctcagttattacttctttcaaaaatgtctctatcctatttttccgttctgtccctctagaatttctgataccttttgtttctgtagtgaaggaagattgttttacaaatgaaactatttgattaccgtgtgattatatatagttagatgatgatgtgttaattagggaaataatgcaaggtaattggtattaatattttatattagatggtcagaaaaaatttctgataaggtgacatttattcagagacctataggaagtgagagtgatttgttcagttatgtgaaaggaaagcatccagataatagggtaacaattgtaaagctgacataggagtctcaagtttgacaattctgggtacagcaagtaggcccatataattaaatgaatcaaagggatattaatacaagggatgtcaaagaggttgtaggggatctgagcatgttggatcttattggtcattttactcttgagtgttatgtgaaggcatcgtaggggtttgcacagagtagtgatctaaactgatgtaagatttaaaaggctcattttaactatagtgtgctgaatagagggtaaggaggagggtaagtattaaagcagggactggttggaaggttattgttgcaattctggtaagagatggaggccctcccacccttttttccttcctcctcatatttagtcaatgtctgctatgtgccctgtagtatgttagatgttgggaatatatgaagtaatattaagcactttgctttcatggtgggatggaatgatgatcgtgttatcaaaaaattacattatattgtaaaaattctatactgaagaaatatgttagcagatgatgtgcctgcctatgaatgttggaaagactttagagtaatacagtttccttttaatttttattaaaattaactatgaatgtttttatgttagttgtatatcttctgtagattctttgattatgttctctgccacttctgcttttctttccatgtgttagaatatttctagcaatatctatatcaatatgtaaatacaaacatagagactctatttagtaaggttattaatattactatatttgtgctgtttccatctgtttgccatttagttttgtttatgattctttttcttataggtaatttgcattttagaaaaatttcatgtctgtcatcaatttatcaaaactattggttttatgcttaagtacctgctttctcagggaaatttatatattgccacacttctactttaaaaatttttttaaacatttatttccaaataatttagatttcattttgatatttgtgaaattagtatttatgttaatttcttacccaggaggcaattttctcaacattattattgaataatccatcattctgccatttttttggtgcctcctttaacacttattatatattctaggaaaaatacttaaaatccaggaggagagaggaagtaaaaattatgctgtagtgattagaacagaagaaaaaggaccaccagtaaagagtgctattctagaatcatgacccagaattctagaaatgaaggctttcatgaggaagggtaatagttaacagtgttaaatatcctgataagttcacagtactgtgtaaggtacataaaaaatggcttgttggtttcaggaattagggagctgtggtgacagcagtagagaagtttcagtaacattaacaaacgagaggagagattgcagttgcatgagaaatgaagatgcagaaagtagaaaaatattttccacagggtgtttgtgaaaaacaaatgaagtattgataatattttgaaaactataaagcattacgtatttgtgaatgttttcaatatgtttttcacagaattcagaggtgtctgtgtttgaagtcaacattcgatttattggaggcctacttgcagcatattacctatcaggagaggaggtgagcaaaatcaagcaatgcattgtttgttttggaggggagggttggaatttaataaaatgaacaatttccctagaagcatattagttttctaaattggtaatattgaaccagtctagaactggttgcttcaggcagaactattcc

SEQ ID NO: 2358 - DNA, 2300 bp, Homo sapien
agacttgaacagacactttattaaaagggtattgaaatgaacaataagcatctgaaaaattgctcaacatccttgatcatcaaaaaatgcaattttaaatcacaatgaaatacatatcccccccctttttaaattaaaaagactgaaaataccaatactggcaaagatgtgaaacaaccggaaatctcatatcactggttggaacctaaattgttatacgaatttaaaaactggcagtgtatttaaagtttaatatgtgaacactctatgaaccaggaatccaatcctaggtatatatatatatccaacataaatgaatgctatgtccaccaaaagacatgtgtaagaatgtctgcagcagcttcatcaaaggcagaaacatgaagcaactcaaatgtccaccaacagtaggatgagtacacaaatcgttgaatatttatataatgaagtaatacacagtagtgaaaaagaatggaccattgttacacacaacaatatggatgaatctcatagacgcactgttgggcaagagaagccagacataaaattgtacgtgttatgtatttcatccatagcaagttcaaatattggtaaaactaatctatggtgatagaggttaaaatagtggtaatccttgtcggatactgaatgggaaggggcatgaatgagctggaaaggttccacatcttgatatggatggcagttacatgggtatgcatatgtaaaaaattatcattctggacacttttgatttgtgcgctttactgaatgttatacctcaaaaacaaaaagtaaaacaaaaaatcagatcatatgtcttgatttcgcgtctaacaataggatcactggctttccctataaacactcatattgatgtcctatcgcattaaagttcctggatactcactctcctctccctcgctgggaaagacatatttgagaactcttcatagtctgacagacaggagaaccacacttatttcaggcagggttggaagagtagggcggaggagatgtaaatactgcatctgggaagtaatcttttcccccagcacctagtaaacgatcaatacaagtacaataatgtctattgataaataacattgtccaacattggctactatctgatacatacagcatttgccacacactttctaacaggcactaggcaatgcactaattgtttcccacgtattttcttaatacttatataattctacagagctgtcccattgttagtcttgtcctacagataggagacgcaggttgttggagggttggttcagttacttgcctaaggccttacagaaagtttaagtggtgcatggagatctcaactcagattagtctgaattcagaacctgggctgtaaaccactcgctatgttatgaatggatggtgtccaagccctgcctgcatgttatataacacactggaccaagtgctgtggcattccgaatggggccgaagcggctgcggctgccgacattggcgatggactccccgaggcccttcgtcccactaactgcacacaggtggtccccggggccagagagccgccggcgctctctccccgaagaccacgccttcgcctccagccagtttgcttggggaatcagaaaggtgcccagggcccagaaaccattaagttttttccgacttcaaaaacacacaccggaggtaggcgtgggcgttacccgcctcactcctgggggcagggagaaccaacgcgaaaatccccagagaggcggaagaaaaacctgcctgcgagagaataggatggagatgggaaaagcctggggaagagagagttatgcggcaggaatagcagaaaagcgtactaagcaaaaagaaaggtgtcccactaactccgaagttaagtgggtgtcgacgcagccccctctattgcgcttgcgcagtgctgcctccctgagcaccccgccccttcccgccgctgaggatttactcgtctcttggcaaccattcacccgaagagccaatcagagggcagccctcgccccgcccctgccgtcagggccgggcggaagggtcccgaggggactggctccgccacgccccgcccctggctcccccgggagggcggctcaggggcggggacgggggcgtggtcccgccgtataagaacggagggggcggcggcgggacggctcactcggtgccgctgcctaggggctgtagaggtcgcgccgctcctgctggggcctgcccacgccaaggacctgcctctgtcgcctcctcttctattgcccaggtgagtccgcgacccccctcctctaaag

SEQ ID NO: 2359 - DNA, 2300 bp, Homo sapien
agtattaggctacgatggctagtcattgcttcttcactagttgaggtccatctcctttttcaaagttggattcaaaggtcctttctctatgaagttttttctacccaactgtgttcacatttattccttaaacaggaagatgattgatttgattatacctatgctactcaaagtgtagtttttgaatgagtctagtctgagatggttgttgtcagttcatgcaagataagtaaagaaatggagtgtaagtatttagaaactatcatagcaatttaatattgctataatatccaactgcataatcagcaggctcatattttgtctttttcatttttctagtaatttatttttattgtattttacaaaagaatcagtctgccacagattggaaattcttttaaaaaacaatcctgtaccacaaataatttgagaaacactgatctacaaatggcaaatataggccaagtctggcccaccacttaattttgcaaataaaatgttattaaaacacagtcacagccacttatttacatatggtgtatgattgcttccatgctataatggcagcattgagtagttgtgacagagaccacatagcccacaaagtctaaaatatttgttttctggacctttaaggaaaaggtttactgacatctgatctagaccacttgttctcaatcatgattacacttcaggaattcctgggagacattttaaaaataccgatggctgggttctgttcccggggattctgatttcattggtttatggtgcagccagtgcaggtcattttaatgttcagcaaagttttaaaccactgatttagatcagtaactttcaactttggcctggaatcagaatcactgaggatgccagggattcactctcaacctactgtatcagaattctgggaagtggggcccaggcatgcttgaatgtgtttttgttaagtaaatcctctgcaggtaattgagatgtttaatagggattgagagacactggtatcaacccaagagcaatgatttttaaaactgttacatatatctaaattacatgaagagggtgctaagaatacagactaccaagccccacatcgagtgagtctaattcagcaggtctcagagagatgtgacccaggaatgtgtatttttagcaagctgtaagaaacatggctgtgctgcagccaagcaggcacaggctgaggtaaacatcctgcatgactcagcaggattggagtgcaggcacacattctcatgccttatataatcacagctatctaaacataacatagagaagctcatgacctggctctcagccactattgtttgtaaggtgtataaatgtaacactgacactgagaaagagctgctaaataaagccatatctcatctacctgctgtctctcgagtgttcttctagctccctgccccctatccacccactcccctcagacctcagctggggctcgaacctgacaattggcatagtcagcaggatgaggtgagtgggtcttcattccttgaggcttccaggtcagctctgtggccacagcacgggctgtggtacccagtggcagaggtgctgcttggatgggccccagtggaaacataggaggcagtggactggtctcccacgagtgtggagaaggcactggagcagctggaagcacacagcttcaagaaggaatgcacttttgccggcagagtcgatgggcatttctgactgcactgtgtgaagtatatactcagtccttgcaggacacagtgcaggtaagggatcttcagacacaagctaagtgcctgggggccaaaatgcacagcttgtagtacagcctggggatgaaggacttccaggctcaagcagggtgcttagaggcccagataaacagcctggaacaggagttagcaacagctgttagtgcgacctgagcccatcctcccagccggacactctcattgggtctgatgccgaggaggaggaggctcttctgctgctggcttgccccatgatccatcagaagtagaacgcaagcagccaatggagccccaggggagagcccagggactcccacagtggtggaacacacctcttatagtgcttataaccccactgagttgtgtgagttaggtaaacgcgccggcagcccctccctgcctggttactccatctttgggacaaaggaactgacaacattccctgctccacctctgatagagaagctggcttctatcacaactcacccctcccttcattagtggctgcagctgtgccaatggtcagcacagggacaagatgaccac

SEQ ID NO: 2360 - DNA, 2300 bp, Homo sapien
tgcagattctttccttgcttggtctattctgctattaatacttatgattccattatgaaattcttgtagagtgtttttaagctctatcaggttggttacattattttctatactggctattttgtctgttagttcctgcattgttttattatgatttttagcttccttagattggattttaatgtactcctgtagctcagtgatctttgttcctatccatattctgaattttatttctgttatttcagccatctcagcctggttcagcacccttgctggagaggtgatatcatcatttgaaagaaagaaggcactctggttttttgagttgtcagggttcttgcactaattctttcttatttttatgggcttatcttacttcggtctttgaggttgctgacctttggatgggttgattttatttgaacgggtatcctatttgatgaccttgattgttatcaaattgtgattgtgatataaggtggattcagctgactggcttcatttctggaagattttagggagtcagtgctcagctcccacctcctggcctgtgtgctctaactctggggaacttgtattggggccttgactttgttctctggctccttaaggttaaaaatccactgtgctggaggtggccaagttgctcccagactgctggtcactacacttcaatgggtggtgtcatccaaagcattttatagtgcagtgacagcaggctccatcctcattcacacatgtcagcagtaatggtagcagcagcagggtgcctgcctccctgtggtcattcaccacagtgatagaggtaatgcagctgttggggaagacggccagaggggcccctgctggtgactgtgtgcatggtcatgttggaggtggtgttgactcaggagcaggacactagtgggcacaggtctaggtgccttctttgtgctctgcaagcaggagtggttgctcagggtgggggaggatctgctgttctctgcacagtattagcacaagggtggggcactggaaggggtggggctggctggctctgtgcccaccaaggctccatctgcaatggtggtcagtagaatgaggtgaggcagactgcactctcatgtgctagcagggcaataaaagcaaaacccactcatgcaaacacacaccagcaaaacatttggggaattgccatgggccctaggggggaagccgcagtatggggagggagtatgtgggctggtatgtggcagtaggagccaccctgttggagctctctgccagtcaggcatggtctgccaccataaaaaccatggtgtgggcccccagggcacctgagactattctgtaagcaggtgtggccaggctgaggccccaggagaggccaccataccaagggttgctcaggtcacactggccccatctgatgggcaagattgccctgcagaattcaggaccgacagttcccctagggctaaagtctcctataggaacaagtcaagcctagtgggatagctgttcctgactgtgctctgctacagacacgcccacaccaaaccctccaggctccacttcagctggctgtccctaccacttctctaagcagctctctgccaattcaagtgtccatggtggttgagaggtctcttcctgccaaggttccagaggcccatggtgagagtgggttgctccttgtcagttcaactcattcgttcccctaaagccattgggaatcaggaacaagtccaagtgtgctgtatccccatgtagggtttccagctttctcccctttcagcccagcttctgtgtcttcccttcattcatagtgtcttccctttgaagatctgttaggagcatgctagtcgtctcagtcccttggtggaaatgattccacctgtctgtgtctagttggccatcttgccctccccctctactttcctttattttacctcaaaagaaaactgaatttaacccaaagctgcttcatctctttgaatttatactgttcctttgagtatccttaaagtcccattataagcactaccttccataaagctttgcccagttcttctaacctcattgatctgcctctgctgctctgctctgaacttaatccctatttttaggcccttatccttaaccttgcagaagagtcgcttgtgttcctgtcttgggtccccctatgtttccacaggcagaaaactgcatgccttatccattcctccactccctatggtgcttagcttggcatcttcctaacacaggctagatgggctgtgtctgttgccgcatatgcacattgtgaagcaatatgt

SEQ ID NO: 2361 - DNA, 2300 bp, Homo sapien
ttttatgccaccatccaacaccatacttaagaatcattttatgccatcagaaagacattttttaaaaaagattttcagattggaagactaactgaagtagtcaaatatgtcaacaataaatacagtataacaagaacattcctaagcttgtcaatggcttgggtcaaatttaacatcataattcaaaagcacccaaagaacatatcctaacagtaaattagtagtaccccttcatattaaatgaactgcactatgttttaattgtaaatattgatatattaggcattttgaaacttaaataaggaagtagagttacatccttgaaacattgtataaggaattttgtaagatgcattaccttaccactcacagttgctctgataccaactcttattaaaatcatttttttccatctgtggttgtcccatcccataatatttaataatattaagatagttttttaagaaaaggtaaaatcatgactcattcaaatataaaaccaaacccgtgttcaagattttatttaactcaaaatggaaccaggcagagaagataaagaaaatcccagaattagacaccttagagcaggaatattgaaataaatgtgcaaaaggaggcaaaacttccactgaatctctgagagaattcgcatgtcttgacaataattatttagcattgatgtcacttacctagtttacgtaactgaaaaatagcttttttagaattagttattccaaggggtgttaagatagaatctaaactatgtagttttccattgaagcacacacttctccccataataatataatgcacagcacctgtcagggatattaaccatacatacccactcaaatgctccctttcccaccaagcttattaaaataatagtttgtggccacaatttcttcccttctcatttatccaatacacagcaatcttgtttcaaaactcctatgctgctacagctgtccacagtctcatcatacgcattctttgctattgcaattttcttgaatatggaagattagctgaacatgcattaagctcaggaaactctaaagaaaatcagataatgtagacaaaagtctaatttctaggctggctgcagataccttgttcaagaagcgccggcaggatcttcttttgtacagctatgttagctttaattttgcacagctctagacatcagaactcatttctaaacacttctatgcagctcaagaataaaagtagcagaaatgcaagagagaaaagctaattcccacttggtgaaagagcacttaagtctcagtgagcaaacaaggaggagtcagccttggtcacttccccctcaagcggccagagagcggaaacacaaagccaggccagtgtcactccagggattgcgggaacctagacaacgcaccatcctgggctcagcgtctacccacccctcacccgaggtgctctcggttccgtagaatgtccagtccacaggaacggcaacacggacttgtctttgggactacaaccagcaagagctcccgcctgccccatttcacctgcaccctagggcgcccgcctccttggctacagcaccactgttcctagtgcccgccgactgcccaccctttcacttctcgtagagacggcgtccccgacaacgcctcgggaaagaacctaaccaacatgcgaggaagtggcgccaggctcgttcttcaagagaagtgacagaactaaccctcagcctgcaatcctgaccagggccgagtcccgagcgcctcggaccgcgcccccggccctctccgccccgccttccctcccggcctcagtccctcctctcacagcactctggtggtcccatccgggcggcgggcggcacggatcaggctcctggtagaaggcggccgagcgacatctccggcgaccctcagcaggagcgcgccgagtacggcgagtcaaagtcccaggagactggagtgaccagctgcaaatgctctgggctgcgaaacaccggcttccgctcctggccagagctcaccaatcagcgcccggctttctccgtcatttcctcctagaaggcaaagggaacctctggcggaagaggcttccggaacggacccggaaggggcaggtcttgtgggcgggtccaatcggctgggagcctcgtggaggctgaggtgagtcctggaggtgcgtggttggggcggagagcattatctgcggctccgattttgcagattctggctgaggcgttcgtgatgtcagcagcagccgagacgggcgtgttaaaggccggttgctagggctgggggaactca

SEQ ID NO: 2362 - DNA, 2300 bp, Homo sapien
ccatctaccacctccttctacagtgttttccttggagaattcatatagcatgcctaggtccagggactcccatctgtctatttccagtcctttccacctacatgaatactaattatagagtttccaatatttactgaacatctccacttgaataccttatagtttcacatttaacatgtctataaccaagcctaccttacttctggtacccctctcttttcttctgacactaagacacaattttcccagctcttcaggctcaaaaccatttaataacctttgaattattaataaaaaaatattattatagcagccaagatttagagagtgcttacgctatagtaactgataacattatgcaattgtttaattacatacagcaattaatgaaaccgagctaacatatgcaaagcacttagaaaagcctctagcacattgtaaatatgagcataaaaaaattatccataaggacctggtatggtggctcatgcctgtaatgccagcactttgggaggccaaggcctaggagtcaagagtttcagaccaacataggcaacacagcaagaacctatctctacaaaacattttttaaaaaattaaccaggcatggtgacgcactcggggaggctgaggcagaaagatcacttgagtccagaagttcgaggttgcagtgagctatgatcacgccactgcactccagcctgggtgacagtgagactctgtctctaaaaataaataaacaaattctccacaataacaccacaagggaagtcactcttcctatctctattttacagacaaggaactcagacccagagatggcaaattgctaactcaaagtcatttagcagctaattgccaaagccagatcccaatccagccagtctaactccaaaatttctgcttttaaccactatgctaaactgcttctctttgcctctttctctttagtcaattccacctgactgttactctgaaacaggatccctttctctccagcactttcagttccagctctttatcactggattactgcactgattttccacctagcacctccgcctccatgtttttcactcttttcatttaaacgtcataatactaccgactaatcttttcaaatgagctttccctatcctaaagccttgaaaaggctaaatcgtttgccagtttccaaaaactcatcctatctaacccccgtatttctcgaataaaccttcctgtcaggctggctagtttccttcctcgtcccgcgaccttgtattcttcatattattcgttttacttagaataacatccatgttctcctctacttcttttaactaatattatcttctgaggcccacttcctttcgagtaagcccaattctagcagccttttttcatcgcctcgatatttaaactacctcccatacaacttgcactgttcactttgttccacgtgcacagctttcgcctcctttctgacagttcacgaccaaaccttcttccgagaccccatgatctccgcttcctaacctacagcccccaaaacgatgtttccaagatgcactgaaggcctggaccgtggcaacagacctgccacacattcctaaacgagtcttcggtcaggggagggtgacggagggttccacacaccgaacacacggtcatatcatcctcaggccagcccgtgcacacgcacggtcaggcagctctgctcagcacccgcaaccgcgccgagtagctgaggggcttccaagtactgctgtggggacgcccgtagttacctgagttcccccagccctagcaaccggcctttaacacgcccgtctcggctgctgctgacatcacgaacgcctcagccagaatctgcaaaatcggagccgcagataatgctctccgccccaaccacgcacctccaggactcacctcagcctccacgaggctcccagccgattggacccgcccacaagacctgccccttccgggtccgttccggaagcctcttccgccagaggttccctttgccttctaggaggaaatgacggagaaagccgggcgctgattggtgagctctggccaggagcggaagccggtgtttcgcagcccagagcatttgcagctggtcactccagtctcctgggactttgactcgccgtactcggcgcgctcctgctgagggtcgccggagatgtcgctcggccgccttctaccaggagcctgatccgtgccgcccgccgcccggatgggaccaccagagtgctgtgagaggagggactgaggccgggagggaaggcggggcggagagggccgggggc

SEQ ID NO: 2363 - DNA, 2300 bp, Homo sapien
accaataacctgcaacacttaaaaaagcttttcttccttatatgctcattatccttatttatttgagctcaggttagctttaggcttacagcttctggtaatactaatgttttagtttgtggcactcttaatcagatattcttggacctttgggtgtccatggatggccttcagaatatctgtgaacctttcccctcaaatatatatgtagaattttatgtttataaatatgtatattctgaaaagatctataactttttcttagacattcaaagaatttacatagaagaaaagcttgcagaccttaggtttagctgaatttcggtgtgtgctgggtccagcagccatttcgatgggagttacattagtaggctaggggttatcttttctttatttaaggagaaaatgtatctacctgtcttgcgatgcttttgcaattcctaatgccaatttgaattttttgttctataatatggtcaacctttcacctaaatacagaaaattttgaagttagtgaagagtggggtcattattttttcaccattgtcactaaacagtagtccttatgctatagaaagtttttggagatagtataataagtaatattttgtttgtatattatgtagtcagtttttaataagttctgatacctgccttgctactgaagaggtttgataagggagatcactgattagaagctgttattggccataagaaagatttctaagtcttcaggattaagagttacctcctgggccaggcacagtggttcatgcctataatcccagtactttgggaggctgagataggaagatcacttgagtccacacacacgtttgaggccagcctgggcaatatggcaagaacctgtctctacaaaaaatttaaaaattagtcaagcacagtggtgtgtgcctgtggtttcagctatttgggaggctgaggtgggaggatggcttgagcccaggagatcaaggctgcagtgagatgtgatcatgccattgcactccagcctgggcgacagagtaagactctgtctccgacaacaacaacaacaacaacaaaacaacaacaacaacaacaacatgcctcctggaacatactatttcagcttttattttctcatttttataaaacagattgaagacccggaagaaccagaccccaagaaaatcaaaggatcttctcctggaatacaagatactcttgaggcagaggatggtgcctttgagacggatgaagcccctgaggatgtaattcattttcatttcttaagtttaattgtgttgaataatgggaaagtaagaattgcagatttttagggaatcatcactttagggaatatttttgtcacttgcacttattagaattatgtttttttcagaagttcagcagaacttacatctaaccttcatctgctcttgcttcttctgtagcgaatcctttcatgcagaaaagctggttccataatgcgggaaggaagagacagagttgtaaaccttgcagtcgacaagacaggcaggattcttgcttgccatgtgagtaccatacttaggagaaaataacaaggactaggctgttccttccaaacactcattctttcatattcaatgtaaagatgactttttcttgactcatgttaataattcattatatggtactgtgtggacctataatctctagctttattagcataacaacaaaaatattaataattactattaggttggtggaaaagtaattgtggtttttgccatttaaaaagtaataattgcaattacttttgtaccagtattattattagcaaccatttattaaatgcttgctcttctaagcaatttaagagcatttaacttcttgttcagccttcagagcaatgctacaagtaggaaatggtatcctcattttacagatgagatagcaaacccagagagattaagttgtccaaggtaatgcaactactaagggaagaaaaataaatattgttgtttacttttaattgagaattaggtaaattacaaattacctctccttgactcacattaaccttttgcctttctagggaactgactctgtgctagaattgttttgtatcctttccaaaaaggaaattcagaagaaaatggataagaagatgaagaaagctagaaagaaagcaaagtatgttttcttaatacttacattaataatgaagtatcctgggtaggccccatgttactgaaaaaaaactggcttctttcatatttactgtcttatcaattaccattaaaagttaaagaacttgtgaggtatcgataacc

SEQ ID NO: 2364 - DNA, 2300 bp, Homo sapien
catgttatacagtatatctctttaatttattcctcttatataactgaaattttatatcctttgaccaacatctccccaattcctcaccccaatggctggtaactaccattctactctctacttgcatgagttcaacttctgtagaatctgcatataagtgtgctatttgtctttctgtacctggattattttacttaaaataatgtcctccaggtttatccatattgttgcaaatgacagatttctttttttttaacactgaatagtattctattgcctatatttactttattttctttattttctttattttccttatttattcatccattgatgaacatgtagactgattccaaatcttggtttttgtgaataatgctgcaatgaatatgaggatgcattaggaccttttattatgatcattatctcaacagagatgggagtgataacagctctagttagctgatggttagtaatagtctttgattggtggcaactaaaacctaataaccatattcatctgtcctagatactagctttcagatgtttcctttgatcctcaaggcatctaatttgcataaataggtgacctcagataggtcttcagtctcagcatgtctttcgtcagaaaggtggcatcagaaaaaaggaaacggtagctgctaattaactggaacctgctcaaagactctaaaagccttccactcttctgaaccttaatttaagaaatatttttaatgagaagttattccgtgagttccctttccttaatgtcaatgtttttattggatatatttaagatgtacaaaatgatattttgatatccatatacatagtggactaagtgaagcaaattaatatatctcttacctcatatagtttgtgtgtgtgtgtgtgtgtgtgtgtgtgtgtgtgtgtgtgttatgagcacctaaagtctacactcttggaaaatcgtcattatacaatacaagttattgactatagtttttatgctatacattacattcttatacttattcatcttacataattgtataattgtaactttatatgctttgacctacatctccccaccccacccacaaaatcatgcatatcatattatgatgcactaactttatttctgcttatagagagagggacactcatacacatttgcacaaggaaacaaatacagaggagtgacttgcagcattgagtataatattgaaatattgggaaaatataaatgtccatcagtggcagaatagaaaaacaaaatgtggtaaattcctacaaaataatactataaggttgttaaggggagtcatacacacacaaataaatatatctatgcacacatatatgtatagatagatggatggatacatatagatcaagatggttcgaggtcttgaaactgtattaaatgaaaaaagcaggtgtagaatgacagtacagtaattacataaatacatagagtaacatatagcttacatacatttaaagcacacacatttatattgttcatgatatatatgtacataaaagtgtaaaaatgaatttcaagatagaaataagcccagatataaggagaaacttcaatattatctgtaatttttattttacatatgtattaaaaagtataaattttaattgatgaatatctgagtgcttaaattatattttatgcttttcaatttttcaagttgaaaaatcagatgttctcaactcctgcaaataaatagtgagaataagacagcatactaaattaagaagattttttctggaagaattattatgaattgacaagaacagcaggccacactccaaccctgtggagttctcagtacttgctctagactttacaattgtgttttttccatggggaatccagacagccaggaaacagcagcaaaatcaataggctgaggtctgttttgcaatgtctacatcctatcagatctgcttaccttgcatttgcttgtagccgagggtcctcggactgtcaccaggcaggtgaagtgtatgcgggtagaaagctcacgctatgccactgttatcgccaactgtgaggacagtagctgctgtgccacctttggagatggaacaactattattgcaaagccacagggaacataccaggtaggtctacgaggaaaatgagaagcgccaaagatgagtgtctattcagctgagaaaacccacttctctggggcagtaaaaatgcctgcaatgtacactgctgttgctttcattctcttataatactaacatcttagaatatacttctcaaactcttatttattcatcccttt

SEQ ID NO: 2365 - DNA, 2300 bp, Homo sapien
aatgatttctgttaataatccacacttagtctgagagtgtagtcatttgagggcctcatatcaaaccttccatccagattgtgcaggttctggcattcatttctgcctaagtcccacaatgctaagaaaacaaatactcagaatcacacagtttgacaaaaacccactggacaaaatccaacttcagagctattttacctctttggcttcctacatttacttagtccatggcttgtgctgatcttacttatagttgccagctcagagacactttcaagaagactgatttaaagatgttttctagcagttatggttcttttcagtggaattattggtatctagtctgtgatgttgctgaaaatggaactccaaccctgcttgtttccttcctcttacctttgagctgatccttggccagtttgctttgttgacccatatacttaatggaagaaaatagatgattaagatttcaggatctgcatgtgattctttctcttatcctttcactgccatcctcatcctttcatatccaaatttgttccccaatatacatttgtatcaaaattgtacctgtttatctcttctgccaacttgaatttctaatactttaaaaccttctaactgttcttcctgcttttattagtattgattttgcatcttcctgccaaaagcatgtaactaatcttccaaatacctcactttctctcttataacactttagttattaaatatcacctgtaggaaaaattccaaggtctctaacgtactgctaaagtcccctcaattgaatcagtgcctgcctctcctgtcccttcactcaaccaaaatctgcttgaaatgtatcatctggtcacactggtctgctagtagttgtctgtgtataccatgctattctttaccccattgtatttcttatgttccttatgttggaatgccctttccatagctcaccttttttgattagaaaaagtaacaagaacagaaggagaggggagggaaataggagaaaaagggagaatatagaaaaaaagataattcctaaagtacttcctactatttctagaggaattattctgaaagcgataccattttcactctctactaatattctagaagtataaatatgtccaaatcaaattttagggcaatgaaaaggctcaacctgatttatctgcctttggttcttcccattagttgagtccctatcagttaggccgagatgcatgccctgctgcacatttcatggtctgaatctggagaatcttccaagagttaacattcctttactatcattacttgcaatttgtttcagggtctgagtttacctcatcattgagatgtgataacactgtcaagtctcatctacagattactcattattattcatggaaatggagtatgtctaccctgatagagcaactgaaatattggtcaaggatttccatgagggtgtcttcagttctctcctcctgttccaaatgagtgggaggtaaaggatggagaggaaaatgtatcagacaattgttgatgtactaattaaactgcacaaactcctctccccagggatatgcgtggctggtgaggtttcccagatccagggttgaagaaagatgtttcctgttattactgacaaaagggcaaaatcaggggaatcaagagttaaaaatttagtaactgttatagtccaatatgtcaaaaggaggctgaaagtttgacagataagtgagagcaaaggtaggctttaaaaaccagaatacaaaacccaaaatctgggacccagagagaagtatgcaagacccaaaagagtacagaagttgaccagaatattttttgtgccctagacagtgagctgtgtaagcatgtgtatgtctgggggaaagtggtgggaatttagccatggtttaagtgctaaaattacgctattcataacctgatacttttccctattgagaaataatataattgatgaataccacttagaattgtctatgccacagtatctgaggtagtttgtactgtgtcaaaacatagtgaatgatgtatataattgatactatagttatattgttgttgtttgattttacttgaacttcacaggaaaaagtcacaaaagtcagtcatcaatggcccataagggtgaaatccatgaccctcctccagaggcagttcaaactgtaactcctgtggaggttcacataggcacctggtttacaaccacacctgaaggaaatcggatcggcaccaaaggattagaaagaatagcagacttgaccccattgttatcctttcaggccacagat

SEQ ID NO: 2366 - DNA, 2300 bp, Homo sapien
agcggtacatttgttacagttgatgaacctacattaacatatcattatcacccagagtctaaagtttacattacccttggtgttgtgcattctaagggtttgaacaaatgtataatggcatgtgtctaccattatactatcatacagagtagtttcactgccctgaaaatctgtgctctgtctattcatctctccctccttcctaatccctggtaatcactgatctttttactgtgtccatacttttgctttctccataatagcatgtagttggaattatacactatgtagccttttcagattgacttttttcatttagtaatatgcatttaagtttcctgtgtgtcttttcatggcttgatagcttatttcttttgaaaactaaataatattacattgtctagatgtaccacaattttattttcccacccacctactgaaggacatcttggttgcctccagcttttggcaattgtgaataaaggtgctacaaatattcgtgtacaggtttgtgtgtggacataagttttcaactcccttgggtaagcaccaaggagtgtgacttttggattatagggtaagagtatgttcatgttggaagaatccaccaaatcgtcttccaaattggctgtaccattatgcattcccacagtaatgaatgaaagttcttgttgctctatatcctcaccattattttctgttttagattttctccattctataaggtgtctagtggtatcttgttgttttaatctgcattttctggataacaaataatattgaacatcttttcatatgcttatttgccatttgtatctcttccttggtgaagtgtctgttgaagtttcatgcccattttttaatcaggtttttattttctggttattgagctttaagaattcttcatacattttgagtaatagtcctttaacagatgtcttttgcagatattttcttcaactctgtgtcttctctttttattctcttaaagcattaccttttgttccatggttcatttgaatttcccagtctaaaaattatctttgcatgagttacattattttaaatcaatattgccccatctttattatctgataatagagaaaatggtgaactgaaaataaaacaagtcagaaaattcacaaattctttacatataccttcagatgtgtgttttctattcatgatagcaaagaaatggaatcaacctagttgctcattagtggtggactggataaagaaaatgtggtacatacacactacggaatgttatgcagccacgaaaaactaaaacatatactttgcagcacatggatgcagcggaggccattatcctaagcgaactaacacaggaacagaaaaacaaatgctgcattttctcactaataagtggatttaaacactgagtaaacatgggcataaagatgggaatgacagacagtggggcctatttaagagggaaggttgggagaagggtaaggatcaaaaaactacctatcaggtactatgctcactaactgggtgatgaaagtgtctgtacaccaaaccccagtgacatgcaatttacccatgtaacaaacctgcacaggtaccccctaaacctaaaaattgagaaaagaaaaaaaagtgccttaacaattttgttttaaaattatgttttgactgaaacaatttttaaattctttaaacttttaaatgttttaaaatgtaaaaaagtttaagtgtgggaatttaagaaaatgttttaaaatgtggggaaactgaaactgaactgatggttttaattttaaaagccatgtggatgacctaccagatgaataatctgcttatggatatgccatcaaccgattgatttcctctcttcactttaacctaaggtccctaaaacaagagtttcatattcttgtctttgtaattccaccctacctctaacaaccctgagtgcatggtcaagctaaaccaattattttttaagttgattgtggtagagcagctatgaactccattcccagccttcccactgagtcttagttatatttattttgaattaaatgaaaatgttcttgattcgattttgtattttagaagtatcagatgcaaagaataaagctttcagcaagtttggatctttttctgccaccttagaaaatggaatctgcctctcgataagttactatggatcaaatggaatggcaccaggtgaaatgaacacaacagcaaggataagtgtgccccacagccaagggtccctgccactgcccattctcagtctgctcacttgtcaataacatgttatgatt

SEQ ID NO: 2367 - DNA, 2300 bp, Homo sapien
ccattgcattccagcctgggaaacagagtgagactccatctcaaaaaaaaaaaaaaaaaaaagatggcacagacccaaagagtgagtggtagcaaggatttttgtgaagagtgaaacagcaaaagcacaaagcttccacagcattgaaggggacccaacaggttgccgctgctggttggtggtggacagcttttattcccttattgtctccgcccatgttttgtttttgtcctatcagagcgcccttttttcaatcgtcactacgattggctacttttaggatcctgctgattgctgcattttacagagtgctgattggtgcattttacagagcactgattggtgcatttttacagagcactgattggtgcattttacaatccccttgttagctacagagcactgattggtgcattttacaatcctagctacagagtgctgattggtgcattttacaatcctgttgtaagaaaagttctccaagtccccactcaacccaggaagtccagctggcttcacctctcaataaaatggcctagtatttgcacataacctacgcacatcctctcctacactttaaatcatatctagattatttataatatctaatattatgtaaatgctgtaaaatagttgttatgctgtatttttatttgtatatttatttatgttttaatattttggatccaaagttggttaaatccagggatgaagaactgtgatgatgggagggctcactctaactatattaaagaattagggtggaaagataaacttcctttcatggtccaaattacgaacaaaagttgaagcatcatcattaaaatttgcccccaaatgaaaaaggatgctagtggctggatagcactatcctccttccctcaatttattcctcaaagaaattaaaagggttagcaattaaaaggtttagaacatcccccgtggaaggtcacccgttcatcaggttgtgcccagggaaattaagtttctggcttgcatcacctcactcatctgggccactgggataactgaagcatctcacctctaggcaaagtgcagggccttaatggctagttaagccctggtcagtgctgaattccatatgactaatgagaccgcaaggcacctttggttgcgctctgccccagggtgtcctcaaatttgtctcactgcaataaaaaacaaaagtaaatctagctccagaagggggtatccctcattttggcaggcctaaaacagtagtagacagcagtgtagcagttatgcacactagatctgtgactcagataatcctgggatctaatcctggcaccatcaatcagacactgtgggaattggataaggtggttgtgagaattaaatgaaataatcttgtatatagcatataaccagtgcccaagaaacaatggtttttattactatcattattttgggaaacttgtccaaccaggatattttagatattgatgagtgcagggtgggaaaaaaggggaaaaaaaagtctacttaccaatcaataaaaggcagtttaaaggactggagctgtttgggcagataagtacattaatcccacctacagttagataaggggtcacgtggaagggtgattggacttgtttagtaaggccccagaggcggaggctgaaacagtgcagagggtagaggtcaaggagagacaaatttggattcatataaggaagcatttggggcagattagagcggttgggaaaaaacggcatgggctgcctcctgaaggggtcagtattccaatcttggttactcaggatcggaagaaatcttgatggaggagtcctggatgggattccagagattttgagtttctagacaacgcctcagaccgtagaagaacgtagcccgacctgcgaggccagcctcgtcctgccctcctccagttgtgcagctttcctgctgaaaagtcctaaaatttgaccgggggactgggaaccccgcccccaagctgccgcgcgctctgaaactccgttgctgtggagacggaggcggttgacccaaggattccgaacggtgttgggggaggggagccgacgtggttcaggaactgggcgtggcttcggttactgtggtagcggggacgcttaggcagggcctgcgcccagtttagaggccaatgcttctcccgtcctttgcatggcacccaagaaggagaaaggaggaactgtgaacaccagttctaagatatgggaaccctcgctcatagctgcacagttcaatcaggtgagccttgagccctttaagccctccctgcccccggcaatgccaga

SEQ ID NO: 2368 - DNA, 2300 bp, Homo sapien
gcatgcaatatgttgctttgtatcactaacttccaaagtggaagtgaagagagaataactggttcagtagttcccaaactcatttgaccaaagaacctatcttcataaagcagcattgtggctttctgagaaacacataaaggaagaaaaagatatggttttctgcctctttttaaacaaatggcatagtgtcccacctcaatcttatgccctcacttggagcccataatagtttttctgcaccaattgtccttaatgtgagaggtccatggatgagtcccagaaggtttgtgaatgccctgaaattgcatgcaaaattatattcactgatgtattcttgggagacaggccttcagatctgaggagaattcaagactccaaactaaggcaaattctctaccaaatccttcttcattactttggaacaatatgggcgaaggagaaagggaattattttcatgcccaggtaaatgggggcacataaacaaactcaagaacacaaatgtttatctaataaacatttattaattaaacatccccgggtcagtaacgatgtgggtgatgttcctaatttggtccagagtctttttctaggaagagtgtgaaattttcactttgtaaggactggtttggcatctagcattgcaatgagaattctagtttccaaggctctcaccctccaccattcctacgtcattccagctggctggcaagggcatagatggcaaatccattgcaggggctccagatgcctccaggcatcacagaagtgggtctcattgtacagaaaaaggatccaagataaaacgagcaagttcaaaagatcaagatgcattttcattgatcttggacttgtaagagcagtgccatcaatcacagtcatttaaaaattcctattaatggcccagagtgctggggttcccatatggtttgtctttataacatttggtcttgggcatctctttagaatcagcatgagaatctgtcagtgtcagattcagacctttgcctgcttcctcactcctggcagtagtggaagggagaaaaggaagaacatgtgcttaaatatgtgcttcgggacaatggagatttggggttcagctatggagccagaggactgacaataccttgcccccgggagaaagcaggggctaaaacaagattgacccaagtcaatgagaaagtcctaggacaggtcctggaaccatagtgaggaagcagcaagtctggaaaaaaattctgccccagctcctccatgcaagatattctggtggcaccaggggcagggctgaccctgatgtcccccagtggagaagcagtgggtatttgagggactgtgtatgtagaacaaatcaataggaactgagagagcaccaggaagcagggttgtaagggaaaaggccttccgaaaatccaggcttggctgggcgcggtggctcttgcctgtaattccagcactttgggaggccgaggcgggtagatcattaggttaggagtttgagaccagcctgatcaacatggtgaaaccctgtctctactaaaaatacaaaaattagccgggtgtagtggcacatgcctggaatcccagctactcaggaggctgaggcaggagaatcgcttgaacccgggaggcaaaggttgcagtgagccaagatcacaccattgaactccagcctaggcaacagagcaagactctgcctcaaaaaaaaaaaaaaaaggaacaaagaaaggaagaaagaaagaaagaaagaaagaaagaaagaaagaaagaaaggaaggaaggaaggaaggaaggaagaaagaaagaaagaaaaagaaagaaaatccaaccttgcattatctagtatgaaagccactagtgacatgtgacagttgaggacgtgaaatagtatgaatttgaaatgtgctatatgtgtgaaatacacatcagattcaaaggcttggtgtgaaaaaaattataaaatataccattaataattttatatggattacatgttaaaatgattttttaatttttagttgacaaataataattgtatatatttatgaggtagaatgcaatgttatgatacatgtatacaggggaggagccaagatggccgaataggaacagctccggtctacagctcccagcgtgagcgacgcagaagacgggtgatttctgcatttccatctgaggtaccgggttcatctcactagggagtgccagacagtgggcgcaggccagtgtgtgtgcgcaccgtgcgcgagccgaagcagggcgaggcattgcctcacctgggaagcgcaaggggtcaggg

SEQ ID NO: 2369 - DNA, 2300 bp, Homo sapien
tcttgggagttgtgatttggactgggtgcctctatttctcagggtccaggtcccatgtggtcctttagaactgagaagcaggaaagtaccagatccatggagatgtttcttctgagctatgagaaaattggcaaagtcgggaaaactgacttcctttgctaccaaacaatgtcttttttccagtgactttgtgggaaaatagtgtagaagatggtgttcaaaacgggttcatcaaaggcaatgtgaactgggagtatttggtggtgcttctgaaatggttgcagagaggcaaaggcccgtcatagaaatgcctcaaagtccagattcttagcaaggaaatggttaaccagtgagaggcttgggagggctctgcacatggctgcattttataggacaatatggaagatgtttttaataaggaacaaaatcctgaacaaatggccaagggattatatggtttgcatttgaaaggtgaaaggttgcagtaaaatgccttttctatagctagacatgtgagttcaggatgcatgtgtgcacacaggggtgcacggcatggagagagggaagaaaggaagacggctgtgagaatgttttccttgcgagggctgaagatttgatcattaaccacaacacttctctgccctccccactccatctttttgtccatttctatctctatttcatttccctggttatctgcccttctcttttcctcctttgagtctctgtttctttcccattacttctccattcatgtaatctctttgtttttctctcctttcccctgtctcaacttgtttcctgggcctctgtcccttctctgcctctgtctctgaattttcctctcttcctctttatctcagatatgtgtatcatagctccaagtggatggtggctggcaatgctgattcccctgtgcccccaagagtttatatacaccctgattctctagcttctggagacacctggatgagacaggtggtcagttttgacaaactcaagcttaccaacaatgagttggatgatcaaggacatgtgagtcaaagaatcctatctcccctttctttctctcttcctctgtttgctttagagctggctagccccagtctttttcaaataggtaaaataaggaatctctatgccactttaagtaattttaagtaagtaagcataaaagtgtttttttccagttaaattccatttattacaaatctaacatttagcaaacatctgttatacatcaagttgtgtttaccagacaaagtccttgtgctccagaggcttacagtctagtcgaggaggcaagagagcaaaacaagacaaatcaaccagtggtagaaaaaatcacaacattcagtagaataacccacaaggctataaaacaagagaaacaagtgaatgacagtttcagctaatttgtcaagaatttttttatagggaagactaaatcttaaggctttccaggtataattggagcgtgtgatgttattaatttatctttggcagtgaaacacatactgaattttcactgaatggcaggacccatactgggtgctatgggaagattgaataagctaaaaccattgcttccatcttcaaggaaataacaattttctgaaagagtgaaaacccatatctaccatttactctcacataacaaaataatgttcacatattcaataatgaatgcaaataataggatgtagaatttaaagacagcatgaatacatgctgaaaatttgaagctggagggaacaacttgtcacatggcagaggttctgaaaccttttagtgacatgtccattggtactaaagaagtcattcagcattatccaattgaagcaaacatattacttttaccatctatgataaggatgtcctgctatttggttccatgtaatgctatttaatcacttagttcttcctgggcaagtatactgatttctagttttctgtacatctcacctccaatctgtgcttttcctatagtgcttcaacttagtgatttatttttgcatgagaacaaaatgtaggttccttaaagccaagcctggtacaattcccctttttatttcagatcattctgcactctatgcacaaataccagcctcgagttcatgtgattcgcaaagacttcagcagtgacctttcacccactaagcctgttcctgttggggatggggtgaaaacgttcaactttcctgagactgtgttcaccacagttacggcctatcagaatcagcaggtaagaggtggcccttgagagtcttctgctacatctgttttttggtccttctgca

SEQ ID NO: 2370 - DNA, 2300 bp, Homo sapien
gggggacctgcagggggtaagtgggaggcagacatcttgcttggtctttgtcaatcagtttcaggccaaaaacagccctgaaatggagtcatttcagggtggatcgcctgtaggatgcactcagggcgaaaagttgaagcctgtagcagggaaacctaggtagtgcctagggaattagcctcataaactgcggaccccacccttacccataaaggttaaaagagagataagctggggtaatgaggagagacttttaaagcccgttgatgtaatcagtagaaggaaaatttgtatcacacttgcagattcttacatgtaatctcccaaagcctccctcaactgcacacgagtgtacacctaagcacacatattaagccatcctgcttactctttctccagattttccttcccatcagcagtcacccaccaaggagtgcatgcttctgggaaaaaccttacattaactcctatagagtcacgggagttttcactgctcctcccatttacttagaggaaaccccttattttcaagactgttaaaaaccatcctgctttcatttgggttcggttggttttagtggcctaacctacaattccaggatatgtgtgtctgtggaatgggggtgggagcagcctatgtgcaatctgaaggaggggtgtggaaactcttctggctgactcctgactctgcggagtgcaagcttcggagaggatgcagatgcatgctgttgaaaccattgctcattcctctatgtatgcctctcagatgctgcgtctttggacacacaggaacaatcgggcctctggacttgcaattatgttcctagataaccaaaaagtcctccttttttttttttttttcctttttttctatttttgagaagacaggttctcactctgtcaccgagtctggagtgtagtggtgcaatctcggctcacttcagcctggacctcctgggctcaggtgatcctcccctgtcagcctcctgagtagctgggactacaggcccacaccaccacacctggctaatttttgtattttttgtagaaatggggtttctccatgttgcccaggctaagtcctcctttttgagaaaattccatggtctcagagagggtgaggcatatggtgtacccgcttctcagtccaaaccaggcctgtgagaaactgtgaaaggcaaaaggctgccagagagagatgggagataccggctatggggatgagaaaagagctgggaaagtctagaggccggccccattgctaccccaccaagcttggtaggggcaggctccagccgcaggcggaaaacgccgggcgacaccagagttgggaggtgagagagaggccccagccgctggggaaggaaattgcgggttcccgtctgccttgtctccagcttctctgctgaagcccggtagcagtgaatgcgcgctgactttcagcgacgactcctggaagcaacgccaaatgctgactgaagtgggagatcctgcgcctctccatccgggctccccaagtcctctgggcagagctgcaggaggcggggaccagtaccctgcttccagctccccagagttcatgttcgtgctccctggggacctccaagcctgagacacaggctccggggaggtcaggcttggctgaatcacactcatccggtggcttttccattgttctttttgcattcgcctgggatgctagcttcctgacatcctggttggatcctaatttggggcgggggtgaaggaagggggcaaaagtagcctcttgtccaaagaggcccaaggtgaattcacaacactgtggttgccttcagcaccagaacacttccaactgtaataataaagactagatttccctgggcccctccgcagtccggcagagaattcggcgtttcagaggcctgacaagtcatcttttcttgccgcaaggtgggagagctgattctcccgggcctcgcgaaaacaacaacaagaaatcttaacaggctgtgggccccctaacctaaactttcaggtttggagacttctaagggcctggctgtcgtcacgactggcctgcttggcctctcagtctgtcccccgcccccgggacccagctctttccggcttctttgcaaaaggatagaaccgtctcgaccagggcactaggactggaagatcgggctgtgtctaggccgctgtccgcgaaatccgagacgttttttcagcttggctaggaccgacttcgctgccggtttgagctttctctgcactcgggggtctcctgccgtcctcgaccggtggcgtaacttgggaag

SEQ ID NO: 2371 - DNA, 2300 bp, Homo sapien
atgtggttgttcaaagtcattaccaagtctatccaaaggtaactctgattcaactgtacacagataaaaacaatgaacctaatttttaagtcaggaggaatcttggaaaatccttttattttccttttaataccctgaagcagggaggttaaagatgatgttccaaccattagtgagtggcagaccagggaggagagtaaactcaggattcccagagcctaacaggaagggaaaaatagcttcttgtctgtttattaatcagattactggcatttaccttccactgatgtaaatgttgtaatcgaggtagtctgaccatgcaggaaaggatccaacttaattgtgtgtgttcagacacctaaagaaataaaatagaacattagtaaaggtggccagtgttttcttgcatataagaagaactaagtagtaagtattaccctaaatgtctgaaaataccccaaattaaggttattataagaacaggtgaagggggcttagttctgattcatgaagcatagactcttaggtgaagaaaaaaatcatacaagctaactgatttggttattaatctagtgtttaagtctactccacaataccccaccagattctgcttcaacatcttcagtgagaaagtttcatgatgtcctgaggcatctgttctatctgtaaaaagccaagcttattaagaaggcacacacacactctctctctctctatcacacactcacatactcacacacactcacacactggttccaagcctctctaaataacttctaaatacatcaaagcagctatagtactttacatataagtggtggaaaaaggtactggacttaacattaaagattgaattctttagatatagggtaacttgaaagttagagatcactttatcattccatcaccccaaaaggtatttttatagtttctacttcctcctctccctcctctttttcatcttcctctcctccttttctgttttttttttttttttttttttttaagaagaagtctaatcagcaagaaaatataaactttccccaatttttttttttttttgagacagagtctcactctgtcgcccaggctgcagtgcagtggtgtgatctcagttcacagcaacctccgactcccaggttcaagcaattctctgcctcagcctcctgagtagctgggattacaagtacctgtcaccacatccggctaatttttttttttttttgtctttttaggaaagacagggtttcaccatcttgaccagacttgtcttgaactcctgacctcgtgatccacccaccccagcgtcccaaagtgctggagttacaggcgtgagccactgcgcccagccccaaatttgtttgtttcaaccaaatttaatcaagctaccaaacctgatgacctagaatttaaggcctatgcatcccgtttctttactctggggattacaagcccttcatcaactgtggctttttttttttttttcatccacatgatttccttaaaaagcagagactgctgccaactctgaaaagtggccccaaatgtgttctttgtgggttttgcaaaaagaacataaaggagtggagctgaatcagcccaggcctgttctactaacaaggaatcgccatctgttgtaagatagtttctcatttttttcctcaagttatagagagggaagagttgtttttcacgtgtttgataaggaatcacttttaaagttttgcaagtccctgggctgaatctgtcatctttcttccaagaggcatttgggtttcattcagggcagtgacattgacacactgtccatgcaaattgctaactgctgctgtaaacaaatagctatcagacaaaaacagaaactaaccctggatgtaggcaagaggactagagttgcttccaatcaccaaggaaaatacattcccattagaagtaataaaacaagagctgtttttctggcatgaagaagtaggagagaattttttttttcttctttactgaattggaagaaaggaatgaaaacacagataataaccatggatatgtggaaggagacaagatgacgcctctttaactctgattcaaatgcttagctttggtgatacgcaaaaagctaccactatgtctccacgaagctgagtattttccttggagtagctttttatttggacatatggaatgaaacttacttaatattctgcagagatcttcctggtgtttccaaaatggtgagcataaaattaattcaaattatcttcatacagaaaaagtaggtaaaaggtcaatggcaattaattttt

SEQ ID NO: 2372 - DNA, 2300 bp, Homo sapien
agtggccataaatttttagtagtccttttctaaggccattttaataacagcattgtgggacaagtatcttcctcagaatcctaaaatatcacaaatgatattaatgactaaagatctgtataaagatttatgatttcaaaacgtttttctggttattaaaaagtgtgtgtcttcaatttagacatgtgaaaaatatgtaatgctataaaaggaaacaaataacttttaacccactatttaggaaggccaaagcaaaataaaaaagttaaaaatgtttgttcccttccaggctttttttctatgtatacgtttatataaacacttatatataaacataacatcgtaataacactatgaacacaattttgtatcttttctcagtctttcaaaaaaccacattaatctttcaaaccatcattttcaatgactgaaattatatgtagatttatactttaaaaaaatactctcacatttaatacttattctactcaaagctaaattaaaggtttagaaacattcatcggtactggaaattctacatcttgaaacaatctagattaataattaactttaatagccctattcataaatgccactgaaacaatagtagaggtttaagaaattttttctttagcatttataatgacttagtgtcttaaacttccctgggcagtcattagcaggctgcagtttgtcttttttttctctctctctttgattctctattctcaagacatcttcaattctttagtttggaataaggggaagtttgggtctacggcttagctactttgatagcataggtgttaatgtgctataaattataaataatcatctcattctagttctgcagaatcaaaccctcaaatttcaaggagaggaatttttgataaatttatctaattttgaattgtcttacctaacattgctgctgaaatttaaggtgacatttgaatagttgtttgctgacaagcagctttccggtatatattaatatattagcttataagaattttgtgaggctcacattaataaaaaacggaagttcaaaaaatttatgacatgactagaaaaataagttgaacttaaattttggttttcataattactctcattggctttgttttggcttcataatcatggaactatagattttccagaggttgaaagaacattaacgtgtcaatcagtccagctctcttcctccactcaatatgagcaaaaaaagaagaaaagtcccagagagattgtgacttgtcacacagctgtcaagtggcagaccaaacccttgacctctaggctaccttcctgtctagcgctgttttcaacacaacagttacaataggtgcgacatcctcacacctactcattatggcaatacatatgcaaatgatgccgggaaattacctaataaaatcacattctctcctttctctctagttcccagaatatatctcccgtagataaagtatgtcaaagtgcttgccactgagactgtacttggaagacgtttggtaaaatcctgaataactgaaagggtatcccctccccctgacttttttgctatgagggtaaaattccaaatatttaagacaattcccaataagaccaggccgcgacatggtctccgtacgacgagattaatggtaacagcagtgttgtcaagcgcaggacaggacaaactctgtagcagcttgcggtcactctttcacagcctgctagatagagcagtgctgtggagccaccaggagcaaccagaatggaagatgcactgacacttgctcaagtaccacactgccaacctgctgccccgacccaagctgcccaatgcctaacaaaacttctctactctctccgatagccccttagcgtgttgttagggtaaggagggtaaaaacagtaataagaccacaagaagagcagtctctaaaacaacccgtctctgaaaacatcacacgcggggtaggctcaccgcgttgcccggcaacagcggcggcgctccgctcccagaactggaggtggcggcaagaggtcagaaagcggcgcgctttttccaccaagaaacctttacgtcatcacgtatccttgcaacgtcactacgctctgagcaggccgacagtcatagacgagtagaccttaggcgagggaaggcatgtactttccctaagaagcgggaggagagaaataaatagagggcagtgggatgagaagaacctcgcgggatgggaagccgcggagggaagggccgtctttggttacctggagagcgggagcagctgcggatcccttatgaagtgccc

SEQ ID NO: 2373 - DNA, 2300 bp, Homo sapien
tagaaatataaactatagtccttgtccaagaagcaaggctggctgagtgacacctgagagttaccaggtcaccgccacggtgcaaaacacagtttattacttctaacaaagtctaaaaattagcaaatattttcaattttaaaaatcaggatactaaagttataaaacttgtggtcttaaagtcccaccttttttagtgggactatgtcttggaaatacctcccacggaaatattattggtcataggagtctgcagatacgactaagaactacttcttgaagaaataaagtaggtacaccctttgacagcttttggtgcaccatagtcttattgctaggttttatcttgctatctagatgactaaagatgtcagaaagctaatcttgctaattgctagggtcatgtaatctcattaataaaatatatgtaaaacactgtactataatgctttgctctatgtatgagtaaaacatgtagggcatttattaaactgcattttacaaggcataacatatatcccccttcccctggcaaggtttgtttccagggtctcagtaatatcacattctttgggttctacaacacctcttggctcctttatttccatcatctggctactttcactccacaaactctatctgatggtctcaaggatttccttggtttcaattaccatctgtttggtagttcaaatctcttctgagctccagacccatgtatctatttaatgggcatcacattttggaagtactacaagcacctcaaatttaacagccaaaaccaaactgatcagctttgttgaagactataacttgatttcctagttttttttttgccttcatccctttcctgctcacttctaaattacaccaattatacttgaacttcaccagtactttgtatacctacaagattatcctatatggttttaatttactgttttgtcttaccctggtagatttcagctcctttataggcatctcttatctcctacctctccttggtaattttcagtagctggatgaattataaacaaaacacataaaggaattgtcatgaatttcttccagttatatttttactgaaacactcgttatctgtctgggagatttttaggtgaattaacagaagcagaaaaactgtattaaactttctcataaccccaaacaaaacaatttcttccatcaggtataaccttcctgcagccttccctagactaggttgaaacaccacagtcataaccactcctccttaaaacttgcggtgcttgcttctttaacacctattaagtgtacatcatttatttatccgctactctattagactgtacacaacttgaagacaagatatgtctttctctgtaccttcagtgcccagcacattacggtagggttcaacaaagtttacaggacgaatgaaataaggccacataagtccagtgcggtggcacatgcctgtaatcccagcactttaggaggccgaggcagatggcttggcttgagctcaggagtttgagagagcctgggcaacatggtgaaaccctgtctccaccaaaatacaaaaattagccgggcgtggtggcgcacccttgtggtcccagctactcaggaggctgaggcaggagaatagcttgagtctgggaggtggaggttgcagtgagccgagatcgcgccattgcactccagcctgggcgagagtgagaccttgtctcaaagaaaaaaaagggaaatgaggccacacatgtctaaaaagaccacttatattaccctctaagagaactgggagtttctaaacaaactttttaaaggttgccttcacatagctaagatcagaaatgcagcctacttgactttcttccagtctaaagcgttgctactaataacccccaaggaaattctccttccaggaaggctgagcagacaagggatccagggaaaaacactaaagccccaccccgctcctgtccccacctgctcggcaagaactgcagtccgcccgatagcggctgcgctgcgcagcctggaggcccaagccgcgcccagcaagcaggagtcgcgagactgggattggctctctgaacagacgtcattccaaacaagacggctccgcccttctcaagatggcgctgcactcaatgcggaaagcgcgtgagcgctggagcttcatccgggcacttcataagggatccgcagctgctcccgctctccaggtaaccaaagacggcccttccctccgcggcttcccatcccgcgaggttcttctcatcccactgccctctatttatttctctcctcccgct

SEQ ID NO: 2374 - DNA, 2300 bp, Homo sapien
aagtgttcatctttaaccctgatgggcttgagcacagactgcaaagtcctgggctcatcctgacttccagaattacctcaggaaaaatagatggctggattaggacaggaccacagtgatcaggaggacttagcatgtttttaatcccctccattaagaagaattttggcattctattctactgtgaaactacatttgctttctaagagactaggtcatgacagctcaagaatgacccgacatttctcttcatccaaaataagcaggcatattgctcaatgggtaccctatgaccacctgaataaaaccaatatcttttcataacctcatcctgaaacattctccaagcctgctggtgggtccaaagctggtctgtcttatccatggacccattctctggaattcaagaggtgctgcaaaaatgctgcctcaaatagctctgcctgtggccctatatcccctatttgagattagttcacttaggtgcaaacattagaggctgatattagagtgtgttaccttgtagagatgatgttctttaactcagtgcaatcatcagatttaaaaggtctccaagaaggtcattatttcaaacttgagaatctctcatgagaagctctactgttctttctatctactgccagcatcttttaagtattaactcacttacttctcattacagtgtgggaggtattatgaggaaactgaggcacagagaatttaagtaacatgtggatgttagtgagtgagtggctgcagtttggagcttgagcaccatgttccagtgtgtgctcatcaccaggcttccttctggaagggagagacagagtcggagtctggaaaacagcaagggagggtctggatcaggggactgtgagcaggccaggtgttgtgagagctgaccgaggacatggcctagaggctgattatggagattgtgaaaattgctatggaaaagaaatttccagaacccagattttggctacttttgaaagcatttttgaggtaatactgtcctctagtggctagatagcaggtagggattaccctccaaataaatagccaatgagccttgagtggagatggtatgacaagtcagtggtaaattcatcattttgctctctaactacaggttctaaaggaaaggcaaaccccactgctatggtcatcggtacagctcaggatttcggcctcctctgctccgtgtgttggctacaggctaggttcaaatcccaattctgctctttactgctgaaaggctttgggcatgttcgttaatctcattttctcttctgaaaaagagacaatcttgaaaagattgaccttccgtgaagatcaaatgaagtaatgcgtgtagtgtgtctggcacgtcgtaagcgcatcacacacgtgagctgtggcaatactaaggagcagtggcaagagctgggggaggagtggagacgaacagacctggacaaattagtgacctttctgggacccctacagaactcttctggagaaattaattctatttttccatgtacttttaagtttgcttttcctagcatttcttctacattcctgaataattttccactcaaaaatttcactggttctccctgactcccatattaatctagacataattacttccccagaacagttctgtgggcagggagggctctacactatgcaccctccaaaatccccaaagctcggaccgtcctggcctgggtccccactgctgtcctgcccatgggctcccaggctgtgcttgctcttctcccaccccaaccccatcaccacaaaaagcccctcctccaacccggggacttttgtaatttcctacctgaaatcatccactccctacctctaacaatctgtgatgagcagaggacaacatcaagtttgaatttagaggtagggaatgggtgatttcaggtaggaaattacaacttcactttgaagtttaattttgtaataaacttcacttaattttgaagtaaatttgcaaagtcagcaaaattctttcaaagtcaaccttgctctggcctagttgcttatttactgctaagctggatgttttcattaaaagattaactttgagacttcagcctcttctttagcctgaactgtgggtagtgatgtggtgtgtttcctaacacctccggcagtgagccaggctttgagtggctgcgtctaaacacttctttccctgaggactggaagacattagaataaggtttgtcattgagtgtgttctgtgtgcttggaactgagaagggtgatgaagtgccagataggatgggaatggaaga

SEQ ID NO: 2375 - DNA, 2300 bp, Homo sapien
tttgtcctactgctcactttcctaaagaaagcaaaatatttattggtttaaagaaagcttacagttattgcttccactcagactccaagagacactgcctgaactctaagagcctccagaactctcaacagctgaaggaacatttggtcccaccctgaaggtcatgggggtctgtaaggtgcactccagcatctgatatggcaggcaaaggtgtgtgatgcacctgggtggtttcagatagtgctccacaagtcccagggcccgtgtctagttctgagagcttcagaagacaagctgctacaccttgcatcacaggaccaacctttcctaggcaagtgggtttgaagcattggcagccaggttccaagtagaaggtgaatgtctacacacaggagaaaggcaagacccagaatggggagtcaagctaaatcatttgtagagtatgacttccaacaacttcagaaagcattcttttgaagtgcttatggcatttccaccaacatagaccataggctggaccataaaacaaatctcaatatatatcaaagaatcaaaatcatacagagtatatgctctggccacaataatatttaattagaaatacataacaataagaaaatccccagttttagaaaacatgcaacatgcttctcaataacacttgggtcaaagaagacatcacaagaaaaaattcaaaacgtcagtaactgaataatgataacccaatgcatcaaaatgttggatacagctaacatagtgtttagagagaaatttacaactttaaatgcctatggtggaaatgagcaaagaagtaaagtcaattatctatgcttttatcataagaaccctgaaaaagaagagtaaaataaacccaaagttaataaacatttaagccaataataaaaataatgaaaatcatgaaatagaaaaatgaacaaacaatagagacaatcagtggtcaatttttctgtactccatgaacaaaacttcagttcagaatgattttatatttaaatatatatccagaatcacaaagatcttagaagaaaaaattaggaaaatataggaataaagtgggaactctgtgggaataaaaatcagaaagtaattgcctaccaggtaaactcgggggagggcaggcaattgactaagaacaggcagataaaactttctggagtgaaggaaatggtggtcttcttttcgttggtacttacatggacatatataactgtcaaggttcattgacaatgaacacttaagtgtacactgaacgcttaagatctgggccttgtaatgcccagattacatctacttaaaaaaactacatctctatttttttaagtagagaaaagtgtcttggggagtttatggcagtgatgtttgggcagactggggcataggtttcagaagcattcatagcatcttcagttcaacaatttgctaagaatggttttgcagccaaaaatgtaagatgagtgcaaatatctatgattagagtcattgggcatacaactacaaatccccacacttgtattacaggccatatgattaattcgttatcactagatacctttccttcaatgaggttcttccattaggaacccagagctctccagggaaaaattgcaattgaggttttggatatattgggtggaaaagaaagtcacctcacataaaacttagtgattggagctgtcaccattgaaaatttctaaactttgcaagacagcagtgacgtttcaaatgacactctcagagagttgataatgggctaaaatagatctccctccaggtggatttactgtacaaggacaacatttacattgcacttggagacttctcccagtttggtttaagttcacagattgcagatcccagacagctggtatcaactgaccagtgttctgttaaggctaaagccaagactctttatcacactgtggccttaagattggatttctcttcctgttcctgggaagaattagagatataacctaaaggtcactattattctgagaaaagggattctggaggaggagggagcaatgagtatgtggcaggagttcaaggtaataagggctgagacacaagccacagagcataaagctccagtccttcctccagggatgaggcagtaaggacttggactcctctgtccagcttttaacaatctaagttacggttagagctttctccttttctttcaactactcctggcagttgtggggtcatggaatttttgtaaaaaatggggtggaggaaaataaggcatctgctgagtgtataaccattttacctct

SEQ ID NO: 2376 - DNA, 2300 bp, Homo sapien
tgctacatcttgtagcacaaggccaacctttcctaggcaagtggttttgaagcattggtagtgaggtccaaagtagaagatgaatgtctacaacatggaggagggcaagacccagagtggggtgtcaaactaaatcatttgtagagtattactttcaacaactgcagaaagcattcttttcaagtgcttatggcatgttcaccaatgtagaccatatgctggaccataaaacaaatctcactaaatattcaagaatcaaaatcatacagtgcatatgctctggccacagtagtatttaattagaaatccataacaatgagatatctagaaaatcctcacttttagaaaacaagcaacacacttctgaataacacttgggtcagagaagaaaccacaagacaaaactttaaatattattaactgaatgatgataacccaatacatcaaaatgttgggtacagctcacacagtgcttaaagagaaatttacaacttttaatgcctatagtggaaataggaaaggagtaaagaaaaacaattttctatgcttttattatcaggatcctgaaaaacggggctgggtgcagtggctcacgcctgtaatcccagcactttgggaggctgaggcgtgcagatcacaaagtcaggagtttgataccagctggtcaacatgatgaaaccccacctctactgaaaatacaaaaattagcccggtgcagtggcgggcacctgtaatcccagctacttcggaggctgaggtgggagaattgcttgaacccgggaggcagaggttgcagtgagctgagatggtgcccctgcacttcagcctgggtgacagagcaagactccatctcaaaaaaaaaaaaaaaaaatgtgaaaaacgagtgaaaaaaaaaaacaaaattaataaatgtaagccaataataaaaataatgaaaatcatgaaatagaaaaataaacaacagagacaatcaacggtcaatttttctgtactccctgcacaaaacttcatttcaaaataattttatatttaaatatatatccagaaccacagagatcttagaagaaaaaattagagaaatatagaaataaaatgagaactgtgggaataaaaatcaggaagtagttgcctatgaggtagattgggggaaggtcagggaattaacagggaacaggcagaaaacaactttctggagtgacggaaatggtctatatcttttttggggtgctacttacatgggcatatataactgtcaagttccactgaactgaacactgaagacctgggcattttaatgcatgtaaattatatttcaatttttttgagtaaagtgtcttgggaagcttatggcggtgatatttgggcagttctggggcataggcttcagaagcattcacagtatgtccagttcaagaatttgctgagaatcgttttgcagccaaaaatatggataagttcgaacacctatgataagagtcattggggcatacaaccacaaatccccactcttgtgatacaggccatatcattaagtggttatcaccagatagctttccttcaatgatgttgttcatctaggaacccagggctctccaggggcaaatgaccattgaggtttcagatatattgggtaggaaagaaagtcacctcacataaaactaagtgattggagctgtcaccattgcaaatttctaaattttgtaagacagcagcaacatttcaaatgatagtctgagagaggagataatgggcttacatggatttccctccagatggatttactgaacaagggcacaattcaaattgcacttgcagatttctcctggtctagtttaagttcacagattgtggatcccagacagctggtatcaactgactagtgtcctgttaaggctaaacccaagactctttgccacactgcagcattaggatgggacttctcttcctgttcctgggaagaattagagatgtaacccaaaggtcactatttttctgagataaggatcccataggaggagagagcaatgagtacatggccagagatcaaagtgataagggttgggccagaagccacagtgcataaagcttcagacttgccacaggaaatgaggtgagaagtacgtccactcttctgtccagcttttaacaatctaactaatggttagagatttttcattttctttcagctactcctgcagtggtggggacacagaatgtttgcaaaaaaaatggggtggaggaaaatgaggcatctgtgtgagtatataaccatttgacatctctttttagccctctccagg

SEQ ID NO: 2377 - DNA, 2300 bp, Homo sapien
aatgatttggtttgaaaccccactctaggtcttgccctcctcccatgttgtagacattcaccttctacttgggatctgactatcaacgcttcaaacgcacttgcctaggaaagattagccctgtgacccaggatgcagcagcttgttctctgaagctaagagaactagctgcaggccctggatcttgctgagacgtgtggagcactacctgaaaccactcaggtgcatcatgtgcctttacgtgctataacagatgctggagtgcaccttaacaatccccatcgccttcaggagagggtcactcattcccttagcagttgagagttctggaggctggtagatttcagccagtgtctcttggagtctctgagtgaaactaataaatgtaagcactaaagaaagcaagaaataaaacaaagagcaagactgattaggggtcaataaggccacactgctaacattcttttgtttttaaacagctttactgaggtataattgacatatcataacattcacctattttaagtgtacagtttaattatttttagtaaaattttagacttgtttgaccatcatcacaatcttgttttggaacatttctataattcctaagaaatccctcatgctcatcaataccaccccttattcccactccccagctccagacaacccctaattgacttactgacactacagatttgtcttttctggatatcataaaaatagagtcatacaacatgtggttttttgtatctgtcttctttcacttagattaatgtgcttttgtggttcacctgtgttgtagcacgtatcaatattttatttttttaggtgctaaattctattaaattgtatggatcactcccatttgtttattgtttcatcagctgatagatatttgatgtgtttctactttatggactattatggataaagctgctactaatattcacattcatgtgttgtgtggacataggtttttttcctttggagtagacaacaaggaatgaaagtgctaggtaatatggtaaatgtatcttcaacgttttaagaaactgccaaactgctttccaacatggctgcatgtcccatcaacaatgcatgagtatttcaatttttccacatcattgttatttcacttcctcaattgttattgtccttcatttttatcatagcattctagtgggtaagaagtggtgtgtcattgtagttttgatttgcatttccctgctgactgatgatactgaccatcttttcatgtgctttattagctattcctacaccttttggtgcaatggctattcaaatattttgcccaacttaaaattggcttatttatctttttgctatttagttgtcagtgtattttatattttggatacaaatcttttatcaaatgtatgacttgaaatttttttctcagtctctggattatatttccattatcttattgatgtcttttaaaatgcaaacagttttagttttgatcatgactcaatatttcaacttttttcttctaccaggaaacatcgggattttgtcgaactcaagttcatgagtatgttaatctatgttttctcctaagaggtgtataatttggcctttaaatttaggcctataatccattttgaggaaattattgcttatgtgttagttaacggccaaaatcatagggtcaattgattttcacaaaagtaattcattggagcaaaaggatagtcttttaaacaagtaatactgagacaactgaattgtccacatgatgctcggggaaggtcagcatgctatgtcaagtgatgcccatctgagtcaccacctattggtaccagatttcgcaaagaatttctcaatatgataattatgggttaaataatatgctgtagatttctgcttctcccgttcgacagacagccacattttcttgtgcagcgccagtggcattcccaaggcaccacagtgaaggtgaagcctggagtcaattggtttggctatattgggtgcctggcctccagggctgcttttaactctgttaaagtggatactgttgccatcaatgaccccatcattgacctcgactacgtggtctacatgttccagtatgattccatccatggcaaattccatgacaccgtcaaagctgaaaacgggaagcttgtcatgaatacaaatttaaccaccattttccaaaagctagatcccaccaaaatcaaatagggtgatgctggccttgagtacatcatagagtccaccgacatcttcaccaccatagagaaggctggggctcgcttgcaggagggatc

SEQ ID NO: 2378 - DNA, 2300 bp, Homo sapien
gctcctgtcacaaggcagctccagcctgtcatggccaatccaaagtagcagacaacacactccaggaaacagaagatgctggggagcagatctgattctagggtgaccctggagagggctaaaaaaagagatcaaatggttatatactcacacagatgtcttattttcctctaccccattttttttgcaaaaattccatgtctccaccattgccaggagtagctgaaagaaaatgaagaagctcttactgttagattgttaaagctggacaaaagagtcagggtgcttgtcacttcatcccctaagggagccctgggcctttatgctccgtggcttctgacttgccccttatccccttgaactcctgccacatactcatttctcctgcctcctccagcatcccttttctcagaagaatagtgacctttagtctatatctctaattcttcccaggaacaggaagagaagtccaattctaaggcagcaatgcagtaaagagtcttaggtttagccttaacaggacactggtcagttgataccagatatcggggatccgcaatctgtgatcttaaactaggctgagagaaatctccaagtgtaatgtgaactttgcttttgtgcagtaaatatgtttggaaggaaatccacattagctcgttatctcctctctctgagtgtcatttgaaatgttgctgctgtcttgcaaagtttagaaatttgcaatggtgacagctccaatcactaagttttacggaggtgacttacttacctattcaatatatccaaaacctcaattgcaattttcccccagagagctctgggttcctagatgaagaacaccattgaaggaaagctatctagtgttaaccatttaatgatatggcctgtaccacaggagtggggatttgtggttgtatgctccaatgactcttatcatagatgtttgaacttttcccatatttttgggtacaaaaccattctcagcaaatttctgaagatgctgtgaatgctccttgagcgtatacctgagaactgcccaaatttcaccaccataagctctccaagatactttcctctacttaaaaaaatcgaggccaggcgcagtggctcatgcctgtaatcccagcactttgggaggccgaggcaggcagatcatgaattcaggagatcaacaccaccctggctaacacggtgaaaccccatctctactaaaaatacaaaaacttagctgggcctggtggtgggcgcctgtagtcccagctactcaggaggctgaggcaggagaatggcgtgaaccctggaggcggagcttgcagtgagctgagattgcgccactgcactccagcctgggcgacacagtgagactccgtctcaaaaaagaaaaaaaaaaaaaatccaggtgtaatcaggtgtaatttatattcactaaaatgcccagagctcgtgtttagtttgatgaaccttgacagttatgtatgcccatgtaagtagcacccaaaaaatgtattggtcatttccttcactgcagaaagttcttttctgcctgttcttagttaattccctcccctgcccccaatttaccctggtaggcagctactttctgatttttattcccacagaattttcattttattcctatattttcttaatttattcttctaagatctctgtggttctggatatatatttaaatataaaatcattctgaactgaagttttgttcatggagtacagaaggattgaccattgattgtctctattgtttgttcatttttctatttcatgattttctttgtttttattatcagcttatgtttattaacttgggggttgttttactcctttttttcagggttcttattataaaagcatatataattgactttagtcctttgctcatttccactacaggcatttaaagttgtaagtttctctctaagcactgtgtcagctgcagccaacattttgatgcatcgggttatcatcactcagttaatgatgttttgaattttttcttgtgagttcgtctttgacccaagtgaccgataccaacagagtatgtagcttgttttctgaaattgggaatcttctagatatcttattgttttgaatttctaattaaatactactgtggccatagcatatactctgtatgattttgatccttgtgtatatattgagacttgttttatggtgcagcaaaaggtctgtgttggtgaacatcccataaacacttgaaacgaatgctttctgcagttgttggaagtaatattctacaaatgatttgctttgaaacccca

SEQ ID NO: 2379 - DNA, 2300 bp, Homo sapien
gggcccccgctggcccggcccccgcgcgaaaagcccttccgctgcggggagtgcggcaagggcttcagccgcaacacctacctgaccaaccacctgcgcctgcacacgggcgagcggcccaacctgtgcgccgactgcggcaagagcttcagctggcgcgccgacctgctcaagcaccggcgcctgcacacgggcgagaagccctacccgtgccccgagtgcggcgaggccttcagcctcagctcgcatctgttgagccaccggcgcgcgcacgcggcggccagcggcgcgggggcggcggcgctgcggcccttcgcctgcggggagtgcggcaagggcttcgtgcgccgttcgcacctggccaaccaccagcgcatccacacgggcgagaagccgcacggctgtggcgagtgcggcaagcgcttcagctggcgctcggacttggtgaagcaccagcgcgtgcacacgggcgagaagccctacatgtgctccgagtgcggcgagaccttcagcgtcagctcgcacctcttcacgcacaagcgcacgcactcgggtgagcggccctacgtgtgccgcgagtgcgggaagggcttcgggcgtaactcgcacctggtgaaccacctgcgcgtgcacaccggcgagaagcccttccgctgtggccagtgcgagaagcgcttcagcgacttctccacgctcacgcagcaccagcgcacgcacacgggcgagaagccctacacgtgcatcgagtgcggcaagagctttatccagagctcccacctgatccgccaccgccgcatccacacgggcaacaagccgcacaagtgtgcgggctgcggcaaaggcttccgctataaaacgcacctcgcgcagcaccagaagctgcacctgtgttaggggctgggtccgcgggaggctgccgtctggggagcctgtggggggtagatatcctgggactgacccaggggaaggaagtggggaaggggcgggagggacaatctgagagtgactggggagcctttggtgtttggggtttcctgaagtgggaggagtgttgagtaagttggtctttcccggtgctatacttgcctcctctccacggaagaattgttcaggagatgcgcttggggtgatgacttccttaaatacacgctgtagggggtgaagagcttggaggaccaggcactttgaggaagggcagttcgtgggctggggtgggaacaggatggcgggcaatagactagggtaggccgcgatggcctgtagaaggttgcggggagagggtttaaatgagggttatggggcgaaataaaaccaagtataagtgattctatcttggtcccaccaagagtttgcccgatctccacacatcacctgttgtctcacaaaaagtaggggaaccttgtcagtcacataggacaggatatttaatgtacttttcctttctctgagccacagttagctgctattttgaggcatccaaggggaagtgggctgaaaaacgccacactcatttcaaggggcaatgtctggggtttagaaattcatttataactggttctctgatgtgggaaatcctgattctgtcccgggttctttgctacttccttgaaaatactctagcttcatgctgggtcaaggtggtttacctggatgacccccctcccccgccctcgcccatcccaggtgtgtgccacacccagtatttctttcaggtctcaactgtggtgttttaagtgcagggaaaaggaacaatcacagctatgtgtgactttccttttcccacctcaccttgatgtaggtgtttcaagtgaactttagaccaacagttgcccagtgacctgctaaaaagtcaactagctcagagttttgctggcctttatgtgagaaatccaagaaagtgttcacttttttgggatgcgagactccttggtctcatttgccttcactttgcatttgttagtgacctccactaacccccacttccatgcatattgacgagggatctagtctaagtaagaatgtcttttgcctgcgcgtggaggcacagtagaaatctcaaggctttacccagaagagcccagtcagggagaggtgtaaatgcaaaattgccaaatagcacaaacaatgaatgttttctggttgttatatagatgccaaaatagcactttgatatttgcaaagtgctttatgctttttaataattgttagctgtttctcacatcattgtgagttagatcagtattatgaccgctgtcttagggaaggcctgggaacaggagtgtgcaggctgtcctgaagag

SEQ ID NO: 2380 - DNA, 2300 bp, Homo sapien
aaataggaggtatccagatgtttacagttacgtcctcatctccctttgcagataagtcatctcactggtaagtgacctgcctaggttcatgtggctaattcccaaagtgcccatggcctctgctaaatgccttactcttactgacctgaaagagtgaatgctgggcctccacccacctccttgtttctgtctttgggcattcattactttatcctgctcagtgcatgctctggggacagaaatgagctaaaatactttatggccaggactgagaggttacattccttcccctgtgacacagtcccagactccctgctgccctcctccgcagtgcacagaagcatgtgcaggagggcacatgtgaggcctttcacatctcagcaacttccctctgcttggggatacgcagccagagaccaacaggtgtgtgtcctggatcagcctctaacctgggctcaccagctctaggctctgtaatctctttctctattccccactactatccccctccccccacccatagcaaagtcctgaaggtgagttcagttttttgttccatcataagctgtttcagactgaccaaatgtactttaaaaattagtcctgagggctgggcgcagtggctcatgcctgtaatcccagctctttgggagccgaggtgggcagaaaacgaggtcaggagatcgagaccagcccgaccaacatggtgaaaccccatgtctactaaaaatacaagttagctgggcgtggtggcatgagcctgtaatcccagctactcaggaggctgagacaggagaatcgcttgaacccaggaggcggaggttgcagtgagccaagattgcgccactgcactccagcctggacgacagagcaagactctgtctcaaaaataaaaagagaaaaagaaaaaattagtccagggcctggttaggccaagtggtctttctcaggttggcagactgttcttgtcttttgagactagaatcttaaaaggcattggtagctcttggagtgagtaaaccttttctcctgagatcttacgtagtgtcccacctggcacagacttgaatatcctgaacacaggcagtcaggccttcagatggctctgctaggcagtgcctcgggtccagctaggggggcctgggcccgaggaggctgcctgaagaactggtgggcagagggggcaatgagtgcactctcctttaggcctttccctggaggatccagttgagagaggctaaactctcagggggtcttggaggggcagggatccagagtgcctgagggaggggatcacagttttattactgaggtttcctctgggcttatcttttgaatgccaagtatagtaatcccccactgccacctttttctgttgcagaggggcagctgagtgaggaagaaggcgtttctgtccgtggggaagaggatgaccaatccggtgtagctgacatggcgatgttcccaggactgtctgagtctgacagcatatcccggagcctccgggaggacgacgacgagagtgctggggagaaccggctggaggaggaagaggagcagccggcccctcccgtacttccctggaggcgacatctctccctggggagtcggcaccgaggtgacaagcccgcccaccgccgcttccaccggctccaccaccccatggccgtggacctcggggagctggatagcctggtggccagcatcatggacgcgcccaccatctgccccgactgcggggagagcttcagtcctggcgccgccttcctgcagcaccagcgcattcaccgcctggctgaggccgctgccgccgccagcctggagcccttcggcctggcgggcgagtgcgacgcgatggtgggcatgatgggggtgggtgtggcggggggcttcggggccgggcccccgctggcccggcccccgcgcgaaaagcccttccgctgcggggagtgcggcaagggcttcagccgcaacacctacctgaccaaccacctgcgcctgcacacgggcgagcggcccaacctgtgcgccgactgcggcaagagcttcagctggcgcgccgacctgctcaagcaccggcgcctgcacacgggcgagaagccctacccgtgccccgagtgcggcgaggccttcagcctcagctcgcatctgttgagccaccggcgcgcgcacgcggcggccagcggcgcgggggcggcggcgctgcggcccttcgcctgcggggagtgcggcaagggcttcgtgcgccgttcgcacctggccaaccaccagcgcatccacacgggcgagaagccgcacgg

SEQ ID NO: 2381 - DNA, 2300 bp, Homo sapien
ctgagcctctgtgatgtggaaggcatggtgctaggcactactgggggtatacaaaatcgtgtctctgatttaaggaaatgagagttcatggggaacaagacatgaaaagttcataaatatattgcttaaggcactgtgagataacttgaagttaattctatagaaatttaaaaggagggaacatttctgacttatgtaacaattatcacacaccctccttttcacttggaaatggactcttaatctgttaattattttcttaacggtttagaagtgtcttttattgtgtggcttggatctgtttaaaaagtaggtgggtcataaataataaataaagaaaacaggtgatcaggcttaggaggccctctgggttgtgcgttcagacagtatccaagaagtttgacttggtgtgaaagggtgggattacatgttaatgatagcagggtttagattctacactgaaaggaagcagttagtgagccctgggaggagttgaaggaaagcagttacaaaaatggatgcttcccaagaccctccattaagcctcctgggataggtcccctgtctgtccctagactccagggtactgctgggcacttcaagagagacagagaatttgaatactcatgagtcttggaatgtaggaataacaattcatccgaacaagcaaacatgatagacaatttttttttttacccactgaggacattgtgtctaaaaatctgatttgtgcccaggaattatctgtatagaattttcattactttatagaattgatattgcatagttctgtaggataaggatctagcacttgagttatgaatagctcaggatgacataacacacaatggttagttggactggatatgtccataaagctgaattctaattcaactatgagcatctctgattctgcttctgattctaggtgactttaatcccaaattgaattttctgacatttctgtaaaatggggcatgagagagcacgtcggttatggggtttaaatataaaagagttaagagctgagaagtgcctccttggtcaattaaaccacactgacatcccgttttccttttcttctttttcataattagagaggaagtggagggaaaggaaataaataactttaacaaagtatgcctagtttaaatgcaccaggtccccgctcttttataaactcataattctcattgcatcactaatttgaaattaatcacagctccttggtgtctcagaaagcttcctattgcttttcactacgtaactttccaagtctgtgtgtttggtactctaggatgttaggccaccagaggaaagaggatgtatcttttttttttttatactttaagttttagggtacatgtgcacaatgcgcaggttagttacatatgtatacatgtgccatgctggtgtgctgcacccattaactcgtcatttagcattaggtatatctcctaatgctatccctccccccctccccccaccccacaacagtccccagagtgtgatgttccccttcctgtgtccatgtgttctcattgttcaattcccacctatgagtgagaatatgcggtgtttggttttttgttcttgcgatagtttactgagaatgatgatttccaatttcatccatgtccctacaaaggacatgaactcatcattttttatggctgcatagtattccatggtgtatatgtgccatattttcttaatccagtctatcattgttggacattttctttttgatagtcgaattcccttcaacgtctagcacagtgccttgcacatttacccactcaaaaaaaatttcgtaaggaattaataaatgaatccttaggaggaaaagtgaaaatgaagtttttctctcaggatgaggtgtatttctccgttcatttcagatatgcatcagctagtcagcgtaaattgtgctttttatatgctcaccaggtgtaggtaagagctttggctgagatggagaaattcatcgcgggaggataataaagcgggcagggatttggcaacctcagagccgcgaggaggaggcggagtcgcggagagtttgagtatttccgtccaatcaaaaggagactgtaagaggaggaggaggaggagatgactggggagcgggagctggagaatactgcccagttactctagcgcgccaggccgaaccgcagcttcttggcttaggtacttctactcacagcggccgattccgaggccaactccagcaatggcttttgcaaatctgcggaaagtgctcatcagtgacagcctggacccttgctgccggaaga

SEQ ID NO: 2382 - DNA, 2300 bp, Homo sapien
taaaaattctttaattcatctggatttttaaaaatctgaagtgaggtagcaatctattatttttcttcttgaattttcataacattatttcttgtttagttcttcctttccgcatcaatttgagttctgctttttattttctaaattctcacatattctgtttgtctagtgtctatttagttctgttgactgatttgtcaatttctgaacgtttttcctgctttttttcaacttcttttaataagatttttgaaaatccttgagcactcttagaagtagaccttatgcctccttatcacagtcaaaggaagggatttctgatgagcaattttcaggcatgtgaagtgttaaagttatttgggaaagagggtgaaggtgtgaggatgggggactgatgagggtggtttctaccggcctctcatcactgaattcatttattcaatggaagtgtataaaacacttcattgtgaagtatcaactgtgagcttgcctacaggccacaggcaacttgctcttctcgacagaggcatttgtgcctatttctattatcccccagtaggcaggctggctgggaggagcaggtcaccagaagatccagggacctttgttagggagcttctgccatcttggagaagccacaggatttctggcaatgtctctcctggtttaggtgtctaaatgctgtatttggaaggtagttggaactcaacagatttggacttgattccagcttctgccatatcctagctatgtgacttcagcaagttctctaaattctttaagtgtcagtttgcttgtctgtactatagggataattgtaatatctgtcttaggattgttgtgaagcacagtgctggatgtaaagtacttgctcaaaaaatggtagctattgttactagtaaatctctccaagggattttacagtttggtttttgcacctaactggccatggccttggctctggccctatcttcttgacatcttggcaggtctaccaactcttcttcagttacagtctcagagttagccagtggcaatgactttccagttcttggctggtttttgatctgtaagagtgaccttgggcaggttacctctcaaagcctctgtttctttatctggaaactggggatgattataccccttctccttggagttgtgaagagaataatgtaaagcaactggtgtaatgcctagtacccagcaggtgctcaataaatggtttatgtgctggtgaggctggtactatggatatatggtatagagtagataaagttttaatataaaatccctgcattaggcatagaaaatataactaaggagaccaaaactgcaggtctaagagaggacaactagatatgaaacatattatattggtgatcacaacaaaaatggtggggtgtagggagagtgacagttcagggttgttggcaaatgtttcctggaagataactttattgcaccttgaaaagtcagtaaagtgtgtccaggcagggaaatccttttctttggagcctgtgtggtggacttgaatgtggaaaagatgccagtatcctgtttctgcctggcttggctgatatttaactaggctgctatggggggaaatcagaatacctccaggtgctcacctggtgttggcctcagcactggggcagtcagcactgaggtggcttctgtttgattcctctaagccctgggtgcccatgtgacttgtatacacccaggtcataatcagtttagcataatgccagatacgtacatagcgggcatccgataaaatgaaggaagaaaagtacaggggaggggaagggaaagtaggcaggcttaactttgttgggcttcagtttttcctctgtaaaatggagttggaccagatgctggtgaacatttcttcaaatctcccactctgacgttctgcttcagaacctcagacataaaaggatttggagtgtcttccaggccgcctgcatgtttctctctgctggtaggcacagcccccaagcagtgaggatgtgtgatgcataaacacctccagaggaatcgttctactattgctcttgaacaattcttccagtgtttagaagctcttaaggcttaaatattctatgctgcagcctaagcatcattcctcttctcttcttagtggagataaaattacccactgctctccttacatttactttgtccatatttgctcctatgctctaggctcgtgcacaacaaacacagtgtgggcccttaccctagaagccaacttctcatgacctttctctatctccagaatccatgcagtgggaatg

SEQ ID NO: 2383 - DNA, 2300 bp, Homo sapien
tcatctgcagataaatgagatactctctgtgaaagaaggaagctgagtcagtgcttcgctcacccctgaggaagatgctcacctgctcctctccccaaccccctccctccagccccagtcacctgtctgtggagggggccaggttcagcctgcagggtccttcctcctgccagcccccaggttgttcttggctcctgagcatggagtagacgtcagtcaggctggaccttgtgatctctattggtgttcccttcctctccccactccatatgagaaaaaaaaatacatctggattagagatgaacagggccattgttctggccggcctcagggccagcagacgaagaagacttgtgacaacgatggcagggatcccatctcctcgcctggacactttctcctccccaccagaaatgagtaggttacagccgaggggagcagcagtgtctgaaaaagaccaccagcgttctgagctggaggttcttatagggcgtgggagaggcagcatctttccccaaaacctgcctgatggttggtgtggggccacttggctttccttattccacaaggctaatgatgaaaaaagggatccagaggcttcaccttaatcataaccattttagcttctgccctagaattactgaatttgaagtcctctttcctattacgttcttttttattttgttttatttttttttttttttctgagacatcttgttctgtcacccaggctggagtgcagtggcacaatcttggctcactgcagcctcaacctcctaggcccaagtgatcctcctgcctcagccttctgggtggcacaggtgcatgccaccaaacttggctagttttttaaattttttgtaggggggggggtctgactatgtttctccagctagtctctgactcctggggtcaaatgatcctcctgcctcagcctcccaaagtgctgggattataggtgtgagcaatggcacccatctttcccattatattctaaagtatctatactgtatccctaatttcaaaagtaatttatgaataatgtagtagaaaacttgaaagcacaggaaagcaaaaaggagaaaaataattccactacccagagacaaccgctgttaaagtactatgctgtgtattctttgtttttgtctaatcctgggctcactctttacattctgtctcggggttaagggggatttctcttcaaataattcccagtgattgaatgtgagagtgagagatggctgcaatcatctgcccagctcctttatttagggttgaggacccaggtccaggggaactgacctgtacctttccacacagtgggcagtgactgggggaggacacaggtcaggcttcctgatttagagggcatgcagtcttgctcccactctgggtcctgccttgtacccctgttgtcctcctccttcgcttctgctcactctgttttagtacctgatgcacctgtttcctggactggaccctccagctgcagctgccatttctccttctccctttcctggctgtccgctccctacatgactgccctccctccctcaggactccctgctttctaaggacttccaagctccaccttgtccagacctatatgagctattgttgcatctgtgtgtgatcacagcatggaggcagacgcaccttcttttgagctctggctgtgcccctcctcattgtggaagccctgcttccctcagctctcaagcagacaagaacagtcccagcatcattgtgtggtcatgagaattaattaagctgatcatggtacttagtatatggtaaatagtacttagtatgtggaacatggtacttagtgtatggtaaattaactggagaattaattaagctgagcatggtagttagtatatggtaaatgctcaaaaaatgtttgccattcttaataataacaatactaataattaagaatgacacttcctccctctctcttgcttccaaccagactatagggtatgaccccatcatttccccagaggtctcggcctcctttggtgttcagcagctgcccctggaggagatctggcctctctgtgatttcatcactgtgcacactcctctcctgccctccacgacaggtaggtgtgtccttacattgtggattggtcacagaagccacagaccagttaacaaatgggccctccatctgggccttccccagacagtggtaaccagctgtggggagaggtccacctgggtcctgcagaggctggtgttttgttagacacccctacgttggataggggagggtgagccagctagaagtg

SEQ ID NO: 2384 - DNA, 2300 bp, Homo sapien
ttcagccctgggagctgaagataagggaaatctgcttgagtcagcactctccggagcaggtgggcgggagcctcccgtctccagccttgatagcagaggccttggcagcagagagcccggctcaggcctgttatatcgtagtcttgctgcagagattgtggcccttcccaggcccagcctctagagaaaggctcctttgttctccacatgccgtgggagtgaaggagtgctgcttgggtgccagctggacgcagccgcagcaggtggggatgtggttggggacggccatgtagaaatttgcaccctgtaagctccccagaccctgccttgacagcctgccctacctactcccaaatgagccctctgtgctggctgacccccttgctttccccaaatcaaggcataagacccccacttcttgtctttgcttccatcaagcccttcctggcatgtgcgtctcctacgagcttaacctgacttacacttcaagtcctgtctcattcattcagtctgtggatattccttaagtttcactgggtaccagacattgtcatagctcttgggagacacgggtgcatgagggaggcatagctctccttccaggggcttgctgcctccttctgaagtcttgcttggcctttccagccccttctcaattctgagaaccatgttctttcttgttattaaggttcagttccatggggtgtttttttttttccctaatctttctacttaacctaagttctaagttccctgaggacaaaaaaacatgacttaagcctctctgcagcttgtgtgggtgggcccaggccatggagtcaaagggtcaggaaaatgggctgggtgttcttggttgtcctggctgaccctcagctgggtgattttcgctggtgaggacagcactgtggcaggagagacggggattttggttctgccctcccacctctggattgagagcccagccctccaggcctctctgccccctccatcctgaggaaagaagggtgcctcctgctgcccagcagccccacacagtccatggaagtcagcagggctatgaccagcagcatgcgaggaggtcagcagagactctgacctgtctgcatcctctgtcctctatgctgtgtgggctcctcagggcagagcacacttcactcatcttgcacctggtcggcctctgagcaggttcgttcctcccaggagatgctgctcgtttcccaggctgaggtttgagctcatcaccattgccagccaatctgggcttcagggttttaccctttcagccttctcagaaagcagctgtctgccttccccatcgcagccttgcaatttattgccattaccattaggtagcagtgacattccagagcttttcctgaaagggactcctgaatataagctctggcagagcgagggggtgggggagggagggggaccttgcagagagatggggaggagggggtgagaggtgtatgggctctgccctgctgggtgtatctgctgcaggacacagagttccatcaaatggaccacacagtgtccccatcttaggaggtgaaacctcttggtcaaaataactacccttagcaaattgaactgttcacccacatcagcaaatagtcttagagtagccatttggaaaaagagacatttttgtcacataagaaatatattttcctaattcttccctgcattttccccagttcaattctgttctaacctcagacacagaataacattagggtcaggttggtgtcccaaagtgcctgactcctccctggaattctcccacctgtccaccagggaagactgagaatcctccttttacttgggagccctgtgatggacacctccccgggcttgggctctgcaggcccacacagaggacagagagatgtgccgaggtgcctgcgttatgggccctcttagttggactttcctctgctgctgcaggccctcagccccggcagtggcagcatggtgctccagatctcctcccagcagctagctgctccaccccaccacccttcttgtctgtgactccttggagaggatccaggagccatgcagcaagaagcctgcagacctgtcacctcccacactggagaggctcccgtgaagcccggcctcagcagtcatttcccataccatgattctttctctgtttaaaaaaaaaaaaattcttccaatgatatctttatgaaaacagaaagagaagcatctgtgtttccttctaattacatcttgtagctgcctgtttgatttgcatctttctaagatggttgactttacaagttatc

SEQ ID NO: 2385 - DNA, 2300 bp, Homo sapien
tgggagagcaaatggactgggaaaaggtagtagagttaccaggccatggtgagggtccacttgagatgtatgtttgtaaatttaaagctaacaagttagtacaaagttgtgtttttcttcatctatgtttagctgctcagatgcaggcgcagagtagattaagagttgggtttaaccaaaattgaaggtttgctaggccagtccgacagagagcacaaattgcaaagtgtgtgcaagggattgcttatggtgaggcaccatggttaatctgatctggataaggagagaaaagaggtgatgaggtgtaacaaatgctaaaaacatagaggagtcagtggtggtctcagtgggagaaaaaggtgtgagggtactttaaacaggagcagggaatatagaggtggttggaaattggaatgcatgaaactaaaatgttggaggtggcatagacactgtaataacaaagtccacattatgactgtggagtgggaggctaaagtcatgtccatgaacacggacatggctgtgggagcttcagtgagaggctagggcaggtgaattatcttatgtggagattgacatctcacatccattgagatgactgatggtggagaggaaagtagtgatctatgtgcttaaattttatcaatgagggacagtggaacatgacagttagttgactgcaagaataagggcactgggtggcacagactgtagcatgtgctttaagacagcaggggttttgagaggaggaagaggagaaataccctggaagagatagtatgaagcaaagaggacacaggccttgttgtaagcatttaaagtgcattggattgacaagaagcaacaggtatttcagagaagagattggaaatgaagaatttcactgacgacagaactttgcaaaaggctgagtgtaagagcaggaggtgacacagcaaggtaggagattgagttagaacaccaacacaccaagatatatggagataagaatttaaagataagatggaagacctagatatcctggactgctgggggcacctagacattctctgtctgtaggaacatgaagtcaactatatcctcctaaagcaggaaccactccagctcttttctgtgttccctacacactcatattagacagggggttggtgatggggatgactgaatgaactaaggagtgaatgcatgactcacaaaaggtagaggaagattggtgctgtgggaggagtggagggagacattcatttggaaaatcagatggcaggagcctttttattgagtagtagaagagcaaagcagaaggaccagaatctggagtcaaaagacatggttgagttctcattctgcaacttcctagctgcaggtctttgggaaaatgactcctttatacataactctgacctcatctataaagtaaacctttcctccttaggagattgagcttcaaactgtcacctctttgaggctcctgtccctttactacaacactaatttcatcccacttggaaattgtgtagagctgtacaagtaaaagggtggacaataaacaggagaaatatagtaggttccacatactctaacgcccagcccttggcctatgtgccaacactcactcccaactccttgaaaagctactattaaaagagtttccctttggtttagaaagatgtttcttataatgcatagcacattaaaataataacaactaacaccacagagaggagtgtggaacacccagtgagagtaatacagataaggagccagggtctaaaacaagacacatagggttaccttgggatgtgatacaacaaggaacatcataacctcctgcttaggtagctgggcagaatcaaggctgccacagagcctgatggagtaggaggaacaatgcccagccattcccacacatgctcaggagcagggcagctatgtacatgttggagagatgctgtttgtctttgactcgcccgtgttctgagtgagccctttgacccagttttagaagcagactgagccacggtgagcagaggcggggcttagggaggcaggagtcttggggctttataaagtcctgccgggcaccactgggcatctctttcaaggtttctgctgggtttctgaactgctgggtttctgcttgctcctctggagatgcagcgtctgttgactccagtgaagcgcattctgcaactgacaagagcggtgcaggaaacctccctcacacctgctcgcctgctcccagtagcccaccaaaggtgagtcactttctgagaagcaccttgtaactagtaaaagatagt

SEQ ID NO: 2386 - DNA, 2300 bp, Homo sapien
cagaattccaggttgaaagttgttttcctttgcactttaaagctagtgttccatactaccgagccataaaaaggaatgaaataatggcattcacagcaacctggatggaattggagactattattctaagtgaagtaactcaggaatggaaaaccaaacactgatgttttcagtcatatgtgggagttatgaggatgcaaaggcacaagaacgatccactggactttggggactcgggcgaaagggtggggggtggcaggagataaaaggctacacgttgggtatagtatacaccgcttggatgatgggtgccccaaaatctcagaaatcaccgctaaagaacttatcatgtaaccaaacaccacctgttccccaaaaacctattgaaattaaaaataataaataaataaataaagctactattcgaaagctgcctggcttccactttatctctccattatggtgccatccccatccttgtcactttgaaggtgatcattgctgatttggggcttttaggattctcactttgaccatttcatgtatgaggtgtttatatgtagactttttttttttaaataaacttactattcagtggacctttttgattcagacaattttctggtcctttacattcttacatctcaaaggtttatgtgagtcctatcaatgccttaatttggagctagtcaatgtgagggttcagtaagagacctcttaaaagtcctatgaacatcttgttttctaatctgttctactctcttctctctcatctcaagtctttaaatctggataatggcatggggatagcagactaagggttgggatggctgctggaaacacaggagatctatctaatcacccattttgttaaaacttttctgtcttacatctggaccaggacttctgaaattgaaaggcttggagttaacatctttgtacgccattgtgccatgaagcaatgatgattcccatccagctgcctaaagagaaagaggtttgtgtcaaacattctgatgggagagattctttaaaatgttctttgtgaaccatgaaagcattactttctcatgtcctaccatgaatttacacaactgatgcaaaaatctaataacaaaggttgagtagcattttccaaacaacagtgagctgggagcaaggaagctggcttctgatatcagcttcacccacaactgtctgtgcattaaactagtcacaatgtttctctaggcctcaatttcctcaccagtagaacaaaagagtaagatttgataactactatggtcccttccagacttaaagtttccagacataaaggtcctttacagacttaaatctgtagtttaaagttgagtcatctctggcacctacaacctaaccctttgccatctatactggaaaagaaaatcttgttactcttttcaaatagcctatttttcagtagaactgtattttggcaaacacctatatttggagtcagaaggacaaggttcagtgtccaggtccactgctgaccagtgttgtgaacctcggaaggtttctaatctctcttaaggttgggtttcttgagtgtgtaatggggatatgtgtcctatgctgctcacaaggattttgttggcatcttatttgatgacttcactgaaaacccgttattgtaacacactctgttgatgtaagctattttgacatgatcatccatgttctgcgggagaagctcaaatagtagatctctgaggaaactcacgcatgttgaaggagtggagtcggtgctttaggaaggaaaatctgtgtgtgggtctcaagtctcaccgcatgggtcataacctattcctgaccctgacagaaaatccttctagaaataaaagagaaataaaggaaatccaccataccaaggcataaaaagacagccatgaaaaagtaacataaggggagaggaagatgggcttataacagattacaggatgttgtcagttttaataacgtgatgtgaagaaaagattctgtttgcacacagggagaggttcttttcctggctagtcaaagcacaccttacgtacattctgaagccgtctcttatatgattcatttttttcactgtagataagacttttatggatggattgtttttctcaaataatattatcgctttgtgactaaagtaaagattattaattcctgaggcaagaagatataaaagctccagaaacgttgactgggaccactggagacactgaagaaggcaggggcccttagagtcttggttgccaaacaggtaatcctcctcgcggttgatgatgggg

SEQ ID NO: 2387 - DNA, 2300 bp, Homo sapien
cgctgcatcatcacccaacctctcctggaggctgagcaaggctccagcagggactctttcctctaacaagtcctctttctaccacatggttcccaagctactttcttaccttttctctctccttcacccaatttcttgaaagtgcagtctaggtttgtgatctcctctttctaacctccaatttacgttccaacctcctggtatgtggctttgctcatcagcagtgccccgaaacagtttgcactaaagtttctataacctcctttgtgctcattgcagtgtttctggaactctgctcagcatttcaccttttggtcataacatcgttcatgaagtgcttctgcaatcacctgttaccctgcctttctttttatatcaatatccactacttcacaggtcattgcaagcttctttccttcagcctgaccttaaatcctactattcctgagcgatccaacctggtctttctctgctcattcctcaccatcccatgaggcatcatcatcagcttttatggcttcaatcagcaccactgtgcagaggactccagttcagctccaactcaggcatctcagcccagaggatgctgcctactcgtctgcagttgagaaatcccttcttcaatgctcctttactggcacctggaaatctacattttgcaagcagagcttttcatatttatttcctttatctaaatctatttgttctgatgtttttcttctttgagtggttagaaccatgacacacacatacacctaagccagaaacatcaacattctttttcatttttgcctctttcattctgggagaatccatgcaagcattaagtccagcagagtctaagtggttttaaatctcttggagctgtcaacttttgtccttccctaaagagacaacagagttgactagtaaagaacacaggctccgggtagagttgcctaaatgttcacagggattgcttcagctgacgccaccttctgaaccatggtacggttttcatgtcctcatgtgcaaagtatgggtgataatagtagtacctataacctagggtcatggtgaagatttaatgggctgatttatgcagagcatagcggggtgtgtagcatgaaacgagccagtcttccataagtactgcttattatcagccctaaggccatgctttctgccaacagacaacattgcttggtacaagagcttttaactagtctccctgactcaagcctgttcctttttaacctttccttgtaattcagccagatggaatctcccaggaacaaaactgaaaatattcctctcttatcagaatccctcagaatcacctcatgaccttccgatttgcccttttacggacgataaacccttccattttctgagccagaggcttcttcctttgtggagtcagcctcatcgctcgactaggaacataaccagctatctacctttctcagaaagcacttgggtttgctcttataacaggcactttttctaggttcttcccaccattgcacatggacacacaaaaattacactgacccctggcaccccaaagacaaacagcagaaagcactcccaggcaaaatgagctcaggacctttctgttgcctgggcccacaactaaggttcagggccttctctaaaaagaagccgcagccgaagacagaggaactgcccagagtggggctgggggtgtggagtctacgctgatactttcaggctgtttccactcttgctggttctgatgctcctttcttttgccacaagcaaccctagtggaaaactgggaaatgtccaacaatgaagttaggacagtggcccataaaacatcggattccaacctgtgtcctaaggtgtaaagacacagagtaaaggcaaagatacagtgagcctttaacacgttctcctttgttcttcctatttctctattccttctccatttccgatggtgttctctaccctctctccaacccacgtgccaacagcccctcttttctcttttattctcgcccacgtttccctcctttcttccacctgcgcccaacggtacggcccggaaaacgaactggatgcgttggacaggtcacgcgcgcattgcggacgccagctagaccgagccctgggaggctacgggctcccccggaaaccctgccaggggagccgggttttgagctcaggcgcctctagcggcggcccccagaaatctgactcgcgaggccagagttgcagggactgaatagcaaactgaggctgagtagggaacagaccatgaggtcagtgcagatcttcctctcccaatgccgttt

SEQ ID NO: 2388 - DNA, 2300 bp, Homo sapien
tcttaattgtataggatgctctatggtttacttaggaactttcctattaactagccattccatataatttaatcccaattaattctcagcaactcacgaggcataggtattactaacattctttcataggtgagagaacttaggcccaagggttaaagaacttgccaaagcaagttgtttctttgactcctaatcttctgattgagctagcatgaaaagttgtaccaaatagtataaatatcaaggggtaggggatgaggagaggagagtatagatggaatagtttgtacatcatttaggtttgggggttctaattccttttccaaatattgaaagagcctgtacaagtaatatctggtgtgctataaggacatacccatctgcctttaccttctgtagttgggattcactcttgaaagggaaagaaatgggtcatgttaatattgttctctgtatggcaactctcaatggttcagggccttgtatcaagtttctagaggcatctttcacttcctaaagcccgttgttaccttactgggggcaatggatttctctaaagtagaggaagcatgaaccaggttgacttttgtttcagatatgcagctttgtttgaaaacctgacttaacaggcttgtaaactgcctgggagcccctaagctcctgcagcatagtgagtacaatgttcttcatttaggaagtactcaacaaggatgagtggcataggcatcagggataggagatgcaaagaaggttttgtggggcatttgggtcctgggtgtgggccacagaaaatgggtaggaaaatccacagtagttccaaatgaaaaagcaaatagagctccagtctaatctgagctcttttgcctgttctctgcttccccttacctaggtatgacaaatactgtgcagaccacttcaaagacaaccactgtgaccaggggtgcaacagtgaggagtgtggttgggatgggctggactgtgctgctgaccaacctgagaacctggcagaaggtaccctggttattgtggtattgatgccacctgaacaactgctccaggatgctcgcagcttcttgcgggcactgggtaccctgctccacaccaacctgcgcattaagcgggactcccagggggaactcatggtgtacccctattatggtgagaagtcagctgctatgaagaaacagaggatgacacgcagatcccttcctggtgaacaagaacaggaggtggctgggtaggtgtttggtttctgaacttcaaggctaattttatgaagcctagcactttgacatatagcacaagtcataactcaacctatagaaatgcaaagatcagaaaaatagaatggcccaccacttaagataaacccgttaccccagtacttacgtttaaatgtaaagatatgccttcgtcttggctgaaaagtgggcaggggtacacaggaggcagaatgtctggaaggcctcctcagatgccagaatccataaccttttgccagagttgcctcaaatccctttattagtgacattcctttttacattaatcattgccttattgttaaggcccttctttagaatatatgtctctttgacacaggtaatgatcttcagttgctctgtcattcacacctcactctttgttggtatattgtcaaactttcaaccctccagctagctgagataccaatgcagagacaaaggaaaataaggactaaaaacacacagggatgtatgtttagagtagcaccaagtaccactgagtaggtatgaaagagtggaagaagaccactgaaaccttcgggaggaaagcacagcttctcactttgtcatgcattgcctcagccagaaggctttggtcagccagactaaggaaggtgggacatcctctatgtgggaattagtgtttaagatctcaagggacagtattctaattcctgagatatgtcttaaggcagcatcccagaggtggggacctgatgctgaaggggaggaagggaggctcctgtcaccctttatgacatgttctgcctgacctgcactcttctgttttacccccatctctcctcctccgcttctcccttggcatcccacagctctaaagtctttctggaaattgacaaccgccagtgtgttcaagactcagaccactgcttcaagaacacggatgcagcagcagctctcctggcctctcacgccatacaggggaccctgtcataccctcttgtgtctgtcgtcagtgagtggcactggtgtaaaggggaaaggtggcgggggaagagtgtcaattgggggaacaat

SEQ ID NO: 2389 - DNA, 2300 bp, Homo sapien
tattgagactgtaactttggtcttctcattttcttctttgtattgtgcgtcctagacttagtttggcctctccttttgtccttgtatactctaatactggataagaattttggagtctttttcaactctgagtcagtgaatgccacataacttagtgactatatttaaatggttaatttacaattttttccctgcaaaggatactgtagtcactgtgagtattttagtattattgtaggactcaagagggaattaaaactacaaaaatgactcgtcttgtatgacacagaaagaaatgtttcttcacagagggaggagaaaaatatcttcaagagagaactaattgaatcaaatcaatgaaccatgtctcatctttttggataagtaactgttagtaatccagacacttcatgagctttcattatgtaaagtctttagcagaagctaaaggaggggcaccaaccacagtaattttaacttaagaacaaaatggagcatgaaaataaattattaaatcatttactcccactatttttgggttagggccaataatggggagagaaagaggtagactagttttgtgtttgtggctattttaatagagtagcacaagtaatcaaaaaacagtaggctgttttgaatttactggctgtcccttatgagttcacagttagattggactgtcctcaatgtactttcttttttttctttctttcccacatctctttatttctctgattttgtttaaacttcataaagagctctctgatctttcctttccaaacaatgaaggtttatcctttgtaaactacctctgtactccacaggctgatgatatatgatatccctatatcattaaagtaaagcctaagcacattctgtggcttttgtgtctactctgttgttgctgagcttatgaactattagaaataattccctcttgcattttcacacatggggaatgtgatgttctcttgggtattatgctaatcatattttggcaggtttctctgaagcagatgcagaaatgatcataccactttccagggtgtattattttagctcctttgacttgggccctaagtctgttttacctgatgttcctgaaagatgttcctgatgtccctcactgttctttcatgctggatgttcttgcctatgctgcctcctcagctatcaccctctcttcccctttttaatgtagaactcattcttaatgatttgtcaaaggcaccctatttcactgaaatgccttctatattccctaccctccaagtggattgtagaccttctaaggtcttttgacatctgcatatctctagcacagcacttatcacggtgattatttatctgttcatctttccaagtagacactctcattttaactccctaccctagtcgccagcatccccagcatagtgcctgtcataaaatggtgccacaatgaaaatttgaaaaatgaatgaattgaacgtgataaacatagatgagaatcctatattctacaattttttaaatgtactgaaattattctttttgaatcctcctatttatttctgtgacttctttggtgacaaagttagaaaaaagtggaggtcagtagggagatatgaagggacgcaggtggaagcagtgagcctgggcgggtgatggagtgggcgatacgtggcacaggggtcagtgagttaatctgggctcattcagagaatggaagttgtgtgccaagaaaactggttggatagggataggtcagggattccctcttgcattctcacacttgggggcatgcgtcattttcttttcttttcttttctttttttttttttttttgagacggagcatcgctctttctcccaggctggagtgcaatggcgctatctcggctcactgcaacctccacctcccgggttcaagctattctcatgtctcagccttccaagtagctgggactacaggtgcctgccaccatgctcagctaatttttgtatttttagtagagatggggtttcaccatgttggtcaggttggcctcgaactcctgatctcaggtgatccacctgcctcggcttctcaaagtgctgggattccaggcatgagccaccatgcctggccgcatgtgtcattttcttgggtgttatactgatcgtatatttgcaggtttgcttttgtgacagacttcttctgggggaaaaaaagtatccttctatctttttacttttgtccagttccaggtatccctgtttttttcttcactcttccttccttgttcatgggagtttttcttgaggacttcaagccca

SEQ ID NO: 2390 - DNA, 2300 bp, Homo sapien
acgaactatctctgttagacattttgaaataataaaaatatcccattgtcttttattacaacctcaggggctcctggagattttgggatcttgtgtggggaaccacccatctaatccatccttgttttaaagagagaaaaccaaagaagcaaagtgactggcccaagtacctagagctgggtcagggttggggccagaatccaatctcttgacttttagtcaagtgatttttccactatgctcagtactcaaattatgtatcaatatgtcggcccttgttttttgaggtctgaaaagggttagtgccagtcaacaacagtagaggagtagaaagggtgttgggatgggagaggtgtggctatatttaaaatttcaatgacagcagtgaaaataatttgcctgtgaacctctgcctgtccctttggacttctttgtagtagttgagacaacccggcaggtctggtgtcattagtgattcagaattggattaacctggactggtggagttactttctcagaaaagggctttatattttaacatttgtttcccttgacagtttgcttcttctcaagttttggcagccttgaacaagggttgtcaggtttttattttgttttgttttaagaaaaaattccaaattttattttgccgatttagtaagttatcctctacctgccactcccttctgctccctctataattatttctaagactttatttttccattgtgggaacattatggaaggttttcttttacagtctgagatatttataattacgtgtaagcacacagtttatagaatatgtaaatggtccatatgttaacttaaatacccttaaaatattttccaataatttaaatctttccataaaagtagctgaagctgcttataataaaagagaagtatacacgaaggatagcagaatttggatgtagttaatatagataaatatgaatgtcactttggaggaactggaagtatttgcatgaatactgatcaagccatgcctccttgttaatagagtgaacaaaacagatgaatgtttctgttttcatgaagtttatgtgactatcagtagcttccatattctgagggtttattatgtgacagatgcttggggacaaaatactttacttgtttcctttagtccttaaaatagatgttaggattcttgtttacagaaaagttaaggaatgttcatccagatcacctagccagtcagtggtaaagaacagtcactggaacccctctttcctgatccaaagccaacatacttaaccataataaataataccattgtctggtggaatcctgtagtcccttagatagtgtaattttgtatttaatgtaaacattttgtgcactagactgacttacattttactttttaaaacaatattttaattctgaatgaacatttgcataataggagaatgatctaaattgcaaacttccattttgaagagttgtagttcttttaaatctttttgtaactgggaagaagaatggaattatgtttgttataatccaaggaaagttggttagcattctttcctgttactttttgatcccaaaagaaattctttagtagatcaagaccaggaatgaatgtgtggatttttttaaataaaaaattgagagagattgtaactagcaattcagagccagatttatgttcagaaatgtttgatgccagccgttttagttacaaataactttttcttgactgtacagttgtgttcttatggtaccattctgaaagtgatgtaagagaccatgtaaaatgattggaatgcctcagcatctgaacaatgcacatagccaattattaaaattacccagtactaacctgtcttggcttaggaactatggaattaactgtgggtagcatttctacacatatcattacagaacaagcataaagacaagcttgtttttttccttttctgtggatttgttttttcttattaccatatcttttgttactgaaaactggtggtcatctgtactaatagataagagaagtgtgtttgacaccaatacctaatcttagattatccctgctattttaaaacaccgtccttcacctgcatgctcagacatgtgggttctttcaaacatactggacttcctccttaggttttagttgtgttagttaatagttgaatgttgaaggagaggatgccaagggatattaaagaaggtaaaagagataagtgacagcaaacattatttatttttaattatctctcagaatgacttttagatacccttccctactacattttgatttttgc

SEQ ID NO: 2391 - DNA, 2300 bp, Homo sapien
tagttcaacatctattatgtgatagacactggggattaataggctgtggtctttgcccatgaggacctcaaaacttagttgagaacacagaaatacaaagagtcctgtgtgaaaaataagtatcggtgttaagataaagaagcggcagtggaagacagtggagggactgtctgttagggggaggaatttattgcggtgtcggcaaagccttctttggactgaaggatgaattatgattagaagttcattaagaggaggagggaaggggactacaggagtcattccaagccaaaggaacaaaagatacagggacagaaacagcaagatatgtttgggggaatctcaagttagtcaatactgttattgtgtgaagttcacaacaggggcagggaggacaggagatggggcccaatgacgaaaaggccttgtatgtaccatgtttagaagtttgaattttatcctataggagtcagggagaggttctatgggtaggatttcccatcccaacaggattgtaaactcccacatccaattagtcacacctccattttttttttctgtttctttaacattgtctcggattcattccttctgaaatctaccttattagttcaggtcttcttaaatttgtgcctggactgttcaccaactcttgactggtcctggggctccagttcacctcttgctcccccaacaatcaattttctacagaattatcagagcaatcttcctttccatcaatctcaactctgttcaaaaactttcaatagttttatgtgacctaagaggtagctgcctccccaccctttcagcttgccattcaaggctgcataatttggtcccaaccccctttccgtccttgactcctctcactgctaacagagacagaactcatttacttactcttttgactgtacctttgctttcacgagggctctttcctggaatgatatgtccatacaactattgttgctgttcttacttttagctcttttcttagaagcccacttgtacccaggtttgatcacaccccctactctcctgccctggaagtaactactattctggttatagtctcttaatatctatatctatatatatgcatccacagataatgtgtagtattgtcttgaaaaaaatatacataaatggtatactttgtctccctctgtgattagttttttcactatcatttagtttttaagatttatccctattgacataaatagctatagtcttttcaattactgtgttgcatttcattttataaatataccatacattattcatccattcctctaagggtgggcatttatgttgttttcaaggttttgctattacagtgttacaacgaatatccttagcttagctggtctccttgtcttatacaaattttactgacctttcaagatcctgctttcatcccagctcctctgggaaagccttccctgaatcccccagcccacagcggcaaagtcttggtactcaaagttgcttgtgcatctttggtatcatcccactgccaagcacacagctacgcaaagtaaggcacttaagaaatattcgctacacggatgaacaaatgaatgaatgaatggggcagcaccactccgtgatggctctattcctttttaatggactttggcgccttggcccactttccttctttgacagcactggtcctactccagagcattcctctagctagcaaagcagtgtgtggatgtgtgggtgtaggtggcgatacagacctcactggatgaggaccgcctctccctgcaagttcacgatcccggcaaactccagtgcttgaagttcagagtcctaccccacccccctcacccccacgccccttctgcactggtcaagccagcgagccgctgcagccctgatcgagttaaggcgcggcggcccccggggccgctggagaaggatgcggacgggtccagtgactcgtagtagatccctccgcgcggagctcgggccggcgcttcttcctgcgggaaacccctgggtgcccaaggcggcggggccgaggccgcggcgacagtggggcggggcttgcggtgggaggaggcggctgaggcggaaggacacacgaggctgcttcgttgcacacccgagaaagtttcagccaaacttcgggcggcggctgaggcggcggccgaggagcggcggactcggggcgcggggagtcgaggcatttgcgcctgggcttcggagcgtagcgccagggcctgagcctttgaagcaggaggaggggaggagagagtggggctcctctatcgggaccccctccc

SEQ ID NO: 2392 - DNA, 2300 bp, Homo sapien
ggaactaccccagatgtgtcaggagcaccacaggcacgctcactcttccattggcaggagatgtgtagggtggaaaggaaaccaaaatcaagaccctttgttgctccagttcttttattacatgtcacagtcgaatgtgtctccatttaaattcagattttttgatgaatggccagaccagctgcaggccctttgggccagaagccttgatctcgccaactgttcattttcttgatggacttccttatttcaggcatttgtgtgtagctggtctattgtggagttgtcagaggggtgtagagccccctctttgggacagtcagtcctccctgtgcagcatgtcctgaagctggcctgcctccatcctctttctaagtgtgtgaggtcttttgttaaacagggtaaagtgagggaggactcctaaagagagaaaaactcctccagcatttgctggaacatgtttgtgaactgagcaagatgtaattgggatggcataaaaaaaagacttacatttacttaatttcttgctgtctggtttgtgatatatggtgccccaaattgaggttagaaggagctttgatcatatgtcaaggaggtgtcatatttaattctactccctgtggcctctcttacaataccagtcatgcataaagcccgtggttttgctgcatctagttttactgaagcaaaggctctgcactttcatagtttacactgacatatttctagtttgcatctgaaacgtactctgaggatgctgacttccagatagccatttttgggttaagggaagttcaagtctcctgactatagtagctacaccacctggagagcttcattttggtttggtgacaaaatttattttagcttagttttcttacattaggtgggcaaaataagaaaggccagaaaagtttaggacagttttctgagacactcagcaaaactatgaggcctagaattgagaactgggtattaccctgtagatgatgtcttttcaagctgggctagtggagtttctgagcagcagctgcattctccttgtacatcttcaggttttgtaggattacctttagccctctaagtgatcagatccgcctcactgtcactcatgggagcccttgatctggacaacgtggaccttgagtagctgagttcaaacaactgaggtggcaagagggatctcccccttggttctttttttttttttttttttgagacagagtcttgctctgtcgcccagtctggggtgcagtggtgcgatcttggctcattgcagcctccgcctcctggattcaagtgtttctcctgcctcagcctcctaagtagctgggattacaggcacccacgaccatgcctggctaatttttttatttatagtagagatggggtttcgccatgtgggccaggctgttctcgaactcctgacctcaggttatccacacgcctcagtcttccaaagtgctgggattacagacatgagccaccgtgcccggcccttatatatattttttaattgaagaggtagagaagcaatctcaaggtcaggacaacttaccctgaggttctcacttgtcagggattgtgctggattctgacttaggttctgccatcaaacacagaatgccctgatccttagaggcagaggcagctctttagcctatagggtaaataaccgggaatggaattctcaccaattcttatcttctatgctaaaagttttactttaagatttaggcctgcttttttctttctctctgtctctctctctttttttttcccccagtaacagtttaaaattggtgccttagacgcaagcaaaaagatattagcacagctttagaaataagtgtgagtccacatgtaattttttagtttctcctctcccttcgctttttgctttcttggtagtatgctaattgtattctttttctgcatcttttttccccattctttggcagatattattacttgtcttgaaagagtaggtgaagagctgtttttaggactctttgaaagggtacagtatggatgacagtcttggctaaatgtaatcagatccaggaagctggagtcagtgtgagctggaatcagttcaaattagcaaagcactggcgctcagtggcaggaatacaagtgaccacaaagtgttaaacacatctggaaagggattctgacatcatcctgagaatctttggggaatacatatagcctgtagacccattcctctttgaccctataaagattctttaaagagtaataccctgagtggttttctggccagcttgcctgctcattta

SEQ ID NO: 2393 - DNA, 2300 bp, Homo sapien
agagtcaaagtgattcaggtttaaatcttggttctgccagtagctagcctttcacttcaggcaagttacatgacttgtctgagcctcagtttccttatttggaaaataggtaaaataaaatacatttcctaagatagtagtgagttgttgatgagatatataaattatttagaacagtatcttgcacttgtaagtgctcaataatggtacggtctacttctctgtgagcctttcttttgctgaattgggctgactattgaggctgcattgcatattcactcccaaagtgccagctattaaatgataggaaataagtaaggaatgaaacttaagttctagcttaagatcatttagtcgtaacaaaacatcttgggtcagtcacttaaaccctctggacatcagtttctttttctgtcagtgaacaagtaaactaattattggccactgtggttcggcctgtctttgaccagagtcccaggtcctgttttttcaatcagaattgtttgagtcaaatggactctaaatgggaccctcatctcatgggactttctgggaccctccctatcccttgatttttgcctccctataaaccacctgcttgcatgtgccctgaggaactcctgaggcttcagccccaaccctaccccagagtggttttatgaggggtgtgcctccttagtcaacctgccttgtagtttcttcttaaaaaccatcattgtttctggtttgtgggtgcccacattccttggaaagttcatgcctctcaatgtctgacttgaaagcaataatattcttagtctttttacatagctctttccaatttacattatgctttcatatgtagttgtccgtcagtatcctcaggggattggttcaaggactacccccacttcccccaggataccaaaatctgcagatgctcaagtccctgataaataatggtgtggtatttacgtataacctatgtacacacatccttctgtatactttaaatcatctctagattacttataatacctaatacagtgtaaatgctatgtaaatagttgttatactgcttttaaaatttgtattattttaaattgttgtattggtatttttattgtttttttttttcttgaatattttccattcccatttggttgaatctgcagatatggaacctgcaggtatggggagggctgatgtacattaatctctggaaattctttacaaccctggtcagattcatggtcataaactgaagcctttggcctctagcctgttagcttgttgctgggattggagcagcgaaggtggtaaggtgcagggcatggttaccagggttgtgaatctgggtggtatttgggtgaatacacatgactgtaatgactgtatacagtcccagctattgttctttccttatttaaggcccctttcctttaccctctctataccttgagtttttacagtctcccagaaagcttgagattgacagttcatgcaaatattccagaagaaatagtctgaaacagggtggcactgtatgctgagcagtcacattttctttctcgagaacattaggggtcttgtctttttttttttttttttttaatgtcttaagagaacagtgtgtgtgcaccacagagctggaagcgaaattttgtaatttccatctggagcattttgatagaaaaagtgcaggcctttgcttggaacagtttaaccctttcaggacccttcaagagcaggagatgaaatttaaaactggagtcatattgtgtatgtatatatacttgggaatgttgatggctggtatataaacaagctctttcccttgggaggtctgagcaatttttcattcatgccaacaaaggtcttctccaaagcttctttcctcacagctcccattccccaagggagctttaaatataatcagttaatcagttttaaatataatcagttaaatatagtcagtttgaaaagctgcagtaaaacatttagttggaatcctcaagcagatgctatcattttcccacaagatgattgagggctcctgtcccttgctcaggggaaaaaacaacaacaaaaaaagctactctgcagcagtaaggtgaactcctggaagaaaatgaaactcttggaaactttcaagtaccatactctgcatcttgcaattgaaagaccctagaggaaggtggtaggcaaggagccaggggatgcagtgtactgtgcaaagaagcagtagttggaaacagtgttcatgaggggtccttagctttttcaatttcaggtgttcttggggaatgagaacagaaatt

SEQ ID NO: 2394 - DNA, 2300 bp, Homo sapien
ttttgtttttggttactagcttctcttggcagcaaaatgttgatggggtggggggggcaaatctgcaggaaaaagcctgctcggcacgggacacatccaggaaaacaatgtggtcagctgaagcaggaaacgggttagaggatagggtcggagccgggaaaaccggggggcggcgagcggaaggcagccgtcgcctccctcaagctagggacgatagtgactataaatgccacccccaatatttttttgacacccaagctcagagatcccagatatcccacccaatcccaggctggggatgggaggaggtcggtgaggtcgcagtcctgactcctcgcaccaggcggtgcccgagaagatccggccccggacgaggcccagggggctggagggacgcaagcgggagcgcggagcccggcgactagctccctcgcgtgccgcagcggcgaccctttctacttggtctttccttttcctccgagcgccgggaggaggaagctcccgctagcgtctcccacttcccgcggctggaggaaggggccacgctgagggaacaagacagggagcagaggcggcggggttcaggcgagcgggaagcgggaagcgagaggcgggtgtgagatggggtcctgaggctggaagggagcccggggacaactggagttgcacacgctcggaaggcgggaggcggcaaggagaaggctgccttagaggtgaggggaattggggcatgatcatgggccgcgatgttgcgtgaagcgcaaggatgtcaggaactgtgggggccgagatgtggtctagggatgggagtgggcgaagagaagtccatcggggcgggccggggggtgggactcggggagagccccggaagctgcgcggaacacccatcctcctgggtcctaggctgggacccgggctgtccgccagggctgggagacactggaggaggccggccgatgattacgcgcgatgccaacgacgactgccctacggtggaccgcggctgcccgtgtgcggaggaaagggagaggcggctgggtgctggctgcgctgcggtccgtgagccaggacggagtcccaggctgtacagtgatgggcggagagactcgcagtcctgagaagtattatgggctgtactgggagatttggagagggtggaggaggggcggtctgagggattccgggcggcaccgctaaggcgatgccgcgagcagcatccgcgccctctccttcccgccccagcccgggtttgttcagtcagggctccagcccggcggccgggaggaagaaaaggaagagggaaggagcctttacctggctctgacgcgacgggtcccaggcccccggttccgcttcccactcagagctctcctcccctctcttccccgccacccgtttctacgcagatcggtgccccagtccctggaggagcctccgccgcctccgccaactccgcaggaccccgccgggaagtagagcccacccctttaccaatcaccgcccgttttctatcgaccgatggggcccatagccaataggaagagctgataccgagaggcccggaatgagggggaggagctggcaaaacttggaggtgtgactagcactgccgaggcgtggtcacagattaagctccaccccgggttgttgaaccccgaagtagaactgatgggcgggattaaggtggaaccgacgaccaaacacaaactcttgagctaaggcatggccaattgggccggggtagagaggaggggtgttgcggggaattttaaccaataaagagtagaggccggtggagactgtagtccctcttccaataagaagcgggaagggcgtgtcttgccactttcactagggctaaggcagggtttgccgaaacctcccgaagccggccaatgagatcggaggcggagccaagctcagccgaccagaaagccgaattgatctcagcaccgttactggggcggtgcctacggtcttcaagccactaagctctcgtgaggggaggccccggagccttccaatgagggactggggctaactctagttcttccaatcggtgcgcggcgctggcaattcaaactgataccgggttggagaggcaggaaaagcggaagagggagcgaaaaccaacgtgttcggtgacagaccccagcgccgactgagcctctaaagcgacttcagctctgccccaccaacaccaccgcgcgcccgggaacagccgctccgggaagaaacctgaggggactgcggggggcacgagggacagctgagggaagggaggacgcgagagaaacagc

SEQ ID NO: 2395 - DNA, 2300 bp, Homo sapien
tgactcccacagatccaagccataagtgttcccatttagttaaaagctaccgttgcccgccactagcatgacttacttggtaggagggatgtctgtagagaaaaggtctatttcagtatcagccagcaaaacagccttcattcccctagagctgagcacttgtttacagaatttgcaacacaggatggacacgcacctgtccttgaaactacaaatgttggtagacatggcgtcgcaggaaggatgaggtgtgggattttgaaaaaggaaacaagagtaatgctcctactattttgattcccctaggctaaaattcaagttgcgggacctagagcttttctaagtcctaatattgggaaggaaattagttttttttttctgttttcccggtggcggagtagaagaagtatttattgagtaggaacaggggagcgtggcaaacttggctttccttttaacttttggagaagggagtggagtttgaattggagaggaggcaggtggagtttgaagggaacttctcaacggctttccctttctgctgtctaaaggagtcctctacacttcagctcccgccccttcatagcaattccctcagccttctccgatcgtctaatttaaagcttctcctcttttaagacatcccttccccagcattaagcccctcccccggagcgctccggttccctgctgtcggatctcgggctaagcatccctacccacgcctcctcttcccaggattcagaaactcccttctctttttctgccaggcgatcccggattctcctccgtcccgccccttttctcccggaccttcctccgctctgcgggtccgcgggcccctctcctggcaacccccggccctcagcgtgcttgcgctgtttctctcgcgtcctcccttccctcagctgtccctcgtgccccccgcagtcccctcaggtttcttcccggagcggctgttcccgggcgcgcggtggtgttggtggggcagagctgaagtcgctttagaggctcagtcggcgctggggtctgtcaccgaacacgttggttttcgctccctcttccgcttttcctgcctctccaacccggtatcagtttgaattgccagcgccgcgcaccgattggaagaactagagttagccccagtccctcattggaaggctccggggcctcccctcacgagagcttagtggcttgaagaccgtaggcaccgccccagtaacggtgctgagatcaattcggctttctggtcggctgagcttggctccgcctccgatctcattggccggcttcgggaggtttcggcaaaccctgccttagccctagtgaaagtggcaagacacgcccttcccgcttcttattggaagagggactacagtctccaccggcctctactctttattggttaaaattccccgcaacacccctcctctctaccccggcccaattggccatgccttagctcaagagtttgtgtttggtcgtcggttccaccttaatcccgcccatcagttctacttcggggttcaacaacccggggtggagcttaatctgtgaccacgcctcggcagtgctagtcacacctccaagttttgccagctcctccccctcattccgggcctctcggtatcagctcttcctattggctatgggccccatcggtcgatagaaaacgggcggtgattggtaaaggggtgggctctacttcccggcggggtcctgcggagttggcggaggcggcggaggctcctccagggactggggcaccgatctgcgtagaaacgggtggcggggaagagaggggaggagagctctgagtgggaagcggaaccgggggcctgggacccgtcgcgtcagagccaggtaaaggctccttccctcttccttttcttcctcccggccgccgggctggagccctgactgaacaaacccgggctggggcgggaaggagagggcgcggatgctgctcgcggcatcgccttagcggtgccgcccggaatccctcagaccgcccctcctccaccctctccaaatctcccagtacagcccataatacttctcaggactgcgagtctctccgcccatcactgtacagcctgggactccgtcctggctcacggaccgcagcgcagccagcacccagccgcctctccctttcctccgcacacgggcagccgcggtccaccgtagggcagtcgtcgttggcatcgcgcgtaatcatcggccggcctcctccagtgtctcccagccctggcggacagcccgggtcccagcctaggacccaggaggatgggtgttcc

SEQ ID NO: 2396 - DNA, 2300 bp, Homo sapien
ccactggctaatttttgtattttttataaagatgaggtttgccatgttgcccaggctggtctccaacacctggctcaagtgtctgcctaccttggcctcccaaagtgctaggattacagacatgaaccaccgcacctggccaataattacttctgaagattctgacaataccatttacaataacacaaaaatgaaggacctaagaatacatctaacacatctagagagaatattataatattgttgtgagacattaacagtgacataaataaatgagagttataccttgtttatggattggaaagtcagtgttggaatgatatcaatcctccctaaccctctccctcccgcccctgccccaaaaagatcgacagatttagtgcagtcccactccaaatccaatagttttctcaggagaatttgacatagttgatctctctttcttgagacgttttattctctgttttccctcctacctcactggtactccttatcaatatcctttgctaccacctcttctacgcaacctctaaaatgtggcatatttcatggctcagccttagacctttttctatctgtacttcccccttacattgttctttctagtcccctgactctaaataccacatctatatgatgattggcaaatttgtatctctagtctaggattcttcatatatccattgctttttcaagagttactcttaaatgtcaaataggaatcttaaaatgtccaatatgaaacatttgcttcttgctaccccgttcccctcctccaccaacttgctgtctcaattctgtcaatggaatatttattgctttgacccaaaatctacgtgttccccccgccttctctttctcacattccctacatctaatcaataagaaactttgttgacacttcctacaaaacatcttccaaatgtgaccactctcaatagctccactgttaccatgttagtccaggctgccgctgcctctcacctagactcctaactggtctctttgcttctactgttgtctctctacagcccggggaatctgtctccaactaagcctggtggcagtgaggaccgtcagccccctcccagccagctgtcggctatacctccattctgtctggttctcagggctggaatcgctgggcaggtctagctaatccttggccctcctaggaaaatattcctaaatcctgaaggcatttagctaggaaagatccagaatggacccaactattcctgttttaccccaaaccggttggtctgctttggggattacttctcaggctaggaacctctgagtgttctgaaacgggcctgaactcttacagaagctcttgtggccctaggatgaatttagaggtctccatacccagcctggaaggtgaagaactacccctaacgacccaccctcccaacctaatgccggttctgctccacttgtccactctggggagctgtgctttggcttggaagctctcggattgaaggatgggcccaagaccctcacaggtgaagcctcggtaggtcccagggagaagaaagatattcctccaccccaccacccctctaagtccgacccacctttctccccgccagctgcatcagatccctccaggggctcattgtcagtcctgtaatcttttcgtccgtgataggatgggccgtgggcccttgtgagtgaagctcggcggttcccgagtccatgtggggtggcccctgcggagcctggagccttcttgcccgctggcttgctgatcccgctgagccagctcccttcctgcttttgacggtgagggaaccagctgggaggtcctccgagctggacggggaggcgggcggcctctcccactccccacccgctccctccctgccgccgccgcctccggctgctcttgcgacaagccaagaagctggggcgcctgctgggagcccagcgccgtcctcccgtttcctgtgatctaccagtcctcctctccgcggaggcttggccgggcgcacctgaggccggcagcatccccgtggcttggcggcagctgcaacctccacagacggccgccaggtggcgccacgccggggcccgagagcaggcgggcccggggcggggttggagggactcagctacgcgcccggggaggccgcgggccctcgcagactaccgaacttccattctgccgccgggttttcacacctgccggccccgaggaaacaatgacgttgggattttggggggccgccccttgactcgggcgaatgggacacgaacggcgaccccttgctctcttccatccgcctgccgcc

SEQ ID NO: 2397 - DNA, 989 bp, Homo sapien
gaattcatcctagtttccatttagctctctttctctcttaccacaatacctaaaaatctttttatggggttacaactctgtctcaggagccacctcagtttggtggcacagagctccccacttgtactctgaaactcttttcttgaagatattgctatccatgtgcatgagttatttttcttctccatagcatccacattaaacaattaattaccttggatttagccaaaataaacactccaaattcatgatgtctttcaggaagagagtttgttttcttttttaaccaaaatgggagattgatcctgtctgtgtcccctagaggagcagaggctggtttgtattagggcagctcttgtagatgagtaacttttcccatggcctcatagaggctgatatagaaacttctggattcaaatgattgtttggaggcattagccaggcattgaaccaattataaagagtgaggttttgccatattctaaccctaagaaacagaaacggtagagggtaaaaatagaatagaatgtcaatacaactttagccttttccctggattctgagagttcataacctgaaaatcagagattcaaactgggagagatgggctaacaggtatgagcatgggaaaagcatgtttcaagaatttgagatgtatttcccagaaaaggaacatgatgaaaatggtcagaaaaggcaatttccttcctcttttctaatttggctctggagccaccagcagaacctcttcaatatcttgcatgttacagatttcactactcccaccagcttggagacaacatgtggttcttgacaactctgctcctttggggtaagttggactcagaggggacagttagaagggtacaggctgtggctgttgtgagtcaagagttttgtcttcctgtggtaactctgggtagaactcatgagtatgaagcaacttgtatctgtgcttccactgtttattagagcttattttatgaaaa

SEQ ID NO: 2398 - DNA, 2300 bp, Homo sapien
gggaggttcccctcgccgagggcagttagaccaaagctaccaaaaaaaggaggagtggacgccggggaccaaaaaacagcaacatgtgtgctcctcaggaatgatgcttcccttaagattagcatccagactctagaaatccccactccagaatgacagctgtggcagtggaaccagaggatttgctgtcatcagttggcctctatggagagtgagacgctgtcctggagatagaaatgtggagttggtttccttcctttccttcttggggaaaatcaaaccatttacagttcatttccattgctgtggcttaggaaatgtcagtgtctgaacagatggagaagtgagatggcagcatgtgcaattagaattgggggaaggggtgtcaccaagcctcaggaagccccattcctcacctgccctggcttctggtcaaacttgccttccaagcaccttctccagctgtcactgaggttccttcccagggatcagtggaacttggggaccagctgagtggagtgatacattttctggtgttagtgactgagttgccttctgagccaaacagcttgtctccataaaggaggaatccagatgctgggtgctcaagcccccttctccccctgtcagagccttatttccatactccggagtgcagctgaagtgtattaccttgcaccctggtagcggaccactgtcaaagcatacatcatcatcagctctgctacttcttaaaggaacaggcttggaggtggtttttccctccatgattcctctctgctagctcactcttctgccagggccctccctttatgtaatatagctgatcagtggctgagccaggcaggggccaggaccagtcctggagcttgtgaaggttccgcattctagcctagccttcatatgagtgaaataaaaagagatgagagggtgggtcattcttggcctctgcagccagtctatccccatcagtgtgggttgtctgcagattgtggaggcaacaggagggagctgcctggaagtcgttgaactagggccaaagattgggtagcattttgaccggaagccttaaaattggccaaggtcccacactaactggtgttctggggtgcacagcacatgaattgatgccaagtgctctcagatgtactaggaggaggtgcttggctccatttttggtgccctcagaggctgtgggactctggatgcctgactggtgacatcaggcagccagagaatttcactcttggcgctaaccggttctggccactgagctttctccattgtgtctgcttatccaagagttagagtgaagtcagctctctgtggatctgagagttggctcaggccagcctctcagctgggggaagaggtcaagtcagttgggagcttaaaagccaatggaggaaaaggtcaagtcccagccccctccatttgaagaaaggttttttcttttcaagcaagggaatggtccgtgggcatgtgaatgtgcccactctttgctgaggaggaaggaggccatttctatccagatgtctctctgcagacaagaggctaaaggacgaacggtaacaaggtgacaggagctgtctccacatgggtcctgcctcccaactctctcagccttctgctctcatctgtcatccaggggactgtggatgacctcatcccataaccacatctccaatgggagacagtggaacagccattccttcacacaggggaaagctaattggcaataatccttgcgggaaggtcagactcctctcttacagatctagggaaggcctggggtaaaatgatggctctttggaaaatgccaagctccttcagattccataccctctcgggccctctagcataggcaacgaacttgttcctggcttcacgctttctcattgaatcaaagctctcaagcatggcctggatttgtaaacacatgctggctgccagcagtggcaagttagcctcctgacccacttctctcctgctttcactctggtgtatgaagggggatgagggaggggccagagaggtggccacttggacctttggcaggaaatcttcactgtgccaaagcattgtgtttctggagccggagctgcctgaggcactcttctccagcctcctcagccttccatggagctgcagaccctacatagacctacccctgccgggctccaaacagatccccctacccattcctttcatgtactgtttggtcctggaagaggctcacacaagttggctttgggttttgcttcaacatagaaaccacgagccttataccttgaatatgg

SEQ ID NO: 2399 - DNA, 2300 bp, Homo sapien
aataagacgtcttagctaattaagtatgcttttttcccgaaattcatattaacaaaatcttggatatgtcagagaatgcattctaagttcactcaacctaggagggagaaacataattttaaattaagagctgaagcattcttgtcctaacacaaagcaaggaaaacgaaatatcacaccacaggagggatttcacaaatttgcgtcaacatcaaaaccttaaaataggcaaggagaatgcagattcacaatgaactcttgtacttgttttgttcagaggagagatggttctgagagaatgacagtgaactaaccccagctggtttagttggtgctttcaactactgcttctgatcaactcctttagctagaataaattgatgaggattttggcatgtggtattagagatggttattaattttttcctcttatttgcattgttcaatatagtaaatactagctgtatatggctacttcaattcaaattaattacaatgaaatatacttaaatattgaatttcttagtcactcttggttcattattgaatatcttcagctaagatttcccaactaaagacactaagaggtggcttagttaactggtcatccacaaatattgaagctgctgttaactcctgatatattctctgcaaggagaatactcataagcctcctcctgaaatcagcagcctagagatagttttataaactggatacaagttggaaatctatatactctttaagtgtttgaaatattagcttcccagggaagaaaatcaaattcataagatatgctaggacaatttaactcaagatgttcaaaactgaaatgacatattctacaacatgtgataaaaccaccccctaacaacttaaagcaaaacagggatggaccttaaagacctgccttttcctcatcccccagccaatcagttttcaaatcttgcattttattttgaaaggtccctatccccctggtctcttgtttctagacttggcacatatttaagtttgttacctctctctactgacttttctctcttcaaacagtatctatgcctgccaaatgtgaacgtacaagaaacaaatcagaatgtgtcattctgatttaaactgcttattagttaataccctcaagataacatctgggttcttagcttcaatgagtcaagcctacttacatctttttgtctttggctgctcatttcctatcacatcgcactccagcaatgccaagctgtgccggccttccactccatctccattatttcgccctccaccgccgccgccacggctttttgcccccccgccgccgcggcttattccccccaccccgcctcggctttttgcccgccgctgctttgtgcccccccggcgccagggcttttagcccgccgcggctttttgaccccttgccgctgcgaattttgccgccgcggctttttgtcccccgccgctttttgcaccccgccgctttttgcaccccgccgctttttgccccccccgccgccgcggctttttcctcgccgtggctttttcccccctgcccccacggctttttacccgccgcggctttttgtcccctgccgccgcgactttttgccccccgccgccgcgactttttgcccccaccccgcctcggcttcttgcccgccgcggctttttaccccccgccgccgcggctttttgcccgccgcggatttgtgcccccctcgccgccgcggctttttgcccgccgcggctttctgccacacacccgccgccgcggctttttgcccctccgccgccgcggctttttgcccccaccttgcctcggctttttgaccgccgcggctttttgccccaccaccgacacagctttttgcacactcgtcgccttggctttttgccgccgcggctttctgccccctcgctgccgcggctttttgcccctccgccaccgccgctgctttttgccccaccgccgccgtggctttttgcccgccgcagctttttgccatcgcggctttttactcgccacggccttttacccgccgcggctttttgcgccccgctgtcacggctttttgcccccctgccgcagcgactttttcgccgccgcggcgttttgcccccgccgccacggctttttgccgctgtcgccgccgctttttgcccccgccgccgcggctttttgctgccgcgactttttgccccggtcgccgccgctttttgtcaccgcgactttttgcccccgccaccgaggatttttgtccccgccgccacggctctgagggcaggagcggcagactcggctgcc

SEQ ID NO: 2400 - DNA, 2300 bp, Homo sapien
ggctaagtctacagggataccagcctctcttcaaccacccaatttcatttagaacctcaaacagcacctcagtttcataaaaacctaaaacataaacacaacacttggttgtaagtgagccgacagtttcttgtctctttctctgctcaaggcttaaggccgtgtctccccaactacattcagtggaagaaaagatcccatggacaaataagtttgagaattgttgttgcaggaattctcagaactttcaaaacacaaatcctcatccgcagggatcttcaggagggagatggctgatgcagcacaactttctttcacaggagtatcttgcagaatacagtatgagatacagaaaggctgcattgagtctttttaatggcccgggccttggtgggggtggggtaggagctctccagatagcatctaatgagtaggaacattcaggtggcttttttttttccttattggcaaaactgtgtgtacaccatgaatgaagctggtctcccttatccacgtcaaaactaaacccaaattaattggctaaattgggactcaacacctccaggagccacgcggcagaaagccccaacacactttaaattagcttacctcatcatatttcaggaaagcaaaacgcttatgaccagtatgctgctaatacaagtctacagataatgctgtatgaaaaactagttttcccagtcatagctcgcatagtccacattttgcattacactttccccccctttttaaaattttaaatacaggtctttttctcttctttttttcaattttaattaaattatacaagacggagtctcagtatgttgcccaggctggtcttcaactcctgagctcaagcgatacaaccatctccgcctcccaaagtgctgagattgcaggcctgagacactgtgcctggccttaaacacaaatcttaattcattcttacaattattctgaggttacaaaaatggaaggggaagaaaaatggcaagtaggtaggctgacttcggcttcattatttggaaggacagtttgctcggttaaaacacactactgcctacaaaggccaagacaacagaaaaatacagacttacataaatagattttatatgtgacagcagtttgaatggagactttttcaatgcaatgagaaacagctgtgcttgggaataaatgacaacgaattttttttatctcaacagctgtcctgagagcatgtctctacatctctacctgcattctggattcagggagaaagccaaaacggacgacaagacactagatcagccgtgtccagccctttgattacaaggacttttccacctatctgtggtggtgggtagcatgaaaattatgcacaaaccttttttttttttaaccccatcagctgttgttagcattagtgtattttatgtgcggcccaggagcattcttcttccaatgtggccctgagaagccaaaagactggacacctgtgcactagatcaaaaggctactccttctggaagcaattgtaaagaatttctgacattatcttgacatgaaaaccaatgggtagtgggacagaatgcaaaatcttgaagaatttttcttgtcttttttttttttttttttttttgagtcacggtcttgctctgtggcccaggctggagtacactggtgagatcagagctcagtgcaggatcaagtgctcctcccgcctcagccacagtagtagctgggactacagatgcgcacaaccacccctggctaatattttattttttgtagagatggggtctcactatattgtccaggttggtctcaaactccttgactcaagggatccaggaaaggataacaggtgggagccaccacacctggctatgtgcatgaacttttaagacaaacacaaggccccacaaaagttaaggtttttcccacctaatttccagggggatcttttggtgcaaggctgagaagcccttaaaagtacacagacaactccaaagattcaagacagttcattcgggctgagccagcccactgggcagactgaccttccaaaaagacccacccatgacatacaccagatggctctccaagaatctcttcagtcctcagggtccctaacgtactggacagagctaggaaagcaaacccatttgcttcttcctgcaggaaaccccttgaggttaagaccccacaatcacatgaggatggagtggctcaccctcagtcaacaggccagactcaaggtggtataatgtcttaactgcgggtgcgggcctccaggtctgactcccaactcagtt

SEQ ID NO: 2401 - DNA, 2300 bp, Homo sapien
ttcaccatattggccaggctggtttcgagctcctgaccttgtcatctgcctgcctcagcctcccaaagtgctggaattacaggcgcgagccaccaggcctggccagcccacacaatatctcttcagcaatattcagtaggttaggggagtcacagagcccacccaactcaaggggagaaaacaaaggacccttattccccctttatacacttcatgatgatgagagtatcaaagtgcttgttgcaatatttatttcaccaaggaggaaaaggtcagtttggaccagaaaggtcagaaaaagttatatagggaaggcagttgataagctggttttaaaggatatggagcatttgaaaaagtggaatgtgcataaggctggaaatatcaaatatctaaatatagaacaggaacaatgatgaaaagactttcaaaatgcttagcaaaatgagaattatatttctttctcaacttttttgttctaacagcaaaagcaacagtggggatcagcatcaacttgggcaagtaagtttttcttgtcataaataggctgattcaactgaaaaaaaaatgtttaagtaagttcagctcatttgaagacgggtgaatactgtgtctaaggattttatgagactaactgggaaaagtcagtcagagtttagtttgaggtgagaagtgcttagtgttgacactctacctaattatagggaaacgtgtgcagttagtcctgagaccagatgcagggtagaaagaaagaggcgtgatgtagcagccattgattaggcaatttgggtttagcaagcccagtcaatgccctcagagggtcaacagtgtatacaatttagtccttgaaggcatcttttaaagtttcattcaaaagattttaatcattgtgaccataattttctgagaagaggcttttctaagatttgttattcacagataaatagttgtctaatttgtgtgtgtgtgtgtgtacatgtgtgcatgcgtgcattcgtgcatgcgtgcctatctagccttttttgaacacaatgactggcacctggtagataatatggttgaatgaattgtattattcatattctctcactgccaacttgaagaatctacatctgtttccaaagttttgcgcatataatactaaaacaaaaacggacatgttttagtaatacgtaccaattacaaattaaccattcctgcctggaataagcataggttttgttaaatagttcaattttcaaaatttgtctcttatgttatttccaatccttttttttttttttaacgctgatatattttgaatttacgaatgtgaaagctgaacttcaaaaaataaagggagaggaaacaaagctcgtgaaaaatatttaaaatatcttttaatgcgttataacatcctggagagaaatcaaatcaatgtgtttcaatgttacaacatagatttctcctcccctcccggataaagcactaatttatttaatttggttcagagcactgaatattccaagctacagcctcgtgggtaagagatagcattatcttaaacagtgttcggatttaacaaaggtcaacgtcttgtgcagtttacatagcatctactctcagtagcttttgcttcttgagctctacgtggctcctcagaagctgttaggcttaacaaacaaaaataaagtaaaatcagatacggtatggggccttgggacactgaaaccttcatccgtagaaaatcagttaagtcttcacaggctagaagagagggtgtgtgtgattagtaggcaaagcaaagaaagatcagtacaagttgtctggcagctggataaaaccttacacctgcgcaaaaataagcctccctcataagaaagcccaaagatgtccggggtcggggaggaggaaagtgtctctcatctgtcccatcaacgaaaattagtgaaatctgcctcagatgaagtgcaaaggccagtctgcagggatagtttcaacctctccccacgcgatgggctacacatcacctgcccaagctctctcccgacctgctagagcctagagggcggaggccggagaggctgcagccgggagtagcaccgcacatccgggaacgccagcagcgggctgagggctgcataactgatggaaggccgggcgcggtaagagcgtctcggggagtagggcaaggcggccgggcccctcccattccgccttttcttcagcgtcctgcccgcggcactggctgcgggtgccgggccacctgcgagtgtgcggagggattccggacacccgcggcggcgagctgagggagcagt

SEQ ID NO: 2402 - DNA, 2300 bp, Homo sapien
cctgccaccatgcctggctaatttttttttgtatttttagtagagacagggtttcaccatgttagccatgatggtctcgatctcctgaccttgtgatccgcccgcctcggcctcccaaagtgctgggattacaggcgtgagccaccgcgcctggcacttggttcttactgaacggatggaatttaagtaatattagtaagcattctgaatgccctctcaatgtacagtctgcccacccaatgtctattactatcagcttttcactaatatattgaagggggacagatgcctacaggaatagtctcaacaagggctgttccctttaagagacccagaaatccctggcaagaaccagatgcctgacataacctctgcagatctttacccccaatacccttgtaatcagactccgtaaaacacagaacaagagagctttgatgagtgatgaggtaggcagcttttctgcacagccttctgtctgcttgaaacaatcctccggagctcagtttcagttcaggtgaggttactgcagggctggttggcattggtggttgacagggagagagatgaggatgaagagggtgagaattgcgcttacagatcacctgagatcatctgcaaaggacatactgatatttgtaaaaacagaaacaaaaatgtagatggggacagattgtggagcctcgactactttaaggcaaagctaaacgcaccatttacccatcctcattgcttcaagaacatttcagcatcatagttctgatcctgatttgcctctgatttatctgcagctcacgtgaaaactctagaccccctctccccataatgatgcattacatagcattacatagcatagacagaaagcattgttgcaactgtactatttgggaatgaatttggggcacacataaggaaaggcataatataggtgctccttttctgtgggattggagtcactgtcacatcctaatgcatttggagctgagcaggcttgcagagggaaaagatgaaagaaatggctccattctgactcagatggggattgggacataacttcagcaggatacacactgcaagccttctctgagctgaaaatcagtctggctttgtcatactgcttcctatgagtgccaggtctcttgtcagtaacaaatgcagtgctgcatttgaggcagatctgtttgcatctatagctgcctttgcagcagttccagagagagtgtttgctagctccatacaaggaccctgaccagccagaaatctgcatgctagagcttaaccagaagtatttctagctatgacactatagaggcactacagcatctatgaagattaagcaacacagatatgagtgatatttgttagtgaaaaaaatctctttccaagtcttcttaaaaaatgattttcattctgtgatgttggaaactgtgaaatctgattgacagtgaatggtttgcctgcccagaagttcttgtgcttcttttgttttgattgctaccatttgaccttgggagattttcttcctatctccgttaaaatatcctgaccttcatcctacttcatgaagatggtaaacaacattttgaaatgatggggaaaaatgcaaaaagtaggagcatggtctctaaagtcagtctcttggggtttgaatcccagcttcaccacttaaaagtttgacttcttcaagactctgttttctcatttttaaaatggggatgaggtagtacctgcctcataggatggttggggtgataattcatttgggccctctgccagaagacaacccagattctggctctgtgccactagaaacatagtaatataaatggtagataggaatgttattatttttaataagcagcttctcataagtgattcagcagattcctggttcacaatgttctttaatggtgtaaaaagggttggcatttttggaggtgcctcacatcctatggccagtttagactttaggcttttttgttcagggctttcaatttcccagggcacggggaataagtaagtggaaggtgggtgaatattggcatgcatggtggtttatttagggctgtctttctgactgtcttctcttgtttttgttgtagagatccgtgctcagctcacagagcagatgaaatgcctggaccagcagtgtgagcttcgggtgcaactgttgcaggacctccaggacttcttccgaaagaaggcagagattgagatggactactcccgcaacctggagaagctggcagaacgcttcctggccaagacatgcagcaccaaggaccagcaattcaagtagg

SEQ ID NO: 2403 - DNA, 2300 bp, Homo sapien
ttcctggatccaagacatggctttcctgctcctaaactgtgcatcagccacaacccacatcttatcctggtcttgtggcttgtgtgtacattggcttggatgaacccactgcaaaaccctgatttggctgacttagaaaatctgcctgcccaccagctctctctatagcttctgtagacctgggaccttccctttgtttacatcccatgtgttagcactagcattcccagaactatagggaggaatgaataaagaggctgttaaaccctcttggtacaatctacatgctacaatgccaccccaatataatccatagaactaagggcctagaaatgcacttaggtattaaatatgctccctgaaagccccccaaaataggctgtgatcacatcaaaggcctgagctgactcattcactcagttaaactaaaacaccatagcaagggtaaaagacagaacaaaggtgtgatcaatgaccgaggaacataaaatttatacgtttctcagcttaaaaagaattcgtaaccatcaatatcatgttgacagttggatccacaaagtccatagaaaaacctgtgaacaactctacaattatatctttgattttttcttctctagttaattaagatgtcaccagaagccctataagtaattatagcacatgacaaacatacagagaaaaaaaaatacacacagatgtgttagcagatttttaaaataaatgaaaccttgggaaatgactgaggcagacagtctggctcacccctggtagttcattctagagaaataaatacctgtctgtgccaaagtggaatgacgtcactcagaaatccacacacttatcaaagcagtaaccacccccttaagagcaagcatctctctggcaccaggcatgagcggagaagtttgatctacagccagaaactcctcctggctagcaaattgtactgtagtatgccaaatagcaataagccactgagaagaaagggtatccataaagatctccccctcccaaacacccgtccctgggacaatgagtccccttacatggctcataacaacaatgaaaaggagggaaaaaaaataaaattcttgattctgtgaaactatagatctaaatggaatgaagtctacacagtcatcagattggctgcatgtgtcattatcagttctcatgtgttatttggatatttatcttgcctttattagaaggaagtctctttttgtgtgggggtgcaggaggaacaacccccaggcccagtaaggaattctcttgaggacagggtatatttagaatgtttaatgaacacctatcaccaagaataggtgggtccttaatcagtattgactaacaacagatgccagagccaaagcaatcctgtaaatgttgaggacagaaagaccatgattcatttaatgactagttaatatgttcagcctccaccaatcttgccaaatcagctgctccagtgtgtatctgtgctcactctctgggtggctactgaatgaccaaatttgtatgtccattggcttgtgtactctaaattacagcatattattaaccatgttgatactttactggcaaaactttaaagggctgagtggtataagagaagccctagtcaatttccaggttagtagatcaaattagcgagttcaggtccttaaggaatctggatgaacaatgtgaaactccatctacactctgtggaaagcgccttgaactatgcttaagacacagagtctaggcttagctctgccacttactagccaggtaactttgggcaagtcacaaatgcattctgggtctcaaaatctcttcacctgttttaaaaagtaaatggaagccaggtatggtgacacgtgcctgtactcctggctactcgggaagctgaggtgggaagatcgcttgagcccaggagcttgaggccatagtgcacaatgattgtgcctgtaaatgaccagcctgggtaacataggacctgtctcttaaaaaataaataaatagagacggaggtagagggaggacacagagccgcgccgcctgcaccagagaccttcgcctcgccccgccggttcctcaccctcggggagcaacatggataatctcagtgataccttgaagaagctgaagataacagctgttgacaagactgaggatagtttagaaggatgcttggattgtctgcttcaagccctggctcaaaataaatgattcagtgtaggggggaggagccaagatggccgaataggaacagctccggtctacagctccagcgtgagcgacacagaagacgggtg

SEQ ID NO: 2404 - DNA, 2300 bp, Homo sapien
acaacaggttctggagaggatgtggagaaataggaacacttttacactgttggtgggactgtaaactagttcaaccattgtggaagtcagtgtggcgattcctcagggatctagaactagaaataccatttgagccagccatcccattactgggtatatacccaaaggactataaagcaactgctttctaagtgggatggctgaagcaagagaccttaaatcacttgactgtcttcacaaaacagaactgaagcagaaccagaagtcccctgatagcctttcagggacaccacctacaaatacaccgtaatccctcatactccacacgccacttcagggaaagggacatgaggcaggaatacaaatatataccatctgtgacacttcctaagctcctggcttcagagtagccatcctgataattattttttaaagtccacattataaatgtgcaagttaagtgagttatggaaatcattccagatactggttcaccagtaacatcagtttagccctaaatattgtcataagttctctgataggctcatgtgatttaagctggtgctctgtcaagactagacttaggcgttttatcctttttatgacattatgtatgttgaagagaatatatgaatatatataaaaccttcattatcacattattctcaatccagcattttctcagcccctgattttcatgttagttcagcattcttacatctttacagattttcatctaagactacatttctattgttttatataatcagcccccctaagatcaacatgtccacattttttggcaaagacaaagcctactgatttcaggatcattattttcctttttcaaaagcacaaacccaaactgagaaataaatcaagagaaattctccttttttctatgctaatttagaagtagagtctttatttcttttcaaacccaaagagaatcagacatacaatatgaatttatctactttcgcttgctcagactgagaggaaagattaatattttcaggctgttagtcaaaactgttcattcaaatattatttaataaaatccaagaaccagctaaaaagtcgcttaagctaagaaaccttcaccagcctcatgggaaattgtgtacagttttccactagaatagcctataaatgcttactgaaaatgtctaagttcatatcttggtaactaacattttaattcaatctgcagaataatatatgcttctttagtgctaagatatgaatattagaggcattctttcttaaaatttctatttagttatactttcacaaataactatataatattaaaattctgcatgtggcataaaacatattttaatggagaaggtaatgtgtagggagtttatttctgtttgctattagaacttgtgtttattcttggttaaaaaaactgcagattacaacatagaaaaaaacaaaagtatgttgtatatctcttacagtagaagataaagagtagttctaaatttagaaaggaaaaataaatatacacagtgaaaatatgtgtcagtgagatgttaatcaaagatcaactattgctgagaccagcaatattaaatccctgcacaattactcatattataatgagaattttaaaaagaaaatatgaacacataacataatgaaggcagaagtcactctcatccttcatctttgtattcccaattcaggaagctggtatagtatcttcattataattactattcaacaaacatttgtaaaatgaatgaataaggaatgaatgatgagaaaaatgataaacatctccctctgtctcctgggagttaactgcactactttcttttaaatttaattaatcctcaatgtccttgtaaaatagccaaagggaaaatgtatttacattactctaaatattgatgcaatctacaaaaagtgttaaacaacttcctcaaagtaaataaaatgttcacaatccagctaggataaaaggatttaaatcatttcctaggtagagggctttcaattagagcccctgctgcattaaccatgggaactcatctcactctcttcatgatggagccctgagtgttgctgctaatctgtactctaccattctaatgcttttaaggttccttttcagcccttcctcctcgtaatccacaaatactgagaccaaggcattttttgggtcagtcctaatttcaagcattctatcctgccctccccaaatgaactcacacttattagaccatatgttcctatattagttcaggaagggggaaaaaatgttaatcacacttgtatataagaga

SEQ ID NO: 2405 - DNA, 2300 bp, Homo sapien
caggaaatatcctctgctaccaagtcccaacagatgattcaactggtccttaatgaataaaaggtgatcaaacaagaaaagagacttatactgtttgaaggaaagatgaatgtctcttctttccttaaacaagaagtagtactaacaaagattccttgcttggccaaactttagtcagatgtctatcttccttgcaaaatccaacttttttttttttatgtcgtacaatgtgatgttttgttctttttaaaatttattattattatactttaagttttagggtacatgtgcacattgtgcaggttagttacatatgtatacatgtgccatgctggtgcgctgcacccactaactcgtcatctagcattaggtatatctcccagtgatatccttcccccctccccccaacccacaacagtctccagagtgtgatgttccccttcctgtgtccatgtgttctcattgttcaattcccacctataagtgagaatatgcggtgtttggttttttgttcttgcgatagtttactgagaatgatgatttccaatttcatccatgtccctacaaaggacatgaactcatcattttttatggctgcatagtattccatggggtatatgtgccacattttcttaatccagtctatcattgttggacatttgggttggttccaagtctttgctattgtgaatagtgccgcaataaacatacgtgtgcatgtgtctttatagcagcatgatttatagtcctttgggtacctacccagtaatgggatggctgggtcaaatggtatttctagttctagatagaatgtttcctcttataactcatagtgaatatgactggacaatgaaactattttgtaatttctttcctgaaagataaaggcgttagaacatagaatctttcattgattctacagaatcttaagactccttcagagatggcagtcattcctaccgtgctgaacatcatgttgtcacggtcagaatcagaactaaattgattaagggtctgaaacagtttggcactcttgggcacttattctgataagaaagctgatgagacagggtaatgaaaagaggctgcaagaaatgaccattcatgcattcagccaacatttaggccaccctcctgtattccaggcactgtacgtggcactgagaatgcaaagcaaaacgagtcatggtctactggtgggagccttctcagcggagaaaagatcaataagaaaagtgcctgctggagacctctcctagggcataaaccaatatagaggtggggcagctacgtcaccctgaggtgtccttaggcagaacagaaagtgagaatcagagcagtatctcatttctgaacacctggattgtagctttccctggactgactgtcaaaggaggtggttttaaaaagcaagccaaacaggtttccatcctttaggaagaccctggaacgtgccagttgattctgacaatttctcatgaacagaaacacctaggaagggagaactggtgagtcttttcaagaggaggaagtccctcaaaaggggctgtgtttcgcaaacggcgccccaaaagggctgaaatacttcgatctggaggaaaaagactcaggcactgagggaaggggagggtgcacatctggagtaatttcaaggctttttccgtgttatctgaggtggcaacaagtaaagatttgttcgttttattatttttttaatttttaaagattttcttttccctccttttccccctcccggccactccggtttgtgtttgccacaagactcataattcctttagaaagtggagtcgaattcataaaagtgatggggggagagcgcggagagggaaggctgggagccccagggagtcttcactacctacactgccgctcagctcccggcgcgagtggaggtcggggtggggagacgcgactcctgcccgggatggctgacactctgcgagccccggcggcccgcggccgggccgggtgactaggcggagggcgcggagggtccgcggcgggcgggtggcgctgcagcagcctgggcacggctgccgccgcccgcgggcgagagtgtgcacgggtgtggaaggccggagtgcgggccgtgaggggtgtgcgcgcttgagccggagcggggctcgcccctcgtcggctcccgccgcccagccggtgatcgctctccggccgtccccggcaccctcggccccccacggcggttggtccgggcgggggaaggagaaagtgagactcggtttcatcaccaatccatcgccagaaggggaggaaattggaat

SEQ ID NO: 2406 - DNA, 2300 bp, Homo sapien
atttcttatctgacaaacgcaacctttaaaagagcctaaatggtcaatcactactcttaactgcacttgtgtacataaacagtacaagtttaatgagattaaacttatttagcaaacaaatcaatctgactttgattatctttgacagaaatgagagtgaatatagagagaaaagttatgtttcgggagaaaactgcagtgcacccaatattagattctagctgttttttttttttttttctgaggttttattatctgcctgcaatctgcaatagatcctcaatttttctagtttactacaatatttagctacaatactccaaattaatatttcatttttttcctgctattctggcttggaatcactaaaattataaacttttcttttcttgaagtccttcaaactgaaactggatgacttgacataagcttcagaaaaattaccacaacagcttgtgtgtggcccatctttatggcattcaaactgcaaactaatccaatgcctcttctcactccagctgaagatattaaaagcccagcatctagaaatcttattgatcagctgccctctgggctcagaaactgtctttatagttcgttccaactattaatcttttttaattttatttttatagaaactaaacttcccacattaaaggcctgatagctcacactatccaggaaatatcctctgctaccaagtcccaacagatgattcaactggtccttaatgaataaaaggtgatcaaacaagaaaagagacttatactgtttgaaggaaagatgaatgtctcttctttccttaaacaagaagtagtactaacaaagattccttgcttggccaaactttagtcagatgtctatcttccttgcaaaatccaacttttttttttttatgtcgtacaatgtgatgttttgttctttttaaaatttattattattatactttaagttttagggtacatgtgcacattgtgcaggttagttacatatgtatacatgtgccatgctggtgcgctgcacccactaactcgtcatctagcattaggtatatctcccagtgatatccttcccccctccccccaacccacaacagtctccagagtgtgatgttccccttcctgtgtccatgtgttctcattgttcaattcccacctataagtgagaatatgcggtgtttggttttttgttcttgcgatagtttactgagaatgatgatttccaatttcatccatgtccctacaaaggacatgaactcatcattttttatggctgcatagtattccatggggtatatgtgccacattttcttaatccagtctatcattgttggacatttgggttggttccaagtctttgctattgtgaatagtgccgcaataaacatacgtgtgcatgtgtctttatagcagcatgatttatagtcctttgggtacctacccagtaatgggatggctgggtcaaatggtatttctagttctagatagaatgtttcctcttataactcatagtgaatatgactggacaatgaaactattttgtaatttctttcctgaaagataaaggcgttagaacatagaatctttcattgattctacagaatcttaagactccttcagagatggcagtcattcctaccgtgctgaacatcatgttgtcacggtcagaatcagaactaaattgattaagggtctgaaacagtttggcactcttgggcacttattctgataagaaagctgatgagacagggtaatgaaaagaggctgcaagaaatgaccattcatgcattcagccaacatttaggccaccctcctgtattccaggcactgtacgtggcactgagaatgcaaagcaaaacgagtcatggtctactggtgggagccttctcagcggagaaaagatcaataagaaaagtgcctgctggagacctctcctagggcataaaccaatatagaggtggggcagctacgtcaccctgaggtgtccttaggcagaacagaaagtgagaatcagagcagtatctcatttctgaacacctggattgtagctttccctggactgactgtcaaaggaggtggttttaaaaagcaagccaaacaggtttccatcctttaggaagaccctggaacgtgccagttgattctgacaatttctcatgaacagaaacacctaggaagggagaactggtgagtcttttcaagaggaggaagtccctcaaaaggggctgtgtttcgcaaacggcgccccaaaagggctgaaatacttcgatctggaggaaaaagactcaggcactgagggaa

SEQ ID NO: 2407 - DNA, 2300 bp, Homo sapien
tactattgttcttaggatttggaacaaaatgcttctttctttgacaaaataaatgttttctttaaagaactcttgattgatcctggaccattgtagaaactgaagtcctatcaatgcaaaaaaatatgacaacatgagctgcttatcatgaaataagtgttttccaattaactatcctgcttcatcagcaggtaggaataatagaatctatacctatgtcttcatgggaagttctctatggccagttgattagtgagggaaaaattgagcctgatttacagaagtcactgtacaacatcacagcaacagccaaaagtagattgcttaggcattataacctacgtgaatgcaattttaaaagaaattcagcctatgtaattggttgtccacgatgtctagaaggagagatattattgatgtatatgtggcagctaataatttgtctagataattagggacttggggccaggcctgatggttcacacctgtaatcccagaacttttggaggacaggacaggtggattgtctgaggtcaggagttcgaaaccagcctggctgacatggtgaaactccgtctctactaaaaatacaaaaattagccagatgtggtggtgtgtgcctgcaatcctagctacttgggaggctgaggcaggagaatctcttgaatccaggaggaagaagttgcagtgaaccaagattgcaccactgcactccagcctgggcaacaaagtgaaactctgtctcaaaaaaaaaaaaaaaagaaaagaaaagaaaagataattagggactcagaaagacaaacactgaaggattggtggcaatgagttttggggaaaaaatatgtagatgaaccacagaaaatgagccagagtgtaagaatatttgtgcttaatacaaatgctcaccaaactatcatcaggaaggttatcaaatagatatgaaggtatgaaacaatctctttcaccaggcactacattgcttgctcagaaggctaataaacagcaacattggtggtagcagtagagaatacacataggtttagcaacatgttggactttaccactctcgcttacaaaagcctatttagctgtcaagactattaggtgtccaacacacaagcaacaaagtccaaggctaagcacacaataacatatcctgggtgaataaaccagtcaccttttgtcagacttgttgattttactggagctcctctatgataaaggcaacaaggaattttgtaaatggaatctacctttatccttgaattacatttgctttacctgacatcatttttctctgatcgccactctccatgggtacattgaatgccttatatatactgccataatatcctgttctacatccttctattaaaagaacttgttgtataacaaatgagtagatattcattggactcacctggtccaccatttatcctatcaccaaccaaaattattattattatacaatggtgaatattttattaaagactcaatcacagtgccagctggagacaatggcttataaggttgtactcatgctagacgatgtggtggtgtatcctctgaactagtaactaagtataagcttgtctggtgtctcccatataaaaaatacaacaatctttgatatttgttatgaacgttgaagtgactccttttgtcattacatctaatgatccactccaaatacttgtctcttgtctctgagattctaggtttttgcagaattagtacccaaagggagagtcttagcagtattccattttacaatccatccttcgttagaggatgagagacttctatctagccttttaggttgcctgagacctttaaacaaactgtcaaaaatttaaaatttaaaatgcggctacattgttgcatggggtagtaaatcttgaccttaaaactggtatttgtaagaaaaacagaaagaattcagggatcccctttgatggctcctaattctatacagtcctgtaaatattcctgaagactaaccaggcgtggtggtgcacacctgtaatcccagctactccagaggctgaggaagagaatcacttgaacctgggaggcagaggttgcaatgagctgagattgtgccacttcactccagcctgggtgacagagcaagactctgtctcaaaaaaaaaaaaaaaaaaaaaaagaagaaagaaagaaagaaagaaagaaagaaagaaagaaagaaagaaattaatgaagactgccacaacttggaagcaaccaaggtatccttcaataggtgactgcataagcaaactgtggtatattcctacagt

SEQ ID NO: 2408 - DNA, 2300 bp, Homo sapien
acaacaggttctggagaggatgtggagaaataggaacacttttacactgttggtgggactgtaaactagttcaaccattgtggaagtcagtgtggcgattcctcagggatctagaactagaaataccatttgagccagccatcccattactgggtatatacccaaaggactataaagcaactgctttctaagtgggatggctgaagcaagagaccttaaatcacttgaccgtcttcacaaaacagaactgaagcagaaccagaagtcccctgatagcctttcagggacaccacctacaaatacaccgtaatccctcatactccacacgccacttcagggaaagggacatgaggcaggaatacaaatatataccatctgtgacacttcctaagctcctggcttcagagtagccatcctgataattattttttaaagtccacattataaatgtgcaagttaagtgagttatggaaatcattccagatactggttcaccagtaacatcagtttagccctaaatattgtcataagttctctgataggctcatgtgatttaagctggtgctctgtcaagactagacttaggtgttttatcctttttatgacattatgtatgttgaagagaatatatgaatatatataaaaccttcattatcacattattctcaatccagcattttctcagcccctgattttcatgttagttcagcattcttacatctttacagattttcatctaagactacatttctattgttttatataatcagcccccctaagatcaacatgtccacattttttggcaaagacaaagcctactgatttcaggatcattattttcctttttcaaaagcacaaacccaaactgagaaataaatcaagagaaattctccttttttctatgctaatttagaagtagagtctttatttcttttcaaacccaaagagaatcagacatacaatatgaatttatctactttcgcttgctcagactgagaggaaagattaatattttcaggctgttagtcaaaactgttcattcaaatattatttaataaaatccaagaaacagctaaaaagtcgcttaagctaagaaaccttcaccagcctcatgggaaattgtgtacagttttccactagaatagcctataaatgcttactgaaaatgtctaagttcatatcttggtaactaacattttaattcaatctgcagaataatatatgcttctttagtgctaagatatgaatattagaggcattctttcttaaaatttctatttagttatactttcacaaataactatataatattaaaattctgcatgtggcataaaacatattttaatggagaaggtaatgtgtagggagtttatttctgtttgctattagaacttgtgtttattcttggttaaaaaaactgcagattacaacatagaaaaaaacaaaagtatgttgtatatctcttacagtagaagataaagagtagttctaaatttagaaaggaaaaataaatatacacagtgaaaatatgtgtcagtgagatgttaatcaaagatcaactattgctgagaccagcaatattaaatccctgcacaattactcatattataatgagaattttaaaaagaaaatatgaacacataacataatgaaggcagaagtcactctcatccttcatctttgtattcccaattcaggaagctggtatagtatcttcattataattactattcaacaaacatttgtaaaatgaatgaataaggaatgaatgatgagaaaaatgataaacatctccctctgtctcctgggagttaactgcactactttcttttaaatttaattaatcctccatgtccttgtaaaatagccaaagggaaaatgtatttacattactctaaatattgatgcaatctacaaaaagtgttaaacaacttcctcaaagtaaataaaatgttcacaatccagctaggataaaaggatttaaatcatttcctaggtagagggctttcaattagagcccctgctgcattaaccatgggaactcatctcactctcttcatgatggagccctgagtgttgctgctaatctgtactctaccattctaatgcttttaaggttccttttcagcccttcctcctcgtaatccacaaatactgagaccaaggcattttttgggtcagtcctaatttcaagcattctatcctgccctccccaaatgaactcacacttattagaccatatgttcctatattagttcaggaagggggaaaaaatgttaatcacacttgtatataagaga

SEQ ID NO: 2409 - DNA, 2300 bp, Homo sapien
aaatatcctctgctaccaagtcccaacagatgattcaactggtccttaatgaataaaaggtgatcaaacaagaaaagagacttatattgtttgaaggaaagatgaatgtctcttctttccttaaacaagaagtagtactaacaaagattccttgcttggccaaactttagtcagatgtctatcttccttgcaaaatccaacttttttttttttatgtggtacaatgtgatgttttgttcttttttttaaaatttattattattatactttaagttttagggtacatgtgcacaatgtgcaggttagttacatatgcatacatgtgccatgctggtgcgctgcacccactaactcgtcatctagcattaggtatatctcccagtgatatccctcccccctgcccccaacccacaacagtccccagagtgtgatgttccccttcctgtgtccatgtgttctcattgttcaattcccacctataagtgagaatatgcggtgtttggtttttttgttcttgcgatagtttactgagaatgatgatttccaatttcatctatgtccctacaaaggacatgaactcatcattttttatggctgcatagtattccatggtgtatatgtgccacattttcttaatccagtctatcattgttggacatttgggttggttccaagtctttgctattgtgaatagtgccgcaataaacatacgtgtgcatgtgtctttatagcagcatgatttatagtcctttgggtacatacccagtaatgggatggctgggtcaaatggtatttctaattctagatagaatgtttcctcttataactcatagtgaatatgactggacaatgaaactattttgtaatttctttcctgaaagataaaggctttagaacatagaatctttcattgattctacagaatcttaagactccttcagagatggcagtcattcctaccgtgctgaacatcatgttgtcacggtcagaatcagaactaaattgattaagggtctgaaacagtttggcactcttgggcacttattctgataagaaagctgatgagacagggtaatgaaaagaggctgcaagaaatgaccattcatgcattcagccaacatttaggccaccctcctgtattccaggcactgtacgtggcactgagaatgcaaagcaaaaccagtcatggtctactggcgggagccttctcagcggagaaaagatcaacaagaaaagtgcctgctggagacctctcctagggcataaaccaatatagaggtggggcagctacgtcagcctgaggtgtccttaggcagaacagaaagtgagaatcagagcagtatctcatttctgaacacctggattgtagctttccctggactgactgtcaaaggaggtggttttaaaaagcaagccaaacaggtttccatcctttaggaagaccctggaacgtgccagttgattctgacaatttctcatgaacagaaacacctaggaagggagaactggtgagtcttttcaagaggaggaagtccctcaaaaggggctgtgtttcgcaaacggcgccccaaaagggctgaaatacttcgatctggaggaaaaagactcaggcactgagggaaggggagggtgcacatctggggtaatttcaaggctttttccgtgttatctgaggtggcaacaagtaaagatttgttcgttttattatttttttaatttttaaaggtgttcttttccccccttttccccctcccggccactccggtttgtgtttgccacaagactcataattcctttagaaagtggagtcgaattcataaaagtgatggggggagagcgcggagagggaaggctgggagccccagggagtcttcactacctacactgccgctcagctcccggcgcgagtggaggtcggtgtggggagacgcgactcctgcccgggatggctgacactctgcaagccccggcggcccgtggccgggccgggtgactaggcggagggcgcggagggtccgcggcgggcgggtggcgctgcagcagcctgggcacggctgccgccgcccgcgggcgagagtgtgcacgggtgtggaaggccggagtgcgggccgtgaggggtgtgcgcgcttgagccggagcggggctcgcccctcgtcgactcccgccgcccagccggtgatcgctctccggccgtccccagcaccctcggcccccacggcggttggtccgggcgggggaaggagaaagtgagactcggtgtcatcaccaatccatcgccagaaggggaggaaattggaatc

SEQ ID NO: 2410 - DNA, 2300 bp, Homo sapien
ttcttatctgacaaacgcaacctttaaaagagcctaaatggtcaatcactactcttaactgcacttgtgtacataaccagtacaagtttaatgagattaaacttatttagcaaacaaatcaatctgactttgattatctttgacagaaatgagagtgaatatagagagaaaagttatgtttcgggagaaaactgcagtgcacccaatattagattctagctgttttttttttttttctgaggttttattatctgcctgcaatctgcaatagatcctcaatttttctagtttactacaatatttagctacaacactccaaattaatatttcatttttttcctgctattctggcttggaatcactaaaattataaacttttcatttcttgaagtccttcaaactgaaactggatgacttgacataagcttcagaaaaattaccacaacagcttgtgtgtggcccatctttatggcattcaaactgcaaactaatccaatgcctcttctcacaccagctgaagatactacaagcccagcatctagaaatcttattgatcagctgccctctgggctcagaaactgtctttatagttcgttccaactattaatcttttttaattttatttttatagaaactaaacttcccacattaaaggcctgatagctcacactatccaggaaatatcctctgctaccaagtcccaacagatgattcaactggtccttaatgaataaaaggtgatcaaacaagaaaagagacttatattgtttgaaggaaagatgaatgtctcttctttccttaaacaagaagtagtactaacaaagattccttgcttggccaaactttagtcagatgtctatcttccttgcaaaatccaacttttttttttttatgtggtacaatgtgatgttttgttcttttttttaaaatttattattattatactttaagttttagggtacatgtgcacaatgtgcaggttagttacatatgcatacatgtgccatgctggtgcgctgcacccactaactcgtcatctagcattaggtatatctcccagtgatatccctcccccctgcccccaacccacaacagtccccagagtgtgatgttccccttcctgtgtccatgtgttctcattgttcaattcccacctataagtgagaatatgcggtgtttggtttttttgttcttgcgatagtttactgagaatgatgatttccaatttcatctatgtccctacaaaggacatgaactcatcattttttatggctgcatagtattccatggtgtatatgtgccacattttcttaatccagtctatcattgttggacatttgggttggttccaagtctttgctattgtgaatagtgccgcaataaacatacgtgtgcatgtgtctttatagcagcatgatttatagtcctttgggtacatacccagtaatgggatggctgggtcaaatggtatttctaattctagatagaatgtttcctcttataactcatagtgaatatgactggacaatgaaactattttgtaatttctttcctgaaagataaaggctttagaacatagaatctttcattgattctacagaatcttaagactccttcagagatggcagtcattcctaccgtgctgaacatcatgttgtcacggtcagaatcagaactaaattgattaagggtctgaaacagtttggcactcttgggcacttattctgataagaaagctgatgagacagggtaatgaaaagaggctgcaagaaatgaccattcatgcattcagccaacatttaggccaccctcctgtattccaggcactgtacgtggcactgagaatgcaaagcaaaaccagtcatggtctactggcgggagccttctcagcggagaaaagatcaacaagaaaagtgcctgctggagacctctcctagggcataaaccaatatagaggtggggcagctacgtcagcctgaggtgtccttaggcagaacagaaagtgagaatcagagcagtatctcatttctgaacacctggattgtagctttccctggactgactgtcaaaggaggtggttttaaaaagcaagccaaacaggtttccatcctttaggaagaccctggaacgtgccagttgattctgacaatttctcatgaacagaaacacctaggaagggagaactggtgagtcttttcaagaggaggaagtccctcaaaaggggctgtgtttcgcaaacggcgccccaaaagggctgaaatacttcgatctggaggaaaaagactcaggcactgagggaa

SEQ ID NO: 2411 - DNA, 2300 bp, Homo sapien
tttattttcactagtttccccttttgtttttttctgttttcaatgccattgatttctgctattatctgtattatttccttccatttgctttaggtttttttttttttttttgtagattcagtctcattcccatggcgcaggccggagtgcagtggtgcgatctcagctcactgcaacctccacctcccgggttcaagcgattctccttcctcagcctccagaatagctgggattacaggtgggtgctaccatgcccagctaatttttttgtatttttagtagagacggggttttgccttgttggccaggctcgtttcaaactcctcacctcaggtgatccacccaccttggcctcccaaagtgctcgtattactggcgtgagccaccgtgcctggcctgctttaggtttcttttacttgcttttttcttgtttcttgaggggggagcttaagtgtattcatttgagacatcccctcttttcttttatcccttttaaaaacttttgtatataattattattgtaggaagttaggcttgggcccgcaaactatggaagaacagaatatactaggccgctgctttaatagctggtgcctgcttgtcgcccacccccactcccccaccttagctgccttgtccaaaccaaagagtttagtctagaatggacatttactagcctgcaaaatagttcactacatctattcttatcagcttgcctgactgcccaggtcataagtcaaatacttgaaaagcccccgagctgaccatgattgcaatgcattatgggctgcaacaaaatacagggagacaaccctaaaaaaaaaaaacaacaacctaaaagtcccaacccaagatccaataggcgacatccgggaatactgtgaccccatagtactcagcctatgaggaaccgggggaggcacttccacactaggggataaattgcttgttgtaagcctactgggtgtgcctgcctaccagacacccgatcttgcaagactgtcattaataataagtcgcacttctgctgttttccgggtcttggagtccattctttgggtttggacgggtgagtttatttctcacgattatttccaggcaggccttgcccagtgggtggctcatgcttgtaatcccagcactttgagagggtaagcctggtggatcacctgaggtcacgagttcgagaccagcctggctaacatggtgaagccccgtctctactaaaaatacaaaaattagccgagcgtggtggcgagggcctgtggtcccagctactcgggaggctgagacaggagaatcacttgaacccaagaggcggaggttgcagtgagccgagattgcatcactgcatgcgacagtgcaagactccgtttcaaataataataataataataataacaataataataatggcacgacctaaagttatgcaagcatttgccttagataaaatttcaagttttcaaagttgttagctgggtggaccacatggctttacttcctatttcttggtatttcctaatcttgttgaaaaagtttttctttttctcaaaggcttatttcagtggaagcccatctgcaaaatctgttattaatttaaattagaaaatcattacaagtcccactgacatgtgggttattgtttttgcgagtgacctaaggccacttctcgggggagctgggggttgccttcccacgtctgcgcgtctgcaccccatgcccgggcctggaagtcagactcgggggcggtgctgcagcaccaggcctgcagtcctaagcgcggggtcgctccgggcccccgagggggtgtgtcttctgcccctttaacctggcaggggcggttcaagtggccctggaaatcagcgatttgtagggtcaagggctggtgctttaaaagagaggcggaggggagagagggatttcccggtctctgctgcactctgtctatccgctcggttactccttttcctggcccgcgcgaacccgctgtgctgcagaggcggccatgtacctttaaggccccgctgcgcctgcgccttgggctctcctgacgcgctgagcgggaccctgaggagccagctggcgcaggctatgggctgggcggcggttgagacagcggcggtattgggaggggtaggtgagggtcgcgaggctgcgtgagcatctgagtgaacgcggtgcttttgggaacgcgggacgggcgacctgtggcgccaggagcgggccgaggcgcggcgcacggatgccgtctggatgggaagttacggtttacagcgaagtccacccagcgtttccga

SEQ ID NO: 2412 - DNA, 2300 bp, Homo sapien
gcagcttcgggggcacgtcctcgtgtatcctgtggaggaccctgaccccgcaccccaccctcgaggccagaaatcagttgcctctggggacctgagaggcgagaccactcgcgcccctgacttgcaaagttggggtctttattggcctccgggattctgctcctggcggtttctccaggctggtgatgggcaacacatgaggcgcgtttgtagccatcactgaatcacctcatgactagcggggcaggcctctaattcaccgcaggatttccagtaggttggattgtggggttggtgtttgcactccaaagagttggcgtgatttccctgtatctgtctttctggcttgttagatcttctcatttggcgtcctttctccgaagagttaaccaagacgtttggcgtggttttcttgctttcctcctatcttttgctgctagagctgctttcaaaaagaagtcttttcttgcagtgataccttttctttgggttacagtgttgttcatcctttctttgccgaaagaatgaatcccagtgcttcacgaagttaaaggaaagatctgctggtagtgtttagtctttgttctgagctgatatgtgttagtagctttttgtttttaaattttattagtaaaatttcaccagtgaaccagaagctctttttttctgttgtgaaatgctagctttaagatttctgagaactttgtgtcaaagaaatctttgaaaagttactgaagtatacagagaggttcacaattttaaatgtgcaggtggtccgggcgcggtagatcacacctgtaatcccagcactttgggacgccaaggtgggcggatcacttgagcccaggatttccagaccagcctgggcaacgtgccaaaaccctatctctactaaaattacaaaagttagctgtgtgtggtggtgtgtgcctgtagtcccagctacctggtaggctgaggtgggaggatcaccagagcccaggaggttgagattgcagtgagccgtgatcatggcagtgcactcccgcctgggtggcagagtgagaccctgtctccaaaaaaaaaaaaaaaaaaaaaaaagtacagataatgaatttttaccaagtgaaccaccacagatcaagaaatagaacattactagactggggtatatttgtaggagtgacattgttggttttagaggtatatgaatgataaaacttagtattacatattgttgaacgttttcccaaagtggttgtaccatttagcagggatattctggttaccccacaaccttgctgatgcctgtcagttaaaaattattttgccattctagtaggggtgcagtaatgtatcagtgtgatttcattttgcattttcctggtattgagattgagtatcttttattgtcatttgtgtgtcctcttttgtgaagtgcctgttaaatctttttatccagttttcattgatatgcttgtttttctgttgatttgtaatacttttttccggatatgtgtcctttctacgatatatatgtattgcatttcccttttttcaatctgtagcttgccttttcgctcttttaatggtgcttattcatgaatggagattctctaacttttttttttctttttgagacaagatctcactctgttgcccaggctggagtgcagtggcacaatcacagctgaccgcaaccttgacctcccaaggctcaggtgatcctcctgcctcagcccccaggtagctgagacctacaggtgagcaccaccacactcagctcttttctatatttttagtagagatggggttttgccacattgcataggctggtctggaattcctaggctcaggtgagacatctgcctcggcctcccaaagtgttgggattacaggcatgagccactgcacccagcctgagattcttaattttaatgaaattatactttatcaatcttttcctttatggttactgctttttgtgtcctgtttaagaaatcaatgcctaacctaggagtatgaacacatttttctgtgttaaccttataacaattttattttagtttttgcatttctttttttttttttcagacagggcctcactctattgcccaggctagagtgccgtggcaggatctcagctcactgcaacctccacctcctggctcaagcgatcctcccacctcagcctcctgagtagctgcgactataggagtgtgccaccatgcctggcttaattttcatattttttgtagagatggggattcaacatgtttcccaggttggtctcaaactcttgggctcaagtaatcttccca

SEQ ID NO: 2413 - DNA, 1218 bp, Homo sapien
gatcctcccaccctcattcacttctgtcaggctagactctctctccttttcattggcttgtcttagctattaataagtctcggctgggcgcagtgggtcacacctgtaatccgagcactttgggaggccgaggtgggtggatcaggaggtcaggagattgagaccatcctggctaacacggtgaaaccccgtctttactaaaaatgcaaaaaaaaaaaatagctgggcgtggtggtgggcgcctgtagtcccagctactcaggaggctgaggcaggagaatggcatgaacccaggaaccggagcttgcagtgagccgagattgtgccactgcactccagcctgggagacagagcgagactccatctcaaaaaaaaaaaaaaataaagtctctgaccaggggcgctggctcacatcttaatcccaacactttgggaggccgaggtgggcggaacacctgagctcaggagttcgaaaccagcctgtccaagatggcgaaaccccatctctactaaaaatacaaaaattagctggcatgttacttggcccttgtaatcccagatgcttggcaggctgagggatgagaatcacttgaacccgggcggcagaggtggcagtgagctgagattgtgcctctgcacttcagcctgcgtgacagagtgagactctgtctcaaacaaaaaaaccaaaaaagaaaaaaattaaaaaagcaaaatgaaatcttttgtgctacacagaaacattggccactcatggggtaaaaatctcagggccaagccttgctttatagaaacgtataagcaagaaaagtgtagaagtgtttatgtcttggtttcaaggtgactgcatagctaagacaagttgacttaaaggagatcaagactggagatgacaagagtgaaaccagggaaacaacatcttcaaataagtaaacaaggctgccagtgacatccctcagtcctgattaagcctatttgatttcaccagtttttaacccatcatgtgtttgcctttcttctccccagtccctggccccacctcttctgccacaaacgtcagcatggtggtatcagccggccctttgtccagcgagaaggcagagatgaacattctggaaatcaatgagaaattgcgcccccagctggcagagaagaaacagcagttcagaaacctcaaagagaaatgttttctaactcaactgtccggcttcctggccaacc

SEQ ID NO: 2414 - DNA, 2300 bp, Homo sapien
ttgttaagcttctgtctcattgatctgtctaatattgacagtggggtgttaaagtctcccatgatgattgtgtggagtctaaatctctttgtaggtctctcaggacttgctttatgaatctgggtgctcctgtatagggtgcatatatatttaggatagttaactcttcctgttgaattgatccctttaccattatgtagtggccttctttgtctcttttgatctttgttggtttaaagtctgttttatcagagactaggattgcaacacctgcctttttttgttttccatttgcttggtagatcttcctccatccctttattttgagcctttgtgtgtctctgcatgtgagatgggtttcctgaatacagcacactgatgggtcttgactctttatccaatttgccattctgtgttttttaactggggcatttagcccatttacatttaaggttaatattgttatgtgtgaatttgatcctgtcgttatgatgttagctggttatttcacccgttagttgatgcagtttcttcctagcgtcaatggtctttagagtttggcatgtttttgcagtggctggtaccggttgttcctttccatgtttagtgcttcctttaggagctcttgtaaggcaggcctggtggtgacaaaatctgtcagcatttgcttctctgtaaaggatttatttctccttcacttatgaagctttgtttggctggatatgaaattcttggttgaaaattcttttctttaagaatgttgaagatgctggagaggatgtggagaaataggaacacttttacactgttggtgggactgtaaactagttcaacgattgtggaaggcagtgtggcaattcctcaaggatctagaactagaaataccatttgacccagccatcccattactgggtgtatacccaaaggattataaatcatgctgctgtaaagacacatgcacacatatgtttattgcggcactattcacaatagcaaagacttggaaccaagccaaatatccagcaatgatagactggattaagaaaatgtggcacatatacaccatggaatactatgcagctataaaaaatgatgagttcatgtcctttgtagggacatggatgaagctggaaaccatcattctcagcaaactattgcaaggacaaaaaaccaaataccgcatgttcttactcacaggtgggaattgaacaatgagaacacatggacacagaaaggggaacatcacacactggggcctgttgtagggtgtggggagggaggaggggtagcattaggagatatacctaatgttaaatgatgagttaatgggtgaagcacaccaatgtggacatgtatacatatgtaactaacctgcacgttgtgcacatgtaccctaagacttaaagtattaaaaaaaatatatatatatatacatacacacaaaaaataataaaggaaaactatacatatggaaaaaaaaaagaatgttgaatattgctcccactctcttctggcttgtagggtttgtgccaagagatctgctgctagtctgatgggtttccctttgtgggtaatctgacctttctctctggctgcccttagcattttttccttcatttcaaccttggtgaatctgacaattacgtgttttggggttgctcttctcgaggagtatctttatggtgttctctgtgtttcctgaatttgaatgttggccttccttgctaggttggggaagtcctcctggataatatcctgaagaatgtttcccagcttggttccattctccccgtcactttcagtacaccaatcaaacgtagatttggtctttccacatagtcccatatttattggaggcttgttcatttctttttactcttttttctctaaacttctcttctcgcttcatttcactaatttgatcttgaatcactgataccgtttcttgcacttgatcgaattggctactgaagcttgtgcatgcatcacgtagttctcgtgccatggttttcagctccatcaggtcatttaaggtcttctctacactgttcattctggttagccattcgtctaatcttttttcaaggtttttagcttccttgcgatgagttcgcacatcctcctttagctcagagaagtttgttattaccgactttctgaagcctacttctgtcagctcatcaaagtcattctccatcctgctttgttccattgctggcgaggagctgcgatcctttggaggagaagggatgtcaggtttttggaattttcagcttttgtgctctggtttctccccacct

SEQ ID NO: 2415 - DNA, 2300 bp, Homo sapien
tccaaataaaataattcctttcccatataagtatgtgtatatatgtattcattgtattttgaagataaatttttacacagtcatgttaatcgctttcatttaaggatttgagtttgaggtcttgcatacaatgtgatcccactgtatgactacacaaatgttggcaaaagtgagttcagaggaagtggtaggcaagtacttcccagttttggccagaagatggagaaaaaaataattctcaaaaaatgttaaaagtatgacatgttatatcttcttttcacagtaatttagacagaaattagcaaaatcaaacatgtataaatactttggtctgacaattccatctccaggtgtctacggagaaataaacaagtgatgcacgacagatacatgtgtcagtctggtccctgcagttgtatttgtaataatacacattggagcaatttcatggccatcagttagagaatgtttgaggaatgatccattcatatcaagaaggacatttcaaagatcaaagcctgatggaaatgctggagaccatggagctgataggagctcatgcgtgttgaccaattactacgtgacaggcattggctgcacgcttttcctgcactgctcatttaaacactggacaacctaagtgttctgatttagcccattggacagatagaaatggaggcacagaagattcatgtgtttaacttcaaaccctggcagattaggtttttcatccagagcctgtggcttcaccatagctgtgattcacgttctgtcattctccactttaggaatttccagtattccaaatatgagaagctgagaaaacaaacaacaaactcaaaaccctaaaaaccaggatacgtaagggtagatgtttgttgggtgtggattaaaaatggactttttttgccccaagcaacaaagaggcaccttagaaaatagacaagagacaagaggaagagaagctttaagagatatttggtccaaggaagagactcttcagatggaaggtcacgtcagctagaaacattaatatgactggatgggctcaaaccactgacttttcagtcaacatctgacagcactaacccagtgttccagagacactgcttgttaaacagtgaaagctgttgctcaattgtgtcatccgtaattgtcaaatattgccatttagtagcacaaggaagtattctctgttgccaagctagagtacccataactcttctgttttgttgaacattcttccccaccacaaaccctctttagaagactgggggctcctaaagcattgaggccgagagtcccgtccttgtgcatgtttgggcattgacccagggccaagtcagtgggagactcctccacgcctacgccaggtccccaggtgacaactgcagtctctggatctgaagtcatccactttcccattcctagctcacctcacccatcgtgaagcctggttagtattgccagagacccgagtgggcagatgcccacaccaaagacagaacctgctgcgtgcccaccttgctgatccctccctccttctagacaaaggcttcataagccagggaccttgggtttgctcacaaggcagcccctcacctagtaggcattagttcattatgtatatgtatatgtagtcctcaggttgtattccttaaatatatataatttaaggatatgtattatatatatataaatatatatgtaattccttaaatatataattttaatacaattttttttttgagatggagtctcactctgttgcccaggctggagtgcagtggcaccatcttggctcactgcaagctccacctcccaggttcacgccattctcctgcctcagccttccaagtacctgggactacaggcgcccgccatcacgccaggctaatttttttttttgtatttttagtagaaatggggtttcaccatgatagccaggatggtctcgatcttctgacctcatgatccacccacctcggcctcccaaagtgctaggattacaggcgtggaccaccgcgcctggccaaaacaaagtttttaaaagattcctttaataaacatttacaataacatcaagaaatataaacgacatagcaaatatgtgaaagccagccagactctcaatggcatccagaaacataaactacatagaaaagacatgaaagccagccaggcttggcttcgaatcccagcactttggaaggctgtggcaggagggttgcttgatctcagaagcttgaaactagcctaggcaacatagtgagccctcatctctactgaaaatcagaaaa

SEQ ID NO: 2416 - DNA, 2300 bp, Homo sapien
caaacctgcacgttgtgcacatataccctagaacttaaagtatttttttttaaaaagattatttctttgaataagtgttctactctttgctccttctcaagtccctctttaaggccaatgaatctttgattttctcttttcaggccctcttctagatctgttaagcattctgtgttcctgctcattcttcttttcttttttctcctctgactgtattttcaaatagcttgtttgcatgctcactaattctttcttctgcttgatcaattctactgagacccactaatgcattttccagctccagcatttgatttttttctcttacttcagtaatcttgttaaatttctgatatatttctgaattgtttctctgtgttttcttgaagttcattgcgctttctcaaaatagctattctgaattccctgagaggttacacgtctccatctctccagggttggtcactgagtgccttacttggtccatttgttgaggtcatattggcttcaatgttattgatactgttgatgtttgtcagtatctgggcattgaaggataaggtatttattccagcctttgcagtcaggtcttgtttgtacctgtccttcagaggactttccaggaattcaaagtgggctgacgagttccctaagccagtgatcactgcagccatttttgtactacagggcaccctaggcccaggtacactgcaattcttaccgattcctaggtccccagccctgtggacttgggggaagatcagggattgttctccgcattcccaggtaaagcccctagcttacttccctttctttcccccaagcaagaggaacctctcttcaggctgcactgcctggagtgtggggaggggtgatacaggcattcccatagctgctgcagctgctgccatcatactggctcacaccacaagtccagggtgttccagacctatgcagcatcagggcttgcccaaggactgcggccactacagcctgcctgccactgaaatttatttgaagcccaagaaatttccagtgataaagccggccagaactttgctgggttcttcctgctggggcagctggttcccttgtggcccagggtgggtctaaatgcttcttctgtgggcaccagcctggaatcaagtgctgtggggttctgcccagtgccgtgtatcactatggcaagactggtactaagtttcaatataaagtctcacactttcccccttgtccccaagccattagattctctctcagagaatttcctgtggttgggggagaggtgtcataggcaatgcaagactgtccttcctcccttcttcaatgcatcttttcttgttagcaagttaaaagcgggtgctatgatctctcacctggctagcccttgtgaaagtgttttcttacatagatagttgtttaatttgatgttccttcagagagaccattgctggagaattctattctaccatcttactccaccttctacctgtttttattttttaaatgtttctagtacataattgtgaagtgatagcttattttaatcttgggaatcaaaagcatgtagctaagaacttttcccaaggaatattttaaaatttttatatcaatgtttatggaatgacatactttttgattcaaggttcttaaatgtagttttagttttgattcaatgttatagaacactgttttttaaactgtgatctgaagcccacatgtaatggaatcatctggggtgcttatattaaaaaaatgcagattctagggctcacaccaactaaatctcctgggattggagaccaggaggtagctcctataatctccacagctgcttctcaggcacaccaagtttaagaaccattctttcatattttcagactggggattcttacaaaatgacaaagaaggaaaaccttaatcttttaaagttagagttcaagcattagactatatgcttcttaaacacagtttgtctttcccattttctctttccagttctttatactgtcaagggattggtgcagaaatgggaaacaaagcagtgaaagaaaaactatttatttctttatacacatcttgctttaacaatcaccaaaaagactttcattttctgtcacccaccctgtccaccagttatgttggccttcaatatatggcgttagcaacatatataaatctatatcatatatttatacacacaaacacattctaccagcactgtgaagacacagactaggctttactaggcttggggcctctcccatgccacttaaaaatgagcacaggtttgctctatgcaa

SEQ ID NO: 2417 - DNA, 2300 bp, Homo sapien
tggtttgactgggctcagctgggtggttctcacttagggtctcttgttttgggtcccatcagttgatggtatgagcgtttaaatgatggccatcattgcaaaatgtagtcagccacagtatcgtaacatagaagaaattcaggcatcaggtggtggttaaaacagaaggcatgaaaggttctatctagacttaggatgaaatgatgctaattattcattgagtaactgctgtgaatctatgtgatactggtgctgtaagggatgtaaaatgcagaactatgtttattctcacagaccttatgatttatctagggacatataattaacacatgtataacagttgaagaacagtgacatactaaatttttttttgatacggagtcactctgtcatccaggctggagtgcagtggtgccgtcttggctaactacaacctccacctcctaggttcaagcaattctcctgcctcagcctcccgagtagctgggattacaggcatgtgccactatgctcagctcattttttttgtatttttagtagaggcagggtttcaccatattggcgaggctggtctcaaactcctgaccttgtgatctgcctgccttggcctcccaaagtgctgggattacaggcgtgagctaccacgcccggcccgtactaagttttttaatgcaatactttatcagggtagaatttactcttaaatacctcctatggcttatgtgccagaattcagcttgggggagttccttagagatgttctcatagaaatctctacagaagcccccataactccataagttagcttccactctttccatacttactctttcctcttctgtcctgcattaggaaatatgattccctgattcaggatcaggcccgggaactgtcttacctacggcaaaaaatacgagaagggagaggtatttgttatcttatcacccggcatgcaaaagatacagtaaaatcttttgaggatctcctaaggagcaatgacattgactactacctgggacagagcttccgggagcaactcgcccagggaagccagctgacagagaggctcaccagcaaactcagcaccagtaagttggccacagggctttggaatactctcagtcacccccacagttccagcccctggtggccaccacatctccactgcaactttttatcctaaggtcctgtttctatttcatttcctggggctaatacaggatcaagactgctcagtggggagcatggagaggaaaacacagggctggagatgccatggttacaactatagaaacttcaccactaatggaatgtgacctgtggggcaggggcagcatctctctgatgctaagagggagtaggggacatgagatggaagggctttgttataggaggaagagccctgaaccaagaactacaagactcaagctctggcctggatgctgccaccaactcgctaaatgccttatccttgtggtgtctccatttatggcatggtaatgtgcatgcaggtactccacatatggataaagcgccatgctcttttatacatggtttaggcactggctgcagtagttcaagggctacattggttattattggggtcttctactcagaatttccagcgactatccaagggagtaaagtaggatcagacttgggagccacccagcccaccacctggtggcagatgcagaggtggggcagggcttcttgtcatctcctcagagaccagtgcaggttctgcatgaaagctgtggtggggcatatgcattggggagctagtctgcagcaggacatggaggctggagtgtcccgcagggcagctgggcaagggcctcatgattaatggaacaaaagacattataaatgttttaccctgatttagggcagaggaagtcatcatggtgaccggcaggtcagggacagtggggtcacttctctagagacacaagctgaggtatcccagaataactgttctggatgcacacatgaaatgctcactactctgtctccagataggctcctgcatttgtaatgcgggaagtgggaccagcctaatttcttatcgtctctttctaaatttggtttacagaggatcataaaagtgagaaagatcaagctggacttgagccactggccctcaggtaattcagaggagaatctgggaaagagattgggaccgaggcccaaagggtcaagggtggcggcaactccacaaatcaaggggaataaagcaaagtgctgaatgtattgaattcaggcattcattgaacacctcactgttgtttttaactaaa

SEQ ID NO: 2418 - DNA, 2300 bp, Homo sapien
tcttaataaggaacagacctgtctttaggaattcatactgataatttatgcaacaaatctgattctctaaatctctggcaaaagatgcaacagacatttttgaagacaaaaaaaaaattttgttggccatgtttaactcaccttactcgttttgccgtttcttccttgccgtttcttcctagcccatgactgaagagttgctgaaacaacaaaagctgaattcacatgagaccactataactcagcagtctgtatctgattcccacttggcagaactccaggaaaaaatccagcaaacagaggccaccaacaaggtatgattagtactatgccctaggagatgacaaggttttcctgaggatgtgactggctctagcctgagtctgtcaacctttgtaggacttgggagatgaatactgtgtactccttgtgctctagggaatatttcatgtaaaagtgtagttcttctctttattcttatgaagattttagcttgttctgtacagatcataatttctggtgcttttcaggtgtgtaattaaaacttgcatgcaggccggcgcagtggctcatgcctgtaatgccagtgctttgggaggccaaggcaggcggatcacgaggtcaggagttcgagaccagcctggccaacatggtgaaaccctgtctctactaaaaaataaaaaaaaattagccaggcgttgtggcagacacctgtaatcccacctactcgggaggctgaggcaagacaatcgcttgaacgcaggaggtggatgttgcagtgagccaggaccatgccactgcactcaggcctgggcaacagagagagactctgtctcaaaaaaacacttgcatgcagtcttccactgtaaaaggcactgagataggaggtctgtgttttttattttagcttaacttgttactactttctagcccatgaattttaatgtctggcttagaagaaaattgctacaatttgggatgctgaacttgtggcctgggtgcccttatagtgccctctcctatgctagatagcagaagctctttggtccttgtataagggatccatattagaaaccacttgcctacttggtccatgtggacaagttcctagtatggctgccatcatagagagatcacagtgcgtgaaaattgagacaatttagtattgaaggaagtatttcatttctcctgctactttttgttgctgattgacttaccactttaatggttactctatgtaggaaaaataacaaggtaatatcccctaagaaattctttaaatcctagatttgaggaaaggctttattcatttgaggctaaaagacatcattgacctaaaaaactgtttttctttgctgaattcagattcttcaagagaaacttaatgaaatgagctatgaactaaagtgtgctcaggagtcgtctcaaaagcaagatggtacaattcagaacctcaaggaaactctgaaaagcagggaacgtgaggtaacatatttaccaatcaaggacctgtgtggaaacaattggtcccttcaaagtagacaagtattttatattttgtcaaaatggatattgtcagactagcatgtcttagcctggagaagttgtagcttaatctcaattgatattttggaatagtcctgttactaaaatgtgtacaggtgatataatggaatttataattagtttactaacatatttgatattccctctctcattttcagactgaggagttgtaccaggtaattgaaggtcaaaatgacacaatggcaaagcttcgagaaatgctgcaccaaagccagcttggacaacttcacgtatgtgagggtcacgtaggacaggagagacttcagttggggatgtgccattttggttgcagtcttgattttatttttagtctttgtgggagctcagtgcttgccctccttgtgattgtgatttctactctcttttcagagctcagagggtacttctccagctcagcaacaggtagctctgcttgatcttcagagtgctttattctgcagccaacttgaaatacagaagctccagagggtggtacgacagaaagagcgccaactggctgatgccaaacaatgtgtgcaatttgtagaggctgcagcacacgagagtgaacagcagaaagaggcttcttggaaacataaccaggtaaatcattaactattttattgccctaaatgctgactttgccctgatcataactttttagcaggacagtttgtgttgaacccttgagtcagttgcataatctaagtatttcagttcaacacttgctgccc

SEQ ID NO: 2419 - DNA, 2300 bp, Homo sapien
aagaggtttaattggctcacagttctgcaggctttataggaagcatggtgctggtatctgcttggcttctggggaggcttcaggaaggtgaagggggagcaaacaagtcacatggccagagcaggagcaagatggagcggtggaggcaccacacacttttaaatgaccagatctcagaaaaactcactctctattgcaaaggtagcacaaacccatgagggatctgccccccccaccgccccaaacacctcccaccaggccccacctccaacactggggattacaattcaacatgagatttggtggggccatatattcaaatcatatcacctactaagcccaaagctctaagaactgtccttttctcttacaatggagctacaagattttgctttggtgattaagagaacaatacaatcttatgtaggcagggccccataatgttttaaagttactgaaaatattccaattcatagtaaaataataatattagctattatttaatgagcgaaacacggttaaagcatttcctcaaaatcatctcatttagtcttcaataagaagtttgggggcttattatgaactctcagagatggcatttggatgtcttcaggcttaggagtatggactctgtcctggggatgaggttcagaaaaacttagatgttgctggccttagcttacaaggtcaagttagtaaaaatttagcatgattagaactgggaaatgtcctgctctaggggactgcaagtgattgctgaggttgttcctcttgttacgtgtctgaatgcctctcaagccaggaagataattccttattaaaaatggccggaggtaccagcattctacctagtcagggctccagcttccctcctctttgtgtgcaatctaagttttggacccaagggtggaggacctatcactgtacaatgctgagtaagacatggttttcaccgaagtcagtgaagttcccagtcctttctggcgcgagctgcattcccagacactccagctcttacggaaagaagcactgtcttttgcgctagtgtttgtctaccgtcccctgtcctaaaataatgactgccctctacctgagggaaagggacttcaatggtggtaatctactcgcggctggctgcatccttaaaaaagcccatttctcttctactatcttcaagatcttggttaaccagattcacattgtatgtgccggactctttctcaggtgactgctctgtgcttttttatctaaagaagggcaagtcacccacgggtactaaccctcccccacccacatcaagggagaaacactcctctactcttttctggacattcctgttcagagtcgaggtaagggttgcacggccccgcccctccgttaccaagccttccctcgcctgcctcgcagcctcaggcccttagaacccaggcggggcggggccgggaaaggtgaggctgctggcgggaagcgggggcggcgcgcagcggtacctagcggcgctgccccgctggcagccggaggacgtggcactgtccgagaatgcagggaggggattcgtctttctcctccccgcgaggaggagcctcgacatcctgcagaggcgggaggatccttgagggcactggtgcgactttcaggtgaggtcttagcagatgaaagcggctggctgtggcccgcgccagtagtgctttctgctccgcactcgccgtgagccaggtgtgcaaccggatttggggcgagggtcgcgctggctacctcgcatgcgcagagccggaagcccgctgaccggactacagctcccagaagagccttgtggaggccgcagacgcgaagccgctggcgccatcttgaaatctgatcctccatccccgaggctttgcgtctgcgcggccggccgctgctgctccgggagcccagtctgctaaaaggggaggacgttgaggacgcggcggctggcgggagagacagctggggagagacatggcagggtcggagcgcggcctgcgcctctgtcactcagcatcctcttaggcgtttccacgcccgccccctgcccgaggggcggggctgacggctctggtacccggagtcggcgcgcggggcaggggcgcgcccctgcagagtggggaccccactgggctgtgccatgctgaccggagaccaccgaggcgggagacagagcgcggcgaagagccattgagtggtcacccagtagccgccgccgccgccgcctcgggaagcttgccacccgctaggagggaagatgaaggagatttgcaggatctgtgcccgagagctgt

SEQ ID NO: 2420 - DNA, 2300 bp, Homo sapien
taaagcaaacatattcttcaatggcaaattgccttttctccatttgtattgacctgtatgtctacaccaagctatctatatactgtcattacaatttggagactatcagttagatgcaaaatccttttgaggaacagagaataacccaaaatataattcagggtttgctcttgaagagcactttgtttcattcacattttcctaataggaaaatgtggcttgcattgacagtaaaaaatgagatctttattatacttaagactgggtacagcagggtagtgtcctggcaggcagtctgtctttccatcagtcagggtgagtccagaaactttgcctttctatagatcaccatagattccaaagcatgttgcttaatttcttccaactttgaagctcacatacctagaggcaggcaaaaatgcagctgtggttttacttgaactgcttttctattcttggtttttgagtcagaatatacatagtagatgaaattacatatgcaaaattctatagcctatgatattaggccattcttgcattgctatacatacttgagaccaggtaatgtataaagaaaagaggtttaattggctcacagttctgcaggctttataggaagcatggtgctggtatctgcttggcttctggggaggcttcaggaaggtgaagggggagcaaacaagtcacatggccagagcaggagcaagatggagcggtggaggcaccacacacttttaaatgaccagatctcagaaaaactcactctctattgcaaaggtagcacaaacccatgagggatctgccccccccaccgccccaaacacctcccaccaggccccacctccaacactggggattacaattcaacatgagatttggtggggccatatattcaaatcatatcacctactaagcccaaagctctaagaactgtccttttctcttacaatggagctacaagattttgctttggtgattaagagaacaatacaatcttatgtaggcagggccccataatgttttaaagttactgaaaatattccaattcatagtaaaataataatattagctattatttaatgagcgaaacacggttaaagcatttcctcaaaatcatctcatttagtcttcaataagaagtttgggggcttattatgaactctcagagatggcatttggatgtcttcaggcttaggagtatggactctgtcctggggatgaggttcagaaaaacttagatgttgctggccttagcttacaaggtcaagttagtaaaaatttagcatgattagaactgggaaatgtcctgctctaggggactgcaagtgattgctgaggttgttcctcttgttacgtgtctgaatgcctctcaagccaggaagataattccttattaaaaatggccggaggtaccagcattctacctagtcagggctccagcttccctcctctttgtgtgcaatctaagttttggacccaagggtggaggacctatcactgtacaatgctgagtaagacatggttttcaccgaagtcagtgaagttcccagtcctttctggcgcgagctgcattcccagacactccagctcttacggaaagaagcactgtcttttgcgctagtgtttgtctaccgtcccctgtcctaaaataatgactgccctctacctgagggaaagggacttcaatggtggtaatctactcgcggctggctgcatccttaaaaaagcccatttctcttctactatcttcaagatcttggttaaccagattcacattgtatgtgccggactctttctcaggtgactgctctgtgcttttttatctaaagaagggcaagtcacccacgggtactaaccctcccccacccacatcaagggagaaacactcctctactcttttctggacattcctgttcagagtcgaggtaagggttgcacggccccgcccctccgttaccaagccttccctcgcctgcctcgcagcctcaggcccttagaacccaggcggggcggggccgggaaaggtgaggctgctggcgggaagcgggggcggcgcgcagcggtacctagcggcgctgccccgctggcagccggaggacgtggcactgtccgagaatgcagggaggggattcgtctttctcctccccgcgaggaggagcctcgacatcctgcagaggcgggaggatccttgagggcactggtgcgactttcaggtgaggtcttagcagatgaaagcggctggctgtggcccgcgccagtagtgctttctgctccgcactcgccgtgagccaggtgtgcaa

SEQ ID NO: 2421 - DNA, 2300 bp, Homo sapien
ttgagatcagcctgaccaacatagtgaaaccctgtctctactaaaaatacaaaaattagctgggcgtggtggtgcacgcctgtaatcccagctactcgggaggctgaggcaggaaaatcggttgaacctgggaggcagaggttgcagtgagccgagatcttgccactgtactccaccctgggcaacagagcgagactccatctcaaaacaaaagcaaaaacagaaacaaaaaattaaaaacattatacaaatgtaaactgcaatgatgacgagaaggaggaatgtggactccatatgaaattccctcatggtatctgcactagaacatctctacttttcttaaacctcaaactttgctcatctctttgacccttagtctccacagaggatctgttctcctactctccaaaattgttcaaggtcatctgatgagtggcctcaatttattttcagatgtgcatgtgctttacttggggttttgttttggtttttagttcagtttttttttattggggttcaaatatgacactgtcttggggaacctagtagggaaaatctgaaagcaaatacagtaccatactgagaattgtacaatatgtatatatataaaagaaacaatacagaaacttcattctgctatcacaaagccttcaaagaaatgacgattgatgccttagtgaggttcactagaagggaaaaagttggcagatgtttcccacagaaggaaaagcatgagcaaaattctggagacttgccatagcttcttatgcttctggaggcagtatggcttcagggtttggatgtcagcaatccctgaaaccatgtttcacaagtctccagatgccaattttttcattaataaagtataataattcatatctcatggggctgttaaacaagaacataaagtactcagctgtatggtaagagctcaacaaagcttagccatcattattattactagcctggcatgaatgaagttaaggaatggtggtgggtgatgagtgtgggagaaatcagaggttacatcataaaaggctttgatggtcacattaggagtatggatcttatctcctaaaggtattgcaaagcttcttaaatggctctgccatggtgcgattaaatttatgtcttggaaagatcacattggtcatggtatgcacatgtggtttttgcctattcagttaaaagctccttaaagctttttataccaccacagtcttatgcacctaagaggctaaattatttgccaatttgttgttgttgaattatctatttcagaactactctgaattattaggttgagattgaatgagaggagcaggactggaagtggagaggacatttagaaagtttcctcggtaatccagacagtagatggtggtgacctcaataattgcccagttaccttcaggacaaagtccaagttccttataatggtatacaaagctggcacaatcagacccctattctcaaaacagcttacctctcacttgtcttctcacttgctccagttatgtacaattatttaaagttcttgaaatattcctttccctgtgtcttccctccatagtttctccttctgcatagaatatttcctttccctatccactttctacctatttattctacctcctattcatccttcaaagctcagctcagatttcgcttcctctaggaaaacttcaatggcattatcttagtctttttgggctgctataacaaaacaccataaactgggaggattataaacaacggaaatgtatttctcacagttttggaggctgggaagtcctagatcaagtcactgacaggttcaatgtctggtgaaggttcacactctggctcataacggtgcattcccactatatcctcacatggtagaatgggctaactagctctctggggtctcttttacaagcgtattaatcccatttatgagggctccatctccaatgtctatgatttaatcacctcctaatggctccacctcatactacttctggaggcagaagtattaaccttaagggttaagatttcaacatataaactggtgggggagggaggtggggatgggacacaaacattcagaccacagcagacaacttgctcttttaatgtggaatggatgaccctccaatatttccccagagcaccccatgctcttctatcagggaacttattaaaatcatgtaacatgtttcttggtgacaagaattaggtcttttgtttctgtaacacatgccagatacttagcccggtatctggcatgtggcatgcccagtaaatgtttgctgaat

SEQ ID NO: 2422 - DNA, 2300 bp, Homo sapien
gaccaggaaagggccttaaaaatcactaattttggccagacgcggtggctcatgcctgtaatcccagcactttgggaggccaaggcgggcggatctcaaggtcaggagatcgagaccatcctggctaacgctgtgaaaccctgtctctactaaaacaatgaaaaattagccgggcgcggtggcgggcacctgtagtcccagctactcaggaggctgaagcaggagaatggcttgaacccaggaggcagaggttgcagtgagttgagattgcaccactgcactccagcctaggcaacagagcaagactctgtctcaaaaaaaaaaaaaatcaccaatttttaaagccatttcattttttaagtgaggacagttaggcttctagagaaatggtctataacatagctatttagtaagagaactgggaatggaaaaggatattttgagttgttttaacttagacttttttcttcactgtctctaactaagcctagttggcattctcaaattctaagaattcagatttagtgaaaatagttaaatggattttaaatgtgtagtttttttttttcaaatggtaaatatttgggcttgcctattttgcctatttataatctaaatctatttgggagaatgcttcactctaattatgccctcctggggccactttatccactcaaacattttttatttttcaaggcaaagtgcaaattcaactcctaatgaagctttctctgatcaccccagtaagaactgactactctttcttacgggctcccccagagtcaacgttttttaaactcaggctgaaacttattagtgggtcatgaaatccgtcgggtgggtcactggcagaaaaagaaataggaaatatcagaggacatcacacatagtgatggtgacaattactttttgaaacatttacttcagttaagagtgtatgcatatgtactagatggcaatgtaacatacaaaagttgaaaaacacaggtttggaggatcataatgtaaaacacatatcttaacatatcatggccagctgtatggccacgtagctctttgagggttgggacattcttgatctatatatccctcatgcccaatgtcctacctggtgagtactcaggagttgttgactggaatgattatgaaggtttgagaaggaattggaagaatgaaaagcaggtaggttggggaggaaatgagggcttgaattaagtgtaaattttgtagtttcctttatcttgaatgttaatatatattttttcaacctaatattattgccacaaagaacccgtgtttgttatctgtgctctggggttgtctcccatcaccttcaatgtaatgtggtataaataatacttcctgctaatgttgcagctgtcactcaaggatcttaaattactttaggagcaagatctggtgatgagtgcccggctccacttggcaggtgccagagttaagaaccagtgactgcctgaaatctttgggctccaggatgacggctccctctctgtcatcctcccacactctcttctgcccatcccttcttccatggagggaggatcccttgaccctgcctctttctgagctttgtaactggtaaatagagtctgcaaagattccgctgagctagaagatttgctctttctttgcgggtagctatggtgtgtttcgggggaaggctcatggcaataaaggctattagttgaactgcctcagagctcaaaaagcttggggctgaaaactgcaaaggaactcattagaagtgagctctggattatcaaaggaaattgagactcctctggttagaagctctttaagatttgcactggacagaaaggggatatttgacatgcggttacctttgtgggccgttttatgtacatggtcttttctatagcaaccttatttcttgcttctggccacactccttttggtcttatagtccaaatcagccacaagtcatttaaataccccctccccaccctctatttccttctcttctttgcaaacccactgtcaccttgaatatctcccctccccctttcctggaagctcttgggggtcagtctctcttttccgagaagctgttaactgcctacagttgggcctgggaggctccaggagggtgacagcagagtcctggcttggagtcgggttacaccacttgtgtctgagttcacgcagcatgttcctctgtcagggattccgcaaatatctccctgaggtaaaaaaggaaagtgtgctgcgctccagcacccagagcagtgagcccagtcccgagtcccggagagagctcc

SEQ ID NO: 2423 - DNA, 2300 bp, Homo sapien
cagactataactccaacagtttgaccccatactgcatacgcatcagggccttaatcatgagactgtatgacccttctgagcctgggattcacttgcaactgggtattccctcttctacctcaggccccctataccttttcaaaaagtgtccttcactgtaaataatcttcctggtggtgaccctaaaggatctgacaacctggatctatgtaaaaaaaaaaaaaaaaaaattgttttcttcattttcaagatgaataaactaaagttggctctcaaagggttaaacaaagagttaccatgtggcctagcaattcctttcctagttatatacccaagaaaattgaaaacatatggccacacgaaatcttatatacaaatgttcatagcagcattactcataatagccaaaattggaagtatttcaaatgtccttcaactgatgaatggataaacaaaatttagcatatccaaatcatagaatattactcagccataaaaaggaatgaagtactgatacatgctacaacacaaatgaccttgacagcattatacgataatgtgaaagaagccagacacaaaaggtcacatactgtataattccatttacatgaaatgtccagaataggcaaatccaggcagaaagtagattagtggtttccaggaaccagggagagggaaactgggaagtgagtgttaatgagtatgaggtttcctattggagtgagaaacacgtactggaattagacagtggtgatggttgcacaactctgaatatactaaaatcatagaattgtaagatttcagaagatgagctgtatagcgtgttaatcgtttgaataaagctttgtttttaaaagaagacaaagaaataaaccaaagctgagagaagtaactaacccaatcctttatcttttataagagtttttttaatgataaagactcagttaaagtccaatttgattcagttcagttaaagctaaatggcttagaatgaatcatgtctaaatattctgtataccaatcctacctatattatagggccctaaaagaagggtcagacgaagtatgctctaagtggctctcagtactgaatattcacagattaagttttacaaaaaggtaaagttttgtgataaccctcagataaaacagaaacatatgacctatgttttgacataaaacatacgtatttggcctgttctgaaagatatgtataattttcacacaccacattctaccaaggaaaatgtcaaccggagccaaccaacttggtgttccactcatcaactcttttatgccaacatggtgtttctgcccttgtctcagaagccaactactgatacctgcttcagaaaactgactatgaattccacaaagtcctgcttttttcttttggattgtacaatcaacaaacaagtcacccttctaaaactctgtttctgaaattttaacataattcctgaagttccagagtctcttaaatgctaaaatattaacaataccattccattttttcccctaacactcagaagcatactgatacccatcctgtacacagccttttcttgcctgataacaagagcactaatgacagagctattgcatcaggttgattaataaaccccgtcttaggcagcctcatcatgtggataaagaaaaggagttaagatgatgttcctgctgccttccccaacatagaaacacacccacaacacccccaatcctggaataaccagatgttatcttcatcatcacactagagcactgtaaaccacatcaaaacaaaacgaaacaaataacaacttccctggccaccaaaaatagatggcccagccagaaatagtgctgccagaggcagttaaatgagctgcaaggcaggaatgacagttgagctgcagtgatgctggggcctcccaaggattaccggactccaaactagattctccatcactttggtccaatcaacatcagcaggacttggtatttgttcacaattggttcaactcagattatttgctgagcttctggaattcagagagagtgacttatgggctcacctttttctctagattttaaataatcctttctccatttttttctaggagtgaaggcaattttgaaggcatgactacgacctgctctggccacaagagctaagagttgccaggtgttgtggctcaaacactttgagatgccaatcccaacactttgagaggccaaggcaggaggattgcttgaggctaggagcttgaaaccagcctgggcaacacagtgagaccccatctctacaaaaaataaaa

SEQ ID NO: 2424 - DNA, 2300 bp, Homo sapien
tgttagtttgctgagaatgatggtttccagcttcatccacgtccctgcaaaggacatgaactcattctttttttatggctgcatagtattccatggcgtataagtgccacattttctttatccattctaacattaatgggcatttgggttggttccaagtctttgccattgttaatagtgctgcaataaacatacgtgtgcatgtgtctttatagtagaatgatttataatcctttgggtatatacccagtaatgggattgctgggtcaaatggcatttctagttctagatccttgaagaattgtcacactgtcttttacaatggttgaactaatttacactcccaccagcagtgtaaaagcgttcctatgtctccacatcctctccagcacctgttgtttcctgatttttaatgatcgccattctaactggtgaacatgccttttcacaaggttgttgtaaatgagatcatgctgtcacatacttagagcaatatctgccacatagaaagtgatcatcaaatgctagccagtattatgtatgtgctgctgaagtcttgctcattccagagatgctgcagctgggtgctgtgatcagcgagaaagcatagggcaagggatttttctcaacacatcattgtgaccatttgtaggtaaaatttatttctgatccaataatgtgttcagatttatgatcatggtacataaacttatggccctgaaaaagtcacaatttccgtgagtcctggttccctcacttaaaaaatggggagagtgatgcttgttccgtgtcttataaagacaaaataaaacaacttatgagatacacttaacccactgctcaatacactaaacccactgctcaatacactaaacccacagagaatcccttcatcagtggattctctgagtggggaaaagcgcctacataacgaagttggtaaggttgggaaattaattaaatcactcactcattcaaaaatacaaatgaagcatatatgctaagcaatgccctcctttcatcatggagtgtaatacctattgacctcaacctgacaaacatacaattggagtttgtatacacatacaaccatgctgttggttgtgggtggagaatgaaagaaaagaaacactgttgtatgttggaaatgttgctttctttgtcccttttttctacaccaacataaatgataattgtcactttcgcttgttaattgactaattatgttttggttccataatgtgccagtatttgcatttttagtctgttatctctttccctgtaatcaaagagccttttttctctagaatttcctacatcagcaaacattttagaggtaactgcattactgaacaattataattacttttgacagattgagcacttttagtattacttctctcctgttctaactctctttttcttacctctctatagtccagtctcttatttgaacatatctctcttccttcccccaaatctcccctctgtctggaatattatactctacttccctgactagtaaaatctaactcagctttggagaccttgctcaacgtgaagcccccaggagaaatgtcctctggtaagaggcctttccctactcctttaataaaagtagacattttctctcaagatctcagagtgtactgtccttatctctatgaaagcacttgccatgctatattgtatttaatgcaatgtctgtacttccaaatagactataactatctaagggcaggaactaaagtatctcatttaatgtgatcatgtgtttgttgcatggataaatgaaataagaagggattcctggctgcttcttccaggcctgtctccctttgtctttaagccctggaggagtcgaccctactttggcaaaaaacatttagcatgtcccctcctctctctgagtactgctacctatcctatatcccaaggctaccaaatgcatattttaaactttacagaaaataccatgttatttagtattttaccatttttagggtagggcataggaatgtgttcctatctctcctgtattttttctaaccaatgttttctctaatttttaaaccctttcatggaggcgttttgtattttaggtgctgtcattcagagtccacaggatggatgaatggatatgaaaatgaacaaacgtgtgacacaacactgcatgatttacctgcaatgactttctgatcaagcctgaagtgggttgtagcctctttatttactttttatttgacacatagcagagagagatttaaactatctcttattggccttttccctgcgtctta

SEQ ID NO: 2425 - DNA, 2300 bp, Homo sapien
actaagtgaaagaaggagaatataaacatatacctaagctgtaatcgtaattatgtaaatagatatttaatatatatagataatgactaaagggaatttggagaaatttaaacatttgtgctgtagcagtggttatatgggtgaatatttttcttctgaaatctaacgcaaaaaaattgttcttttgacaataagtataatttttaaaacaacaaggaaatttctcttctcaagaatatacccatgtgtgtaagaaagagttggtgtttggattaaaagatgcattttttaaagagtgggaaaaaaatgcaacacatttttaatattgaagatccctgggtattctgagtaatctatataactttctgtatttttcaaatgtttttacaatgaatgtgctataaacttttgaaaaaagttattttaaaaatacatgaacgtattttctagcgtcacttctgagaccccacagctcacctagttagtgctatcatttcttgaatccagtgagctgcctgtagacagagttcctctccacaactcggtagcccataatttgatttgagacaaagctaaatatagccccaactttggtatgaaggatgggaatctgactctccctgccttttcttcccccccatcagaggcaacaggatattcttttcaagacaggtggcctgtgagccttgtctaagatcaaactggaccttgaaatttttcctggtaacattttgagctctggagcagtgtggtcctaccaataaatcaagtgttggaggagtctagactaggggctttttagacagttctgctaaaccttcaaatgttttgttatcctcccctccccacccctactttgtactagtatgtaggggaaccaatccaagagataacagacagatgacaggttcccccaagaacacagactccccacagtctcaccaatacccaggcatgccaggttcttcctgagttaaatgcctaggaggcctgaaagaataaattcatcctggagaagtcttgtgggtcgtagctttagaaattcagggaacatatctctggggccacccaatggagaacacagcctgtatcagaaccttagcagagactttgggccttttggggtctcaaatttatcatctctgaaacaagtacaacgaaattaacattgccacatgtgggcactataaagcctttttcagataaaaaaaaggtcagtgatagtgctaataataacagtgattatgtcatttaataaaacggtcttatttgaaagctaaaaaggagcttcagggtggcaagcactctaattatagtatgtctgccttgtttaaatcttgatacataagtacatggtacagggcctgaggcaatgccatctccaaagaggccttttccatgatcttaaaacagtcacaagggagtgtcgaggtcctgatggctactgtcttgaggcttttctagtgttctgggagtcaggaagcttctccctccttgaagctattggtagagcccagttgctggcgaaactgaaaaacgaggaggtagaataccctaaaacaggagatgtctgggatacaggcagctaatagggctgtaaggttttgttgggatgcttcccttcctgatgaagggtcctgtccctggattaatggtgaaactggcatgtcacatctctaggaagacaacatcgtgttccatgaccacgtagggtatacatctgcattcagccgggattgctcctaaaccttcctagactccatctctggctctggggttacctgtgggtggggcgatgcagacacacaagaaaacctcctctacaaattcttcctgtagttggttgattgtattctaagaccttcgttgggatgggcgagggacggggcttggtaccgcgtcctctaagctctctgccctctgccgtcatcattcatctgagccagcgagagaggggtcggggagacgcgagggtggttcagggggcgtgtaacctgggccgattctgccccagcacactggttgtcgggagccccgcctccgctcgcggttgacagctcagctggtgccgagcaactcgtgccagccagtcgtgtctcagcctggagagtgcgcgcaccgccgcccgggcagccgctggctccagctcacgaaacagccccgggcgccgcgccgctctgagtccagcctcctactgagaacagtccctcccttgtgcgggtcgcacggctagccgcaggttcggccacgtcaaatccattttctaaaaaagcagggagcagagctctctcttcgccgcc

SEQ ID NO: 2426 - DNA, 2300 bp, Homo sapien
tttccccctgaagtgggaggtttagtttgatatatactactacatcttggctggagttggaggtctcagtacttcatagcagtaatgaatgctgtgggtttgcagtaacttcactgaactgtttatctgccacaactacaaaagatggcttattctctttaagttatggagccctattccttttaatttgtgtgttagataaaatctaccacgtgtctatgggcaaaaccaaagtctgaatctctaaaatctaaggccataatcaaaactaggtaatttatcaatctagagtcatataatggggattcctcttcagcctgcatttggataaaccgcatgaacccaagagtttagccctaccactcaaggccattgtttttagttgtgcaggcttcagtgggtaaggtgctatttatgtaggttaaatggcggttgagtgctctgcaatgtggtggccttgataccacaggttttttttttttttttttcttagatctgaattcgtttgttgcggggagaaaaactaggggcaactgatctggcattgcctacctatgcctgacatgaaattcgccaggacctctgggagaatacctctagttaagcaataggattagaagcctgattgcagaaaattaggaggtaaagaatgattgggaagtcagaaagtgtggacatcaaatgaacacaatatattaaacaaattggatgtgaagggaagtgagagatatggtgataggtagagagggaaggactttgttttaagagtgaggagagttaagcatgtttgtgggctggggatgaagctaatggaaaaggagaggaagaagatacaaaacaataagagataattaagaattttctggtagaggttgttagacaaagagcccagataagacagattggacaaagataaggagaggtaaagatgaagcttaagttaggaggcttaaaagaaagaatgggccaggtgagtggctcacgcctgtaatcctagcaatttgggaggctgagacgggaggatcacttgaggtcagcagttcgagaccagcctggccaacatggcgaaaccccatctctactaaaaatacaaaaattagccaggcgtggtggcaggtgcctgtaatccgagctgctcaggagattgaggcaggagaatcgcttgaacccaggaggcagagcttgcagtaggccaagatcgtgccactgcactccagcctgctgggtgatagagtgagaatccgtctcaaaaaaaaaaatctatctatctatctatctatctatctatctatctatctatctatctatagagagagagagagagggagagagtaaaaaagtagaattaatgactggatgagatgggtaaaagagaaataggtccctgacaaattctaggtttggggattgagcagctgggtagatagggctggggttaaaacacagaactgagcaacagatttggaaggatgagctgagatgaattcagctttgtctgcattcagtcagtcaacaataatagctgttgcctatgaaccttgagatccacagtgcccaactacaaagacaaaccttgctccccctcccctgctgaacttatgctatatgcaatagtgttgcagaaacattttgctttgctggatacaaaagcaaactagtctctgttttcaaggacatatgtaggatataagaactggattttcagaatgaatatttatgggataatttatttaactgaccaactttaaaaaaaggttaaaacactttcttggtttatggtggataccaagctatatatgctttactatgagttcatggaaaactgcaatcagtctcaactgaaaggaaaatgtaggttgtttgggagaaagtttttacaattgaaaaactcaagggaaaattgaaaggaaaagattttaggaaagagaaagaaacagggagaggaagaaaagaggctagccaacaacctgcagtagtgattctgaggaactaataggagaggaaaaactggataaattataaaaggatgactgatacgggggcgcggggaggaggatgaaaccggggaaaatattgagagagacagaaagaaaaggagaaacttatctgaggttggaaataaagagaaggtgacattggagcggatagaaaggaagaaacggcgtgggatctgggaatgaggcagtgggtggagagagaatggggagacgacagaggatgaagggcagctgagtgtgtctgcgggagaaggaccaaagcaatctgggcggagcaggtggcagaggcagccgcggaggagg

SEQ ID NO: 2427 - DNA, 2300 bp, Homo sapien
gctattttaaatgtaaggtactatgattctaccaacttagactcccatatacacaaggattcacttccattccactttctgtctctgttaatagcacaattttttttgtcttatttattgtagtccttcatctttcatgtggagtcaatcactaggtcttattgggttttggtctcaaaagtctatcattaaataatattacttttcttagcagcataattcacaattgcaaagatgtggaaccaacctaagtgcctgtcaactaatgagtggataaagaaaatgtgatacacacacacacacacacacacacacacaccatggaatactacccagccataaaaaggagtgaaataatgtcttttgcagtaacttggatggagctggaggccattattctaagtgaagtaactcaggagtggaaaaccaaaaaccgtatgttctcacttaagtgtgagctaagctatgagtacacaaaggtatacagagtgatataatggactttagagacttagaaggcggagggtgggaagggacctagggttaaaaaactacttattaagtaaaatgtacgcaactcaggtgatgggtgcactaaaatctcagctttcaccactatataattcatctatgtaacaaaaacccacttgtaacccaaaagctattgaaataagaatctttttaataaagaaaatgccacacaaaaataatattggttttcttctaatcctgaaggccaatataaaaggtaacaaaagcctgagctctttaattaatgggtacaagttaagacagaatcacatcaggatttgaagttgaacctgagctcaaatcctgttcccatcactgctagctctctgaggctttcctctcaactacaaagtggagatataatactaaacaagcttactgggttgcttaactaatatctagaacatacttaacagtgtttctattaatgcgagaactaactgtaagcacttagtaaagagtagtcattattaagcaatgataaataaaagcatttgtataattctttttttagcttttgaaagccttgcacctagattttctcatctaatattcattaaaaccctgaaaggccgatcatatccccactttagagatggggacaccaaaaaacaaagagatgggaacacctagatatatcagagatcctagtttttattttatttatttatttatttattttttttttttgagacagagtgtcgctctgttgcccaagctggagtacagtgacgcaacctcggttcactgcaagctccgcctcccgggttcacgccattctgcctcagcctcccgagtgagtagctgggaccacaggcgtccgccaccgcgcccggctaatttttttgtgtttttttagtagagacggggtttcaccatgttagccaggatggtctcgatctcctgacctcgtgatccgcccgcctcggcctcccatagtgcttggattacaggcgtgagccaccgcgcccggcctgatcctagctttttgtaggtgactgacctaggtggtacaagatgtcctgtacttgttcatttattcacacatacaacacatatttattgacttcttaccataaactgtttaaggagcctggtggggataccgcataaacaaacaagcaaaaatagacaaaaatctttgtctagaaatatataaatatagaacattttatagaatatatgacatagaaaacagaaaaaaataaatatgaaaatagcctaattttcagggttttcctttttttacatacccttcatggttaacggttagtggttaatggggattacccattaactcccaccctccttcccagctctctcccaagacttagtttcaggaactagaaaattctgattcagcttgggtgcaatggccgctcaaagggcgaggcttattcgaagcctcaaattcagaaaacccagccagaccttggaagttaagaaggtggaaggcagatcgcggaaccagtgttctgatagttgtggttctctgagggaagccaattctggggaccggtagtggaaagctcttgcgctgtttccggccacctcagcgggaagcggagacgcaagcagctggatctccggtaactgagacatagggtataactgttgtcgcggcggaggaagtgaggacggcgccaagggccttccgggccagtgttggatccctgtagtttgtgaagatggtgttgctaacaatgatcgcccgagtggcggacgggctcccgctggccgcctcgatgcaggaggacgaacaggtgagc

SEQ ID NO: 2428 - DNA, 2300 bp, Homo sapien
gtcccgtcccgcccgcgtcggagcggccgccggccccgggactgaccggcctcgccgcacctcccgcaccgactagcgctcccaggcgctcctgcgcccgactcgccctcgcccccactccccggcggggtggcggcggccggagcagcagcagcagcagcaggagcccgcctctatgatgaagttcaagcccaaccagacgcggacctacgaccgcgagggcttcaagaagcgggcggcgtgcctgtgcttccggagcgagcaggaggacgaggtgctgctggtgagtagcagccggtacccagaccagtggattgtcccaggaggaggaatggaacccgaggaggaacctggcggtgctgccgtgagggaagtttatgaggaggctggagtcaaaggaaaactaggcagacttctgggcatatttgagcagaaccaagaccgaaagcacagaacatatgtttatgttctaacagtcactgaaatattagaagattgggaagattctgttaatattggaaggaagagagagtggttcaaagtagaagatgctatcaaagttctccagtgtcataaacctgtacatgcagagtatctggaaaagctaaagctgggttgttccccagccaatggaaattctacagtcccttcccttcggataataatgccttgtttgtaaccgctgcacagacctctgggttgccatctagtgtaagatagagagaactgggtaggcctctcccaccatgtgcagtctcatggggagaggcttctttcgtttcctcgtcaaacatctgattgacgcttgcaaactgtctgaatttgccatgcaaggttttcaaacaatttgcatgtttttcagatgctttcaaatctttttttaaaaaaatagtgtaaaatattttaataagccaaagccatgtggaatttttgtttagatgccttaactgtgccacaccccacaaccccctatattattttggttgtctatttctcacagcatattttcagttttttgtccatttgacatcagtctgtggtttattttgtcatcagattacttgtgggtatacctaccccaaaattgttttctcattcacagcattagcatattcagcaaatccatctgtggtgggaattaaaaatattattggtattaaagaaatccattcaccccaaaacttgttttacaggattacaattttaattcaaaatttccagatttgggctatttctgtatgatccaataacttattttgtcacagggcttaatttgccatttttggggatttgtcgactcattttgtctgaattttcacaactggtattatgtcactagctacctgatatggctatttcccttataactcaatagtaccttaacacaaagtataactctgtagagttggtgaatattttagggaaatattagcaaaatgcatgtagtaaagacatcttatgaaaactctattcatggaatttgatttagcatgctcagttgccagttcccattatcgatactctttctatgcagaataccttagaaccgttatttccctcagtgtagattgctcttaaaatgtattcagttatttagtggcccccacaggagtggagtcttgaaatctaattctaaatgccagtcagtgatgatcgcatcacagttgagtgaaatggccttcctgttcagctgttagagactgaagattgttagggcaccttagaatgtctcatcttttctaggttgtcaacaggtactatttgtcacataactaactttcgaggcactggaacatacctgaactaagaattaaatcttttactttatactcacttaaaatcaagaatcccatctaaaacacataggtaccttatctgaaactcttgcacttccccaaccagggcagaaatgaggtgggagaagtttgactaaaatgagggatgggggaaagtaaaagatgtctttttttttttttgagactcgctttgtcacccaggctggagtgcaatggcacaatctcaactcaccgcaacctccgcctcccgggttcaagcgattctcctgcctcagcctcccgagtagttgggattacaggagcctgcctccatgcctggctaattttgtatttttagtagaggcagggtttcttcatgttggtcaggctggtctcaaactcctaacctcgtgatcctcctgcctcgacctcccaaagtgctgggattacaggcatgagccaccatgcccagccaaagatcatttttttatatagacttcagccctttgtaaatattgtaactgg

SEQ ID NO: 2429 - DNA, 2300 bp, Homo sapien
aaataatcgcagagggagacaaagtataccatttatgtatatttttttcaagacaatactacacattatctgtggatgcatatatatagatatagatattaagagactataaccagaatagtagttacttccagggcaggagagtagggggtgtgatcaaacctgggtacaagtgggctaagaaaagagctaaaagtaagaacaacaacaatagttgtatggacatatcattccaggaaagagccctcgtgaaagcaaaggtacagtcagaagagtaagtaaatgagttctgtctctgttagcagtgagaggagtcaaggacggaaagggggttgggaccaaattatgcagccttgaatggcaagctgaaagggtggggaggcagctacctcttaggtcacataaaactattgaaagtttttgaacagagttgagattgatggaaaggaagattgctctgataattctgtagaaaattgattgttgggagcaagaggtgaactggagccccaggaccagtcaagagttggtgaacagtccaggcacaaatttaagaagacctgaactaataaggtagatttcagaaggaatgaatctgagacaatgttaaagaaacagaaaaaaaaaatggaggtgtgactaattggatgtgggagtttacaatcctgttgggatgagaaatcctacccatagaacctctccctgactcctataggataaaattcaaacttctaaacatggtacatacaaggccttttcgtcattgggccccatctcctgtcctccctgcccctgttgtgaacttcacacaataacagtattacttgagattcccccaaacatatcttgctgtttctgtccctgtatcttttgttcctttggcttggaatgactcctgtagtccccttccctcctcctcttaatgaacttctaatcataattcatccttcagtccaaagaaggctttgccgacaccacaataaattcctccctctaacagacagtccctccactgtcttccactgccgcttctttatcttaacaccgatacttatttttcacacaggactctttgtatttctgtgttctcaactaagttttgaggtcctcatgggcaaagaccacagcctattaatccccagtgtctatcacataatagatgttgaactagaatgtaaaacaacactaagcaagtacaagtcagtatgggcatagacctatgaagttccaaaactgcatgttaacaagcactttaggtaagcaagtatcattagtgaaagtagtcacattgaaatactggaaacccttttcaaaaataacgtagtcaaaatatttttggaatttgtcttgtgcaagtatgttcagagaaagataacattatttttcagttgtttacccacagtgttaccagttcgatcttcctctttactcactaaagataattcatagtgacttggctgcatacaaattttaaaaatcacctgcaaagataagttttgtcactattaaaatatattcagaagaatataagatagttatccccaaagagcaactctagaagcgactgtagctatgacaacattattaaaataaatgtgcaggccaggcgtggcggcttatgtcataatcccagcactttgggaagctgaggtgggcagatcacctgaggtcaggagttcgagaccagcctggccaacatgttgaaaacccgtctctactaaaaataccaaaaattagccgggcatggtggcgagcacctgtaatcccagctactcaggagactgaggcagtagaatcacttgaacccaggaggcagagattgcagtgagccaagatcgtgccactgtactccagcctggacaacaagagtgaaactccgtctcaaaaaaaaaaaaaaaaaaataggtatgcagtttctcaaagtaaccgttttaaagaaagcagctattatgttcacatataacttttgttgaatgtgttacaatatgaaaacttactgcatacattctggtaaggacaagagaagtaaagagtaaatatgaatggaagtaagggaaaaatatgactgaagacattttttaaagataagttttaatgatagaaaaatatgagtaagggctaccaattgttttagttttaatcaaaactaaaaatatacatctatgtctttactgatttaaactcacataaaactgccttccaaaataaatgcagaattgggcacttatttgttctcatgtctgtcctctcagagccgacaagctgtaaaaaactctcaaaataaaactctgttttatttt

SEQ ID NO: 2430 - DNA, 2300 bp, Homo sapien
ttctagttcaacatctattatgtgatagacactggggattaataggctgtggtctttgcccatgaggacctcaaaacttagttgagaacacagaaatacaaagagtcctgtgtgaaaaataagtatcggtgttaagataaagaagcggcagtggaagacagtggagggactgtctgttagagggaggaatttattgtggtgtcggcaaagccttctttggactgaaggatgaattatgattagaagttcattaagaggaggagggaaggggactacaggagtcattccaagccaaaggaacaaaagatacagggacagaaacagcaagatatgtttgggggaatctcaagtaatactgttattgtgtgaagttcacaacaggggcagggaggacaggagatggggcccaatgacgaaaaggccttgtatgtaccatgtttagaagtttgaattttatcctataggagtcagggagaggttctatgggtaggatttctcatcccaacaggattgtaaactcccacatccaattagtcacacctccattttttttttctgtttctttaacattgtctcagattcattccttctgaaatctaccttattagttcaggtcttcttaaatttgtgcctggactgttcaccaactcttgactggtcctggggctccagttcacctcttgctcccaacaatcaattttctacagaattatcagagcaatcttcctttccatcaatctcaactctgttcaaaaactttcaatagttttatgtgacctaagaggtagctgcctccccaccctttcagcttgccattcaaggctgcataatttggtcccaaccccctttccgtccttgactcctctcactgctaacagagacagaactcatttacttactcttctgactgtacctttgctttcacgagggctctttcctggaatgatatgtccatacaactattgttgttgttcttacttttagctcttttcttagcccacttgtacccaggtttgatcacaccccctactctcctgccctggaagtaactactattctggttatagtctcttaatatctatatctatatatatgcatccacagataatgtgtagtattgtcttgaaaaaaatatacataaatggtatactttgtctccctctgcgattattttcactgtcatttagtttttaagatttatccctattgacataaatagctatagtcttttcaattactgtgttgcatttcattttataaatataccatacattattcatccattcctctaagggtgggcatttatgttgttttcaaggttttgctattacagtgttacaacgaatatccttagcttagctggtctccttgtcttatacaaattttactgacctttcaagatcctgctttcatcccagctcctctgggaaagccttccctgaatcccccagcccacagcggcaaagtcttggtactcaaagttgcttgtgcatctttggtatcatcccactgccaagcacacagctacgcaaagtaaggcacttaagaaatattcgctacacggatgaacaaatgaatgaatgaatggggcagcaccactccgtgatggctctattcctttttaatggactttggcgccttggcccactttccttctttgacagcactggtcctactccagagcattcctctagctagcaaagcagtgtgtggatgtgtgggtgtaggtggcgatacagacctcactggatgaggaccgcctctccctgcaagttcacgatcccggcaaactccagtgcttgaagttcagagtcctaccccacccccctcacccccacgccccttctgcactggtcaagccagcgagccgctgcagccctgatcgagttaaggcgcggcggcccccggggccgctggagaaggatgcggacggggccagtgactcgtagtagatccctccgcgcggagctcgggccggcgcttcttcctgcgggaaacccctgggtgcccaaggcggcggggccgaggccgcggcgacagtggggcggggcttgcggtgggaggaggcggctgaggcggaaggacacacgaggctgcttcgctgcacacccgagaaagtttcagccaaacttcgggcggcggctgaggcggcggccgaggagcggcggactcggggcgcggggagtcgaggcatttgcgctgggcttcggagcgtagcgccagggcctgagcctttgaagcaggaggaggggaggagagagtggggctcctctatcgggaccccctccccatgtggatct

SEQ ID NO: 2431 - DNA, 2300 bp, Homo sapien
tcttattttggacaactgtggtactcctagacattttaaaaatagtatttgcaggagtcatgcttaccttacatttggggaaaaaccaaatttttcccttccccagatgtttcatttaaacttgtaattttgaatttctttgtgtgtggggtttctttctttctttttctgatcacttctgcaatttataaaggtcactttgactttggaatctcacttcaaaggcactgccatccaccccctgcctctcattcaagtttgcttccactgcttcctgtattactgtattactaggccagcaatttctgttattttgtccagaatagccacaccttattgtaatttcatcattttggggactagtcatttttggaatactatttttaaaattagagttaactaagtttatatttattttgataattttttttgagatttttttcattgagttggatattgcaaacttgtactggattgagagaatatgtacatttagtaaagtatatttgctttttttttttttgaaccaagagagtcccctgaacaccctactgacaaaaactaagggtgaaatatgatgaataaatatttgagagaatcacatggtgttgagttgtctctgccacatgattttgatccttgagggccaggtctgtgctacacacatttcttctctgtactacagaacttgtctggcatgtgccccaaattcagagtcaactgagcggcaggtcttagtcacagcatctgtgactcctgctttcccacctttagaacattctataggagaggctgatggtgagttggagtgtgtttctatgttcttttttcctttgaagagataggatcagttgaaagctgaccccacccacagactttttttgctatctcttttaattaattaaggagtggctgaaattttcctctttgttgacttatgcattggtgggaactttaaaattcatctagtctttctgtccatcccatgctggatctgatgtttacaacattctagtcaagaggtaccatattttctctcttcttgaacatctcttgtggtagacagctctccacagcagtttattccatctttggccagctctaattcttagaaagatcttcttatattcagctgtaatccatctcctcatgacttgtcctcattgacatctactcagaaatttgtctcagagtcctgagacctgtgcaggtgatagggacccaaagagatgcttgtctgtagactttactgagctgacacccagctctccataaaaggagtcaaacccagtgaggagcatgtctggggtgattgctcaggtaaagcatcttagccctacttgtttcatacctccctgcacaggtgggcactggtgggagaataacatttatcaagcagtgtttccctaacctctcttatgataagaatagctcaggtgttctcatggagattctgattcagtgcatctggaatgtcatctgggaatttgtgtgttcaagaaatagccaggtgattcttacattaggaaagttttagaatcactgcagagtgaatctgggaaatcaaagtgtttgtttttgtttgtttgttttttgagagtattagagacaggttgctttggctagatcctgtggtcatttttcccccttggaaatgcctcctacttgctggcctcacttagtacagagaagaaagctgctatggtataaggttagtaaagttgtttgttttgtcttaaaagaaatttgcgaaatccagcattttcggacttctgtttgtgttgtatgactttgttgtaagcctccttattcctccattagaatgttacctgagatgttagaatgcataggagttccacagcctttttggtgtccactaaagaattctgtcctcagccgttgcaaatggtgcttcctttgaggatttctgcttcgttagctcatgaacacatatttggtgtcggcagtttccctcagatgtgttagtgtggagagatataaaggtcactcatttctggtggtcctgcttttggggtttctgggctgctgcagcaaatgaaataaggaaaggaaaataaaggaggaatctagggcttcttgagcagaacaaaacaatctgcaagaaggggcacaggattgctcctctcacaaagacacttgataatactgtccttgataggaagaaggaagtggcttcagatctgaaaggatatgctcataggcttgagacgggacaaactgcatcactggtagtggtaggaggtttgccgtagatctgttttttctcctgtctctctttt

SEQ ID NO: 2432 - DNA, 2300 bp, Homo sapien
tgaactatctctgttagacattttgaaataataaaaatatcccattgtcttttattacaacctcaggggctcctggagattttgggatcttgtgtggggaaccacccatctaatccatccttgttttaaagagagaaaaccaaagaagcaaagtgactggcccaagtacctagagctgggtcagggttggggccagaatccaatctcttgacttttagtcaagtgatttttccactatgctcagtactcaaattatgtatcaatatgtcggcccttgttttttgaggtctgaaaagggttagtgccagtcaacaacagtagaggagtagaaagggtgttgggatgggagaggtgtggctatatttaaaatttcaatgacagcagtgaaaataatttgcctgtgaacctctgcctgtccctttggacttctttgtagtagttgagacagcccggcaggtctggtgtcattagtgattcagaattggattaacctggactggtggagttactttctcagaaaagggctttatattttaacatttgtttcccttgacagtttgcttcttctcaagttttggcagccttgaacaagtggttgtcaggtttttattttgttttgttttaagaaaaaattccaaattttattttgccgatttagtaagttatcctctacctgccactcccttctgctccctctataattatttctaagactttatttttccattgtgggaacattatggaaggttttcttttacagtctgagatatttataattatgtgtaagcacacagtttatagaatatgtaaatggtccatatgttaacttaaatacccttaaaatattttccaataatttaaatctttccataaaagtagctgaagctgcttataataaaagagaagtatacacgaaggatagcagaatttggatgtagttaatatagataaatatgaatgtcactttggaggaactggaagtatttgcatgaatactgatcaagtcatgcctccttgttaatagagtgaacaaaacagatgaatgtttctgttttcatgaagtttatgtgactatcagtagcttccatattctgagggtttattatgtgacagatgcttggggacaaaatactttacttgtttcctttagtccttaaaatagatgttaggattcttgtttacagaaaagttaaggaatgttcatccagatcacctagccagtcagtggtaaagaacagtcactggaacccctctttcctgatccaaagccaacatacttaaccataataaataatgccattgtctggtggaatcctgtagtcccttagatagtgtaattttgtatttaatgtaaacattttgtgcactaaactgacttacattttactttttaaaacaatattttaattctgaatgaacatttgcataataggagaatgatctaaattgcaaacttccattttgaagagttgtagttcttttaaatctttttgtaactgggaagaagaatggaattatgtttgttgtaatccaaggaaagttggttagcattctttcctgttactttttgatcccaaaagaaattctttagtagattaagaccaggaatgaatgtgtggatttttttaaataaaaaattgagagagattgcaactagcaattcagagccagatttatgttcagaaatgtttgatgccagccgttttagttacaaatagctttttcttgactgtacagttgtgttcttatggtaccattctgaaagtgatgtaagagaccatgtaaaatgattggaatgcctcagcatctgaacaatgcacatagccaattattaaaattacccagtactaacctgtcttggcttaggaactatgaaattaactgtgggtagcatttctacacatatcattacagaacaagcataaagacaagcttgtttttttccttttctttggatttgttttttcttattaccatatcttttgttactgaaaactggtggtcatctgtactaatagataagagaagtgtgtttgacaccaatacctaatcttagattatccctgctattttaaaacacagtccttcgcctgcatgctcagacatgtgggttctttcaaacatactggacttcctccttaggttttagttgtgttagtcaatagttgaatgttgaaggagaggatgccaagggatattaaagaaggtaaaagagataagtgacagcaaacattatttatttttaattatctctcagaatgacttttagatacccttccctactaccttttgatttttgc

SEQ ID NO: 2433 - DNA, 2300 bp, Homo sapien
tattatatggggataaaagagtaaggatgaaggaaaatgtaggctagttcttggcttaagagcatttttttttcctttttctccaaccatctactctagccaagacgttttgtttgtttgaggaaggctgtgagataatttcataatagcttttctatgtttcctgcaaataattttttttcttctgcctcaattgaaaatttttaagaggaatatgtatccattctgtttatttcagggaagatgctggagaaataaaatttggtaatatgaaatttctcttcttttccttcatttttgtgaggagtagttcttctttgctttggtggaggtacttgcttagtaagcattttaagtgagtttatccaacacatttttatttcttaccaggaatgtaattacaacttttttccagtgagatctgttctgacaccaggatttagttttttaatgttataaacaagatttttttttcaagtcagaaataattttcttcactaaagtgaaaattaagctgtgatgacagtaaagcttaacaataggttgtttggattggaataaagataacattggaaataaaggttttatgtagcttattatgggctgctcatttagtttttctagctgggggaaaaaaaaatgtggtgcattctcctctaagaatggagatacaactggagataataagggagggaacttaataccttagagtaggccactgaaatcttgtttagtctttttgtggcatttggtgcgttagttgcttgctttattctgttatgcaactcttgtggtagttaaccccattgcattatggtcatttgttgatgtgtttcttttgctagaatgtgaggtcttagtcttatgcattttttgcatagttaatgcctagtacagtgcctggtgtagttattgttcagcaatgtgtttcttaaactaaaaggtgctaagtagataccgtcatgcacatgtttcttatctatttatgttaaataagaagacactggttctctcctttaaaaatttcagtgtggcgattcctcaaggatctagaaccagaaataccatttggcccagcaatcctattactgagtatatacccaaaggattataaatcattctactataaggacacatgcacatgtgtgtttacttcagcactatttacagtaggaaagacttggaaccaacccaaatgcccaacggtgatagactggataaagaaaatgtggcatgtatacacgatggaatagtatgcagccataaaaaagaatgagttaatgtcctttgcagggacatggatgaagctggaagccatcattctcagcaaactaacacaggaacagaaaaccaaacacggcatgttctcactcataagtgggagttgaacaatgagaacacatggacacagggaggggaacatcacacactggagcctgtcagggggtggggggaaaggggagggagagcattaggatgaatacctaatgcacgtggggcttaaaacctggatgacgggttgataggtgcagcaaaccaccatggcacatgtatgcctatgaaacaaacctgcacattctgcacatgtatcccaaaacttaaaagcaaaattaaaaaaaaatttatttatttcacatagcattcagggtggtaataccatacagagaggcaaattggttctatttgaagatcattcaacttggtgacttatatatggagaatttcaaatatgttctaagtgttcgcctatatatttttggtctgacatggggagagaaggtttctaggggagactaatctctgagcacttaccaggagaggacacctaagggtcactgttgggaagaagtccaatagttctttgttggactgttgggctgctagtctcatactctccaaccaaggttggagaccatcctggctaacacggtgaaatcccatctctactaaaaatgcaaaaaattagctgggcgtggtggcacgcacctgtaatcccagttactcgggaggctgaggcaggagaatggcctgaacccaggaggcggagcttgcagtgagccaagattgcaccactgcactccagcctgagcgacagagcgagactgtgtctccaaaaaaaaaaaaaaagaaaatggagctgcctaaattctgtccctggctacttgttaattgttgataggatggaatgcttatggatacagttctgggtatgtccctcagatgtctttcctgttttgagggaaacaaactccttgagagaaagaaaaaatttggtgaggccatccttttgggagaccaag

SEQ ID NO: 2434 - DNA, 2300 bp, Homo sapien
agcactttgtaggtgtgtaaaacttttcgttaaatgctttaagctgtttgggttaaaaatatatgttcatgttataagaaaaccaagacactcctaattataatcaaatagtacttgttacatatcaatatgtgtgtgtgtgtgtgtgtgtgtgtgtgtgtgtgtgtgtgtgtgtgtatggcgttgtgcagatgtttaaaagtagttacatagactagttcttgcttttcagggtcccataatctaaaccagatgacttcagctttggataaatatatagaaggaaatttaaagagaattcaaaacaatagatgatgcagtgacactgtgaataaatgttatttatacagtttgtaagatttcatgctcattgttcatatgtcccaggtggagttcagaaaatattctcttcatttccacaaaggggaatagtgcctggagatggttttcttttaaaaagtccttttcataatgcagtgcccttccttccattgcccttcattccattgcttcccatgcttgtcaagagactaaaatgttacttatagtaatagtcactatctcaatgtaaatagcacccttatttgatgagaattattatttcagttctaaaaatggggaaacaaagtcagcaggaggcaaagtagcttgttaaagtattctgcaactttcaaatggttgcttccactgcatttcacgtcttggcacttctaattgagggttactctaaccaccctatttaaaattgtaactgtcccccacccccttaattactaaccctggtctactttttgttttctttttctgtaactcttatcttcttactatataatttatactatataatttacttcattatgtctattgttcattgtctgtcttttccaaattctactgcctcttaccctctccagaatgaaaactagtatctttgtttttgtttactgatgtaacccaaacacctacaaacagtgcccagtatatactaggcccacaaatatatattggctgactgactgtatggtttagtatcatgtcatagtattgagactgtaactttggtcttctcattttcttctttgtattgtgcgtcctagacttagtttggcctctccttttgtccttgtatactctaatactggataagaattttggagtctttttcaactctgagtcagtgaatgccacataacttagtgactatatttaaatggttaatttacaattttttccctgcaaaggatactgtagtcactgtgagtattttagtattattgtaggactcaagagggaattaaaactacaaaaatgactcctcttgtatgacacagaaagaaatgtttcttcacagagggaggagaaaaatatcttcaagagagaactaatagaatcaaatcaatgaaccatgtctcatctttttggataagtaactgttagtaatccagacacttcatgagctttcattatgtaaagtctttagcagaagctaaaggaggggcaccaaccacagtaattttaacttaagaacaaaatggagcatgaaaataaattattaaatcatttactcccactatttttgggttagggccaataatggggagagaaagaggtagactagttttgtgtttgtggctattttaatagagtagcacaagtaatcaaaaaacagtaggctgttttgaatttactggctgtcccttatgagttcacagttagattggactgtcctcaatgtactttcttttttttctttctttcccacatctctttatttctctgattttgtttaaacttcataaagagctctctgatctttcctttccaaacaatgaaggtttatcctttgtaaactacctctgtactccacaggctgatgatatgtgatatccctatatcattaaagtaaagcctaagcacattctatggcttttgtgtctactctgttgttgctgagcttatgaactattagaaataactccctcttgcattttcacacatggggaatgtgatgttctcttgggtattatgctaatcatattttggcaggtttctctggagcagatgcagaaatgatcataccactttccagggtgtattattttagctcctttgacttgggccctaagtctgttttacctgatgttcctgaaagatgttcctgatgtccttcactgttctttcatgctggatgttcttgcctatgctgcctcctcagctatcaccctctcttcccctttttaatgtagaactcattcttaatgatttgtcaaaggcaccctatttcactgaaatgccttcta

SEQ ID NO: 2435 - DNA, 2300 bp, Homo sapien
tgctacatccattccacccacgggtctggaaacttgtctgtttacctttccctaaaaacctaagatatatttttaagaagtgccttgtaacttttcatatagcctttcccctactttgggtagactgtttcttacaggaatttggtagatctttccaaagagaattctgtatctgtatttttaaagcataaatcctgtcaactttggaggagaactgatttggcttgagttttctcagacatgggaacttttgacctaagtttgtattttacattgttgaaagggaactccgggatcccagaaaacatatggactgcaattgggtaaagtttctgttccagaaatgcctcttctggacatttcatacaaatggaaacatgcagcatgtagtaatttatgacagcttctttcacttagcatgaggttttcaaagttcattgatgtggtagcatttgtcagtactctgtgcctttttatggctgaataatattttatcatatggatttaccacattttatcattttatttatccatcatcagttgattgacatttgagttgcttctactttttgagtattatcaataattctgttatgaacattcttgtataattttttggtagacatttatcttcatatttcttggatatatacctaggagcagaattgctgcgtcagatggtaatgctgtttaaccttttcaggaactgtcagactgttctgaagtgggtacattattttacattccaaccagcagtgtatgagaattccagtttctccacatcctcatcaacagttgttattgtctgtcttttttattatattcatctgtaatgtgaagtgtttatctcattgtggttttgatttacatttccctgatggttgatgattttcaacatcttttcatatacttattagtcattatgtatcttctttggagaatgtctgttcagatcctttacctactttataattggtttatctttttaatattgaactgtaatagtttttaaaaaatatatcctaaatacaagtctcttatcagataatatgatttgcagatattttctgtcattctatgtactgtcttttcacattcttgatgatatacttttcagcccaaatgtttttaacttgatggaatacaatttattttttcttttgttgcttgtgctttcagtcatatttgtgaaaactttgcttatcccacattacaaagatttactatttctaagtgatttataattttaccacctacctttaggtctctgatccattttgagttaatttttatgtgcgaggagggagtctaacttgattcttttacatgtggatatttagttgtcccaggaccatttgttgaattaagtgcccagaacaagtacatctatatatagagaaagtagattagtggttgtcagagactgtaagaagtggggaattggagagtgactgcccataggtacaggcatgctttttggcattatgaaaatattctggaattaggtagtggtgatggttgcagaacttttggaatatggtaaaagacactgaaatatatgcttaaaaatggtgatttttgtgatatatgaattatactatagaactaataataacagtaataaagcaaggtgtctttccacatctccatgccttgtattttcattaaaaaaaaaaaaaaaaaagcatttcagggccaggctcagtggtttactcttgtaatcccagcacttttggaggcctaggtgggaggatcacttgaggccagaagttcaaaaccagcctgagcaacatagcaagaccttgtctccatgaaaaataaaaaattagccagaaatggtgatgtgtgcctagagttccaactacttggaaagctgaggcaagaggatcgcttgagcctaggagttcaaggttgcagtgatctataatcaccactgcactccagcctgggtgacagaacaagaccctgtctcaaaaaaaaaaaaaaaaaaaaaaaaaaggcatctcactttaatagtaagaggccagaatatgatgctggcagcatgttgtgaggaaatgtattagatgaaagaagttaaattccagttctccttttttcagaaatgaggtataggggagagaaacacgtactttgaaagaattgacccagctgaattggaaaatgtgggaaggggatggggaagaggctgctccacctgagatctggctccaggacttacagcaaggggaacttgggcaagttacagactgtctatgcctcagtttctttatcagcaaaacagaatcatcccataaact

SEQ ID NO: 2436 - DNA, 2300 bp, Homo sapien
gctgctcactctacagtgtgggttgcctttgtgtctggaatgtgtctgacgtcctgatccctgtgcacatttcagggagccttgggaggaccccgaatcactgatggaattgcgcagtgcatggagatggctcagcaggatgagggtaaatgcaggggcaagtccaggccatactgagagacaatgagtggcgctgatgaggacaaagataaaatcaaaagtttgtgcttcatcttcaaaaactcaagctgataacaaacttggcctgatgagaaataataagtatttttctatttacatgagaatttaatctcaaaacagaaatcagaaaaatatgaagtccagggcataaaacctaaaactattgctcatatttattctttctaaatagagcaaagtgtaaaatcttctccataagacatacattgtggttataaaaaggcaaaagtcttagtgagaatcattggtattccatagaagagtgaattaaacacagccaagggaagacccacgtctcatacttctcttgtatattccaaagttccagggaaattccaggtgatagaggttatttcccatactgttaaagcaaggtttcagacacttctgaattttggtcccagtactctagaagggcacacctctgtcctggaaaataatacaggaatgaatactcttcccgtgacccattctggtcattcttccagcatcacaaaaaccaaaaaatggaaatatggccaaatacgtgattagctgtccctcatcttcaggtttcttatctgttacttatagataatagcattaccttaaggattatgatgaagatacaatgtccaaatataaacacagttttgagcaaaatgccttgtacgaattggtcaatgaataattactaaatatgtgaatatttctggattgtatggatcctatgaataattactgaataattattgtgattgcttttattggcagtgctgaaaactcatccctttgtgacctcaagtaacccatgacactttgtgaacctgcagttttttcatttagaaacttgacagattttcattctgacacagaatgtcaggtctcccagaccctagaaaatacattgacttaaagcctttgatacatctcaaagcagtatccttacagtgtcactggaagatggtgcgggctgcagagagggatgctttcaaatgggattaaccagtcctccttccttcacttccacatgaatgctgggcagcccagggtcaacccactgcaccctcaactcaggcaagtccagcagccaatcttaggagacctgggctacagaacagtctctcaagttccaggctcacaaaacctaggtggggatgaaagctgagaaagcgaagaggtggttcaggggatcactctttcctacttgttcctctcacctcaaactcaccttctactgcacagcaacactgaggatcgccaaccaaccctgaccataaccttgatcttgccatgttctgttagtggaatgcaacccaaaatcaatggtgttaggtcatctcaacaaaatatatatcaaaccatattccataagaactgctcgtggccctgttcttttcagtatatgggaaaacaaaatggaaacaacaaaatagcatcaggtttacaaaacttcccaagatagatggtcacacatgttttcaggagacctctatataaatgactttgatcacttgataccttgaaaagaggtcttggggcactagaatgacatctataagtgacaagtataaaatgtagtgctcagtgacattaaaaaacaaatcaacccacatagaggaagagctttggacgtagggatgtcaaactggtctagaatgtaatgaaaacccaagaaggtgccccagtaagaaagaagaaatcaatctaacaatgggatgcagcagcaagaatactgagacaggaaagaaaatattttaaaaaaatgaattattcattcactttctagtggatacagaaaaaactgcagaagacccggaggatatcagggcaggctaaaagtttgatatcttacacctgtggaaaagccttaagctctgttttaactgagagcaggtggggtgacttcatgactaccattaagaaaatataacctgttgggaaactgtttctgccttgatgatgttgtacagacaagagataaacagtgaggaatatgcttagatgtattgggaaagacacgggtctgtggcattgtcacaagggtacacgaatactgagagtgaatgctgaaggaatgatccccattggtggtgaccctc

SEQ ID NO: 2437 - DNA, 2300 bp, Homo sapien
ttaaagcaaggtttcagacacttctgaattttggtcccagtactctagaagggcacacctctgtcctggaaaataatacaggaatgaatactcttcccgtgacccattctggtcattcttccagcatcacaaaaaccaaaaaatggaaatatggccaaatacgtgattagctgtccctcatcttcaggtttcttatctgttacttatagataatagcattaccttaaggattatgatgaagatacaatgtccaaatataaacacagttttgagcaaaatgccttgtacgaattggtcaatgaataattactaaatatgtgaatatttctggattgtatggatcctatgaataattactgaataattattgtgattgcttttattggcagtgctgaaaactcatccctttgtgacctcaagtaacccatgacactttgtgaacctgcagttttttcatttagaaacttgacagattttcattctgacacagaatgtcaggtctcccagaccctagaaaatacattgacttaaagcctttgatacatctcaaagcagtatccttacagtgtcactggaagatggtgcgggctgcagagagggatgctttcaaatgggattaaccagtcctccttccttcacttccacatgaatgctgggcagcccagggtcaacccactgcaccctcaactcaggcaagtccagcagccaatcttaggagacctgggctacagaacagtctctcaagttccaggctcacaaaacctaggtggggatgaaagctgagaaagcgaagaggtggttcaggggatcactctttcctacttgttcctctcacctcaaactcaccttctactgcacagcaacactgaggatcgccaaccaaccctgaccataaccttgatcttgccatgttctgttagtggaatgcaacccaaaatcaatggtgttaggtcatctcaacaaaatatatatcaaaccatattccataagaactgctcgtggccctgttcttttcagtatatgggaaaacaaaatggaaacaacaaaatagcatcaggtttacaaaacttcccaagatagatggtcacacatgttttcaggagacctctatataaatgactttgatcacttgataccttgaaaagaggtcttggggcactagaatgacatctataagtgacaagtataaaatgtagtgctcagtgacattaaaaaacaaatcaacccacatagaggaagagctttggacgtagggatgtcaaactggtctagaatgtaatgaaaacccaagaaggtgccccagtaagaaagaagaaatcaatctaacaatgggatgcagcagcaagaatactgagacaggaaagaaaatattttaaaaaaatgaattattcattcactttctagtggatacagaaaaaactgcagaagacccggaggatatcagggcaggctaaaagtttgatatcttacacctgtggaaaagccttaagctctgttttaactgagagcaggtggggtgacttcatgactaccattaagaaaatataacctgttgggaaactgtttctgccttgatgatgttgtacagacaagagataaacagtgaggaatatgcttagatgtattgggaaagacacgggtctgtggcattgtcacaagggtacacgaatactgagagtgaatgctgaaggaatgatccccattggtggtgaccctcaggtgagagtagggtgcctgtgtttcagcaaagcctgggcaattggaatgcagagctcctaagattccatgacacccccaccttctaattctgttattgcaactgcagacggttacctggcacgctggccacattctgcctcactcttatcagagtctgagctactggcagtgctttcagctctgagttgaggcacctcgaaccttgtttttgtggtgaaggatcctaaagtgctgtggggagtgatcacatttttcacaacagtaagttaagaatttcagttactgacatccctcagtcctgattaaaccgatttgatttcaccagtttttaacccatcatatgtttgggtttcttctccccagtccctgactccacctcttctgccacaaacgtcagcatggtggtatcagccggcccttggtccagtgagaaggcagagatgaacattctagaaatcaacgagacattgcgcccccagctggcagagaagaaacagcagttcagaaacctcaaagagaaatgttttctaactcaactggccggcttcctggccaaccgacagaagaaatacagtaagatc

SEQ ID NO: 2438 - DNA, 2300 bp, Homo sapien
attctgtctcccatcagatcatctgggaggttttgttgtctaatgtctgttggttaaatcttctatcatccctgtcctgcctggctcatcaggaatctgcaggagtctgaagaggaggaagtcccccaggagtcctgggatgaaggttattcgactctctcaattcctcctgaaatgttggcctcgtaccagtcttacagcagcacatttcactcattagaggaacagcaagtctgcatggctgttgacataggcagtgagtactccattgtgaaggtgataaagctccagttcatggcccaggtagaccccataatctttgggccttgtgccccttgttgggctgagatttgccatcaccgtgggctgaacctatatatcaatgtagacttcagtcactctggagtcaagtctgaagcacaggcatggggtgggtcagtgagctttactctcttcctagtctcaggccatgcccgtgccaacctggactgactgtcacgacattgaactcaaggcaggtgtggcaaactcacaccaaactatgtagcacatgcccaggagttgtctgtcagatcagctcatctgaattaaatgtctcttgccagctacaaaattccttatgagttttgttcccaaagcatgtctgtgtggttctttacctgcccaaggccagtgtcacccttgtctacctctcagtgaaagatgtgacccaggtttcactgaatttattcccattttctgtgtcttctaagttcgcttgttttagctcatctgtccgtcatgttcctggtatgttttctagataaatggctgacttttcacccacaaaagccataatagctgatgcttctgtgtagaaccaagtttcattttgactcaagagctggtacattgcaccccttcatcaaatctctgtgtccacaatctcataaactatcaaattctgggtatttgatgagagaaagcttaatattgaagtatctctcctatgaggtgttagaactatttgcctacaatttattggggaaaaaattgctcatttgtgtacataaacctaggacagagcacatagggaagataacattccaacacaggggaattttgcccaaggctcatgaaagaacccaagccagttttctcaagacttgacctcaggcctactggaatatttctctgaaagtctcctgttctcacactgacaagactgatgtccctgtgttaggattggacagaggaatgtttctgtgtgcaaggaagaacttaatgtaagagggcacatctgaatttatttgcaggacatcggtgggatcaagtgaaaaaggaggaccaagaggcaacaggtcccaggtgagtctgagaaattgtggacagttaatttgatgttgacacctggagatgccaagtccagggaaaacagtacatcctgaaaataatgattttgtcttgtcagacaagtctgaattatgcctactacattgctttttggttctcattagagtaaatgtttaggtttccatttcttcctacccttatcatttactaacctagtgaaagttgaccatacctcaaaagctgtattctcatggtaactgccgggaaacttgagcacattttatgcaaaattattgaggacatgcttttcatgatcactgttcactgtgtgtcctgagagcacaaatacagagtgtcctttgactccctcatcagtgtgtcacctgaccaattgactgagctcgctctgtgtgtgtgtgtgtgtgtgtgtgtgtgtgtgtgtgtgtgtgtgtgtgtgtctttctcgttcatccttttctacctggccctagtcaatcccaacataaaggcaataatttgttacctcattaatggatctgtcctttttcttttcaaactcttccttatgttagccatgaaatctagctggggctgtgtggtttctgattccccctggcttattctttactttttcctacttttccacgctcagcagggagctgctggatgagaaagggcctgaagtcttccaggactcacaggatagatgttattcaactccttcaggttgtcttgaactgactgactcatgccagccctacagaagtgccttttacatattggagcaacagcgtgttggcttggctattgacatggatggtgagtacctttctatgaaggtgataaggatccactgagtcttctggttagggtcatattcctactgcaagtggccgttactgagctgagagatgtcattgccacagggaggacctataggcacatgtaggttgaatgaaactctagtt

SEQ ID NO: 2439 - DNA, 2300 bp, Homo sapien
ggatccactgagtcttctggttagggtcatattcctactgcaagtggcccttactgagctgagagatgtcattgccacagggaggacctataggcacatgtaggttgaatgaaactctagttccacttggaagcccagacaagggatgggtcagtgagcaaggctctcttcctagtctcaggccatgcctgtggcgccctaatcctactctcatgacattggacctgggcagatgtgacaaattcacacaactctgattttgtctcaattttgtagatcttgtagatttcatccttcactctaatttcagcgtctgaaatcctcgctaccatgaacaatctgagtatttgatgagacagggctgaatagtgcagtttttctcctagcaaccatttgggggcaatttctttaaatcgattggaaaaatatggcataaccatttgcacaaacttgggacaaatgatattgggataacgatctaccagaatagggaattttacccacagtttctgggacaaaaaccaaggaatctctatggtgatcagccttcatgcctcctgaagaatatctctcacagtgtcctactctcatgctgaggagcctgaagtccctgtgtgaggattagacagtggattgttatgtgtgtttaggagaaccagcttaatatgtctgtccatgtctgaacttattgcagaaattgaaaagtaccaagaagtggaagaagaccaagacccatcatgccccaggtaactttgagcaattatggatgcttaattctgtgttgacacctggagatgccaggtccagggaaaacaagagtgtgttcaatttcatgttttcaacgaaggttgaattactcctactgacattgctgttggttttcattgcagtagatgtttaggtttccatttcttcctccccttatcatttactcacttactataggttgaccatacgtcaaaggctgtatggcaactgcatggaatcttgagcaagtttatggaaaattattgagcccactcttttcatgatcactgttcgctgtgtgtcccgagggcactaactcagagtgtcctttgaccccttcatcagtgtgtcacccggccaattcgctgagctcactttctcctctctctctctctccctctccctgtctttctctttcattcttttctacctggccctggtctatcccaacataaaggcaataattcattacctcattaacggatctgtcctttttctttttaaacagttccttatgttagccatgaaatctagctggggctgtgtggtttctgattccccctggcttattctttactttttcctacttttccaggctcagcagggagctgctggatgagaaagagcctgaagtcttgcaggactcactggatagatgttattcgactccttcaggttatcttgaactgcctgacttaggccagccctacagcagtgctgtttactcattggaggaacagtaccttggcttggctcttgacgtggacagtgagtaccttactgtgaaggtgataagcctccacctggtcttccagataggggtgatattcctgttccaagtggcccttactgacccgagagacgtcattgccgcaggcaggacctatgggcgcatataggttgtaatgaaactgtagtctcagttggaagcctagacatgaaatgggtcagtgagcaaggctctattcctagtctccagccatgcctgtggcaacctgagcccgctctcagcacattggacccaggcagatgtaaaaaattcacagaagtatgatttggactgaagggtttgtagatttcctccttcattctaatttcagtgtctaaaattcttgcatccatgaacgagctgggcatttgatgagacagggctgaatactttagttttcctcctggaaatcatctggggcattttctttgaactgatgggaacaataaagcataactgtttgcacaaacttgggataaatgattttgggataacgatgtaccagaatggggatatttcacccttggttctgagatgcaaaccaaagaatatcatgaccagctttcaggcctcctgaagtatatctctcacattgtcctgttctcatgctgaggagcctgagatccctgtgtggggattagacagtggactgttatgggtgtaggtgaattggcttattttgtctgtccctgtctgaatgtattgcaggaattaaaaaggacgaagaagaggaagaagaccaagacccaccatgccccaggtaactgagcaattgtgaacagct

SEQ ID NO: 2440 - DNA, 2300 bp, Homo sapien
gaggcaacagattcagggaaaccagagtgtgtttgatgacatgttttcagcgaaggctgaattactcctactgtcattgctgttggttttcattgcagtagatgtttaggtttccatttcttcctccccttatcatttcctaacgtaccataggttgaccatacttcaaaagctgtactctcatggccactgcatcgaattttgagcatattttatggaaaactattgagctcactcttttcatgatcacagtttgctgtgtgtcatgagggcactaagtcagagtgtcctttgactcccttaccagtatgtcacctggccaattcactaggtcactttctctctgtctctgtctctgtctctgtctctgtctgtctttctctttcattgttttctacctggccctgttctgtcccaacataaaggcaataatttgttacctcattaatggatctgtcctttttcttttcaaactcttccttacgttagccatgaaatctagctggggctatgtggtttctgattccccctggcttattctttactttttcccacttttccaggctcagcagggagctgctggatgagaaagggcctgaagtcttgcaagactcactggatagatgttattcaactccttcaggttgtcttgaactgactgactcatgccagccctacagaagtgccttttatgtattggagcaacagcgtgttggcatggctgttgacatggatggtgagtacctttctatgaaggtgataaggatccactgagtcttctggttagggtcatattcctactgcaagtggcccttactgagctgagagatgtcattgccacagggaggacctataggcacatgtaggttgaatgaaactctagttccacttggaagcccagacaagggatgggtcagtgagcaaggctctcttcctagtctcaggccatgcctgtggcgccctaatcctactctcatgacattggacctgggcagatgtgacaaattcacacaactctgattttgtctcaattttgtagatcttgtagatttcatccttcactctaatttcagcgtctgaaatcctcgctaccatgaacaatctgagtatttgatgagacagggctgaatagtgcagtttttctcctagcaaccatttgggggcaattcctttaaatcgattggaaaaatatggcataaccatttgcacaaacttgggacaaatgatattgggataacgatctaccagaatagggaattttacccacagtttctgggacaaaaaccaaggaatctctatggtgatcagccttcatgcctcctgaagaatatctctcacagtgtcctattctcatgctgaggagcctgaagtccctgtgtgaggattagacagtggattgttatgtgtgtttaggagaaccagcttaatatgtctgtccatgtctgaacttattgcagaaattgaaaagtaccaagaagtggaagaagaccaagacccatcatgccccaggtaactatgagcaattatggatgcttaattctgtgttgacacctggagatgccaggtccagggaaaacaagagtgtgttcaatttcatgttttcaacgaaggttgaattactcctactgacattgctgttggttttcattgcagtagatgtttaggtttccatttcttcctccccttatcatttactcacttactataggttgaccatacgtcaaaggctgtatggcaactgcatggaatcttgagcaagtttatggaaaattattgagcccactcttttcatgatcactgttcgctgtgtgtcccgagggcactaactcagagtgtcctttgaccccttcatcagtgtgtcacccggccaattcgctgagctcactttctcctctctctctctctccctctccctgtctttctctttcattcttttctacctggccctggtctatcccaacataaaggcaataattcattacctcattaacggatctgtccttttttttttaaacagttccttatgttagccatgaaatctagctggggctgtgtggtttctgattccccctggcttattctttactttttcctacttttccaggctcagcagggagctgctggatgagaaagagcctgaagtcttgcaggactcactgaatagatgttattcgactccttcaggttatcttgaactgcctgacttaggccagccctacagcagtgctgtttactcattggaggaacagtaccttggcttggctcttgacgtggacagtgagtaccttactgtgaaggtg

SEQ ID NO: 2441 - DNA, 2300 bp, Homo sapien
tggttttcattgcagtagatgtttaggtttccatttcttcctccccttatcatttcctaacgtaccataggttgaccatacttcaaaagctgtactctcatggccactgcatcgaattttgagcatattttatggaaaactattgagctcactcttttcatgatcacagtttgctgtgtgtcatgagggcactaactcagagtgtcctttgactcccttaccagtatgtcacctggccaattcactaggtcactttctctctgtctctgtctctgtctctgtctctctctctctgtctttttctttcattgttttctacctggccctgttctatcccaacataaaggcaataatttgttacctcattaatggatctgtcctttttcttttcaaactcttccttacgttagccatgaaatctagctggggctgtgtggtttctgattccccctggcttgttctttactttttcccacttttccaggctcagcagggagctgctggatgagaaagggcctgaagtcttgcaggactcactggatagatgttattcaactccttcaggttgtcttgaactgtgtgactcatgccagccctacagaagtgccttttatgtattggagcaacagcatgttggcttggctgttgacatggatggtgagtacctttctatgaaggtgataaggatccactgagtcttctggttagggtcatattcctactgcaagtggcccttactgagctgagagatgtcattgccacagggaggacctataggcacatgtaggttgaatgaaactctagttccacttggaagcccagacaagggatgggtcagtgagcaaggctctcttcctagtctcaggccatgcctgtggcgccctaatcctactctcaagatgttggatctgggcagatgtgacaaattcacacaactctgattttgtctcaattttgtagatcttgtagatttcatccttcactctaatttcagcgtctaaaatcctcgctaccgtgaacaatctgagtatttgatgagacagggctgaatagtgcagtttttctcctagcaaccatttgggggcatttgctttaaatcgattggaaaaatatggcataaccatttgcacaaacttgggacaaatgatattgggataacgatctaccagaatagggaattttacccacagtttctgggacaaaaaccaaggaatctctatggtgatcagccttcaggcctcctgaagaatatctctcacagtgtcctattctcatgctgaggagcctgaagtccctgtgtgaggattagacagtggattgttatgtgtgtaggagaaccagcttaatatgtctgtccatgtctgaacttattgcagaaattgaaaagtaccaagaagtggaagaagaccaagacccatcatgccccaggtaactttgagcaattatggatgcttaattctgtgttgacacctggagatgccaggtccagggaaaacaagagtgtgttcaatttcatgttttcaacgaaggttgaattactcctactgacattgctgttggttttcattgcagtagatgtttaggtttccatttcttcctccccttatcatttactgacttactgtaggttgaccatacctcaaaggctgtatggcaactgcatggaatcttgagcaagtttatggaaaattattgagccccctcttttcatgatcactgttcgctgtgtgtcccgagggcactaactcagagtgtcctttgaccccttcatcagtgtgtcacccggccaattcgctgatctcactttctcctctctctctctctccctctccctgtctttctctttcattcttttctacctggccctggtctatcccaacataaaggcaatagttcgttacctcattaatggatctgtcctttttctttttaaacagttccttatgttagccatgaaatctagctggggctgtgtggtttctgattccccctggcttattctttactttttcctacttttccaggctcagcagggagctgctggatgagaaagagcctgaagtcttgcaggactcactggatagatgttattcgactccttcaggttatcttgaactgcctgacttaggccagccctacagcagtgctgtttactcattggaggaacagtaccttggcttggctcttgacgtggacagtgagtaccttactgtgaaggtgataagcctccacctggtcttccagataggggtgatattcctattccaagtggcccttactgacccgagagacgtcattgc

SEQ ID NO: 2442 - DNA, 2300 bp, Homo sapien
caaataaaataattcctttcccatataagtatgtgtatatatgtattcattgtattttgaagataaatttttacacagtcatgttaatcgctttcatttaaggatttgagtttgatgtcttgcatacaatgtgatcccactgtatgactacacaaatgttggcaaaagtgagttcagaggaaatggtaggcaagtacttcccagttttggccagaagatggagaaaaaagaattctcaaaaaatgttaaaggtatgacctgttatatcttcttttcacagtaatttagacagaaattagcaaaatcaaacatgtataaatactttggtctgacaattccatctccaggtgtctacagagaaatagacaagtgatgcacgacagatacatgtgtcagtctggtccctgcagttgtatttgtaataatacacattggagcaatttcatggccatcggttagagaatgtttgaggaatgatccattcatatcaagaaggacatttcaaagatcaaaacctgatggaaatgctggagaccatggagctgataggagctcatgcgtgtggaccaattactacgtgacaggcattggctccatgcttttcctgcactgctcatttaaacactggacaacctaagtgttctgatttatcccattggacagatagaaatggaggcagagaagattaatgtgtttaacttcaaaccctggcagattaggtttttcatccagagcctgtggcttcaccatagctgtgattcacgttctgtcattctccactttaggaatttccagtattccaaatatgagaagctgagaaaacaaacaacaaactcaaaaccctaaaaaccggatacgtaagggtagatgtttgttgggtgtggattaaaaatggactttttttgccccaagcaacaaagaggcaccttagaaaatagacaagagacaagaagaagagaagctttaagagatatttggtccaaggaagagactcttcagatggaaggtcacgtcagctagaaacattaatatgactggatgggctcaaaccactgacttttcagtcaacatctgacagcactaacccagtgttccagagacactgcttgttaaacagtgaatgctgttgctcaattgtgtcatccgtaattgtcaaatattggcatttagtagcacaaggaagtattctccgttgccaagctagagcacccataactcttctgttttgttgaacattgttccccaccacaaaccctctttagaagactgggggctcctaaagcattgaggccgagagtcccgtccttgtgcatgtttgggcattgacccagggccaagtcagtgggagactcctccacgcctacgccaggtccccaggtgacaactgcagtctctggatctgaagtcatccactttcccattcctagctcacctcacccatcgtgaagcctggttagtattgccagagacccgagtgggcagatgcccacaccaaagacagaacctgctgcgtgcccaccttgctgatccctccctccttctagacaaaggcttcataagccagggaccttgggtttgctcacaaggcagcccctcacctagtaggcattagttcattatgtatatgtatatgtagtcctcaggttgtattccttaaatatatatagtttaaggatatgtattatatatatataaatatatatgtaattccttaaatatataattttaatacaattttttttttgagacggagtctcactctgtctcccaggctggagtgcagtggcaccatcttggctcactgcaagctccacctcccaggttcacgccattctcctgcctcagcctcccaagtacctgggactacaggcgcccgccaccacgccaggctaatttttttttttttttgtatttttagtagagatggggtttcaccatgttagccaggatggtctcgatcttctgacctcatgatccacccacctcggcctcccaaagtgctaggattacaggcgtggaccaccgcgcctggccaaaacaaagtttttaaaagattcctttaataaacatttacaataacatcaagaaatataaacgacatagcaaatatgtgaaagccagccagactctcaatggcatccagaaacataaactacatagaaaagacatgaaagccagccaggcttggcttcgaatcccagcactttggaaggctgtggcaggagggttgcttgatctcagaagcttgaaactagcctaggcaacatagtgagccctcatctctactgaaaatcagaaaa

SEQ ID NO: 2443 - DNA, 2300 bp, Homo sapien
atttctataatgaaactgcttgtgatatggcctctaatggttgagaaatatttgtcatatatatatacctgagaagtatatatttgacaaaaatatttgtcatatatatacctgagaagagtgctatgagggcctctagactctgtattaaaatagagccaactggtaaagatggcttagtgattgtgttggttattactgagtgtcaatttgattggattgaaggatacaaagtattgatcctgggtgtgtctgtgagggtgttgccaaaagaaattaacatttgagtcagtgggctgggaaaggcagatccacccttaatctgggtgagcacaatctaattcactgccagcacagctagaataaaaagcaggcagaaaaatatgaaaggagagactggcctagcctcccagcctacatatttctcccatgctggatgcttcctgcccttgaacatcagactccaagttcttcaattttgagactgagactggctctccttgcccctcaagcttgcagacagcctactgtgggaccctgtgatcgtgtaagttaatacttaataaattcccctttatttatatatctacctatatagatatccatatctatatagatattaataaatctagagagacagaaagcagactggtgatggccagtctagatggctagatagatagacatggatatagatatagatctctatatagatagaggtagatacagatatagatatatgccctattagttctgttcctctagagaaccctaatacagtgaccgtatttggaatcggtccttctgttaatttcacttggcaagtactaaaagatgatgatctcagatatacctatggctgcaaaaacatgacatggctaaatcccttggttgcagtatctcttttcttttttaaggggggtgggggggcgggtctcactgttgcccaggctggagtgcaatggcgttatcatagctcactgcagcctcaaactcctgcgctcaagtgaccctcctgcctcagctcccaaagtgctgagattttgcaatatttatggtcacaagattatgttattccataaaagtatctttctgaggctaggcatgttggttcacacttgtaatcccagcactctgagaggctgagatggaaggattcattgaggcaaggagttcaagaccagcctggtcaacatagtgagacctcatctcggaaggaaggaaggaaggagggagggaggaagggagggagtgaaggaaggaaggaaggaaggaaggaaggaaggaaggaaggaaggaaggaaggaaaagtatatttttgaatctttttctatttctccaactctttctttagaagaattctatttccattctttcttcacctctttgcctttgttagccttctctccaagcaaatcgggagcctttattttttgtgtattcatgagggagaggaagatgaattgctgtacaaactaaagtaatgaaaatggagtaggtaggaggatagacagctgcaaggatctgagctggatagactgaacaaaccctcatcctaagcaactcacagctcagatttcttctctggacagctggcttttttcgtccttctgaaatactctgcaaagataggagaggggctatgaactacctctgctatggatcttattcaaagtcagctacctcctagatactatctgtagaacctaaatgtaatattcagcatagcagggatgaacatggtaaatgaaaggtatccaattgcccactgtaatttttaaaggccaggagctcaacattattgaaaatgctggagggctgcctggagtaggcagtgaccacagagtcacacaagctggaattggatatccaacttgtctgtcatatttctctcctccctccctgacttggcactcaatactccatattctttctaatcctctaaccctccccactcccccaactcccacaccctacccccaccaacgttcctggaattttggacttagctatttttaaaaccgtcaactcagtagccacctccctccctgctcagctgtccagtactctggccagccatatactcccccttccccccataccaaaccttctctggttccctgacctcagtgagacagcagccggcctggggacctgggggagacacggaggaccccctggctggagctgacccacagagtagggaatcatggctggagaattggatagcagagtaatgtttgacctctggaaacagtaagtcaaaatgaaattgcaattcctttaataagcttttatat

SEQ ID NO: 2444 - DNA, 2300 bp, Homo sapien
acatggtgaaaccccatctctactaaaaatacaaaaattagctgggcgtggtgatgcatgcctgtaatgccaggtactcaggaggctgaggcggagaatcgctctaacccaggaggcagaggttgcagtgagctggggtcaggccactgcactccagcctaggcaacagagcaagattccaccttaaaaaaaaaaattacttcagtcagagttccacctcctctgctcccagtaactcaatcaatattgttaaccaactgaaaacacctcaagcctagctggttaagtttctagaacagggtgccgcctcaaacacaccctaaggatcaacatgttcctggggtttaatgcatgtgtgtgttttcgaagagactcatgatgcctattcttgagcttgcttaatattggggttgagttgtaactctcgttagccttagagtgtcaatccagctaggctgtctgaggaaggaagaaggctctttaacagcaatgaataggtttttttttttttttttgctgattgggtagggtttcaatatacttgaatgcttcttaattacctccccatctcaatcttgggacattatcttcctctttccagcacaaggaattaaataataatcttctgataccccagcacagatataggaagggtctatgaatcaaataaaaggaggaagaatccctgcacttttgcatacaggtttttcctattacatttaagagtaagttctcagtactcagctcctaaagcatctcacagccagcaggggaaaatccatctgacagctggccaaacgaaaccaacaaagaatgaagagagagggtagggtctcttctggcttgaatttatagtgctctgttgaccgatctttcttctcttttccttcttactgttttctaaaccgtttagggaaaaacctttgaaaatagtttttaaaattgttccttcaaacaggtgtgtggccatctctccactgaaaatttggatataaacaagaggactttctcacttttaaccagatttatggatgtacatttgatttagtgagttggaagaggggatggagacaagaaagagtgaacataactggaaaaaagtgaaaagagtgaagcatcctttttttcccgcttttccttttcctccagaagcaggtaggaagtgggagataatgagcgcctggacacacctcactaaagaggtaatgaggtaaatggggaacacagacaaagtgttccccaactttgcaggtagaaattgaagagatgacaggataagcaacaggatgtaaacacgcccctcctatttccgttccacagaacagagagaacagaagagagggtacaagctgggggtgggtgacgaacagcacaggcacgcagcccccagccctagccccaagggattggaacgggaaggagaagacatcggtcctacacacacaatgaggcctgaaagttctcctttccctcagagacggtggtgttttttatacttaatagggatgcggggcaagagaaggacaaagggctgttcctgaacagtaacaccaagcattctgcgctccacagccccaaacctgaaagtattcttggagctatgggattttcacacacttgctatttatgagccaggaataacgacaggctctaaagtaactgcactggctaagactaggcatgaaattccctcataagcacattttccttttacctcaaaacaccgctctcagaccagaaacgtccacacccgccctccgatggcctgtcgccctggctaggttttagggtcagtgggatcctccttccactggacccgggagaagacgctcaacagccccctccttcccctccttcctctccttcctctccttcccccctccctgcgccgctccagagcgcaacaaccattttcccagccaggagcacaccgtgtccacgcgccacagcgatctcactgattggtcgggctcctggtaaacaaggaccgggcagccaatgggagggatgtgcacgagggcagcacgagcctccgggccagcgctcgcgtggctcttctggcccgggctactatatagagacgtttccgcctcctgcttgaaactaacccctctttttctccaaaggagtgcttgtggagatcggatcttttctccagcaattgggggaaagaaggctttttctctgacttcgcttagtgtaaccagcggcgtatattttttaggcgccttttcgaaaacctagtagttaatattcatttgtttaaatcttattttatttttaagctcaaactgcttaag

SEQ ID NO: 2445 - DNA, 2300 bp, Homo sapien
cgagtagctgggattacaggcatgcgccaccatgcctggctaattttttttgtagttttagtagagatggggtttctccatgttggtcaggctggtcttgtactcctgacttcgtgatccacccgccttggcctcacaaagtgctgggattacaggcatgagccatcacgcccggcctcttttttttttttttttttttgagacaggttcttgctctgtcgcttaggctgaagtgcagtgcagtggcaattttggctcactgcagcctcgacttctccagctcaagcaaccctccacctcagcctcctgagcagctggaactacaggcctgagacaccatgcttggctattttttttgtagtttttgtagagacagggttttgtcatgttgcctagactggtcttgaactcctgggctaaagtgatctgcctacctcagcctcccaaagtgctggaattacaggcatgagccaccacgcccagccagaaatggcttgcttttaagaatgctaccaattccactgtaaaaggacagatttcctttttttttttttttttttttttttgagagggagttttgctcttgttgcccaggctggagtgcaatggtgcgatctgagctcactgcaacctccgcctcctgggttctaatgattctcctgcctcagcctccccagtagctgggattacaggcatgcgccaacacgcccagctaatttttgtatttttagtagagacagagtttctccacgttggtcaggctggtctccaactcccgacctcaggcgatctgcccgcctcggcctcccaaagtgctgggattacaggcatgagccaccgtgcccagccatatttccctcttttacagtggaagtgtggaatgcatttcctttagctatatatttcttatttagaatatttgtaggatattgactaaagaacaggtatcaaaaaattgaatgatctacaagagagataagagagttcccttactaaagatgtttacatagaagctgggtaaaaatttactacatagggtttgtaagaaggatgcatggctctagtagaggattccctatgatcagcatgatttagcattgtgtctggcatatagtaggtgctcaataaatatttattgaatgaataaatacatcatttctatgggcctttccaaacttgagaaattgtgatccataaagcctcccctcaccattccagttctccttgctttcttccttctctagattgtagaaacaattatgaaacactaatattatgaaccactaatttaatggctcttaattacatactgtattgtcttttattgttccctagttatgttaggagtttaaattctgcctccccaaaaagagtgctagttaccagaaatcaattctatttaactaacgtttattgggcactatatattaactactagcacctgtcctacaaaaccttctattctaaaaggcatagaaacgttaaagagagacagtgcactaagtgtcctaataaaggtatatacaaaacgctatcgtagacgggggaacaattcattttgcaagaaaggcggcccaggaaaactacaggtagcatttcagctagtcttcatagataacaggagtttgtcaggctcttgggataatattaatagattagggggaagttgatgctatagcaaagacagatacaagaggctgtctcgttttctgctttaatgtctctccccatgcgcgatagaaaactgccattctctagtatacaatcaatacagaaatggaagcccaggggagaaacggtagggagccagaagggggctgatccaacaacctgacggaaagcgttgtctatttcgcagcctggccggggtgaacaagtttggcaagtgtcggaccgaaccaggtcaagccttacctgctgcccctccccaaagcggagcccaagccgcgaccaacttgaaatgtactgggcttcctcaagtcggtggcgttctaagcccgcctcccggagctccctattggtgagttttctcggccaatgcaggagaagccgaggagggaagtccgccctcttgaagcctaggaagagaaggagggagggagcgagtacgcccggaaccgaagcttgcgaagcgggtcgcagagagagatgggcgttgcagaatcagctggggtcacttatttccggtctcactccagatgaaggagccactagccggcgagagttcaccgagggaacgtgacactcatatctcatcgagggaccgtgttgagggagcccctacagagaggccaaaggag

SEQ ID NO: 2446 - DNA, 2300 bp, Homo sapien
cgggcacagcgccggctcgggaggagagaagcttggcggggggggggggggggggggcggagctctgctgtgctatttatagcctagtcactgcgggtgggggcgtcaggcaccaaactgctcccccactcatgcacacataaaccctcaaaaacctagaggctccaatcctgacttccttttctcagccgacctcccctcagccccaacaaacctaagtgttccttaggggactcctccgcgacccagacagggaccatcatccagattcttcgctgagattcagcagatccccattctccgcacttggtgtgtttgtgcgctcctgtgcgccagacctgacctgccatacacggcacatggcacactgtgtaagaaaggtgtagaaaggctttttggatccacagccggtgtccatactgtgcaaagagaggcaagagatgtggctttcttcctgtagtttaattgtgaaggagatcacggtccagcctggagtcagacacagatacacccccgccccatctctcaaaaacggaacacccatcgcagagaaacttggacctcagctcccttatgtagacctcttagataagtatgaggaaggtggatatgggagcacttttagataaggcaagggacattccaggtgcctccaccccgtattattgtgggcagggagataggacaggggcaggaagaagagcgaaccttgtaatacactctctcacattgcatctctttaatctcagtcttgcttagacgtcttattttttccatcttgcttgacgatctctgtctgaaacattccttatatcttctctcttcctatctgtctattggtctctcacactgtctctgcctctccttgccacctgccctgtctccatggttaccatagcttccatccacatattttaggaatgagtttgtgtccagctgtaaggcaccaagggaagtgggagaaaaagaaaaatcctaaggatttaaaaagttcactcagggtcctgagctaattcagaggctggaggccccccagatgcaagatactgaaaataatgttcccggggatgggagagagagagaaatatttgcaggaagctacccatttttactagttatttcttggacacgtgtcaactatgtgccatgtgctttacatacactattttcaatcctcacaactttataagataggaactatcatcttcttgttacagatgaggaaacagacttaataaggttaagcaagctctccaaagcttcacagctatgtttctgtcctatggcaaagactgggcgcttgccactacacctacagcctcccagtctacaggccattttctctgacatctgggatgttcttcttgactaactcctagatttcatctccattctgaacctttctcccttgtttctgctttctgtgaaaataggactcctccttccactctgctggctttcccaaggagctcgcaggaagtggaaagtagtggaaaatgcagaaaaagctgggctcctgccctgtctccccaaccctggtacgctgatcccaaatccttcctttcttgaaccctctgcccaccttctcacagacacggcagcaacccacagaaaaacatttttagaaaagaagtatccattggtggtgctggagagaggcagtgtatgattgaaaggaaggctggagtaatggagagaccaagctatgaagctagagtcacaaaaagactgatccctaaagagcagcttttacagaggttcatttctccgtaggccctctcctcctttggcctctctgtaggggctccctcaacacggtccctcgatgagatatgagtgtcacgttccctcggtgaactctcgccggctagtggctccttcatctggagtgagaccggaaataagtgaccccagctgattctgcaacgcccatctctctctgcgacccgcttcgcaagcttcggttccgggcgtactcgctccctccctccttctcttcctaggcttcaagagggcggacttccctcctcggcttctcctgcattggccgagaaaactcaccaatagggagctccgggaggcgggcttagaacgccaccgacttgaggaagcccagtacatttcaagttggtcgcggcttgggctccgctttggggaggggcagcaggtaaggcttgacctggttcggtccgacacttgccaaacttgttcaccccggccaggctgcgaaatagacaacgctttccgtcaggttgttggatcagcccccttctggctccctaccgtttctcccctgggct

SEQ ID NO: 2447 - DNA, 2300 bp, Homo sapien
agagaaggagggagggagcgagtacgcccggaaccgaagcttgcgaagcgggtcgcagagagagatgggcgttgcagaatcagctggggtcacttatttccggtctcactccagatgaaggagccactagccggcgagagttcaccgagggaacgtgacactcatatctcatcgagggaccgtgttgagggagcccctacagagaggccaaaggaggagagggcctacggagaaatgaacctctgtaaaagctgctctttagggatcagtctttttgtgactctagcttcatagcttggtctctccattactccagccttcctttcaatcatacactgcctctctccagcaccaccaatggatacttcttttctaaaaatgtttttctgtgggttgctgccgtgtctgtgagaaggtgggcagagggttcaagaaaggaaggatttgggatcagcgtaccagggttggggagacagggcaggagcccagctttttctgcattttccactactttccacttcctgcgagctccttgggaaagccagcagagtggaaggaggagtcctattttcacagaaagcagaaacaagggagaaaggttcagaatggagatgaaatctaggagttagtcaagaagaacatcccagatgtcagagaaaatggcctgtagactgggaggctgtaggtgtagtggcaagcgcccagtctttgccataggacagaaacatagctgtgaagctttggagagcttgcttaaccttattaagtctgtttcctcatctgtaacaagaagatgatagttcctatcttataaagttgtgaggattgaaaatagtgtatgtaaagcacatggcacatagttgacacgtgtccaagaaataactagtaaaaatgggtagcttcctgcaaatatttctctctctctcccatccccgggaacattattttcagtatcttgcatctggggggcctccagcctctgaattagctcaggaccctgagtgaactttttaaatccttaggatttttctttttctcccacttcccttggtgccttacagctggacacaaactcattcctaaaatatgtggatggaagctatggtaaccatggagacagggcaggtggcaaggagaggcagagacagtgtgagagaccaatagacagataggaagagagaagatataaggaatgtttcagacagagatcgtcaagcaagatggaaaaaataagacgtctaagcaagactgagattaaagagatgcaatgtgagagagtgtattacaaggttcgctcttcttcctgcccctgtcctatctccctgcccacaataatacggggtggaggcacctggaatgtcccttgccttatctaaaagtgctcccatatccaccttcctcatacttatctaagaggtctacataagggagctgaggtccaagtttctctgcgatgggtgttccgtttttgagagatggggcgggggtgtatctgtgtctgactccaggctggaccgtgatctccttcacaattaaactacaggaagaaagccacatctcttgcctctctttgcacagtatggacaccggctgtggatccaaaaagcctttctacacctttcttacacagtgtgccatgtgccgtgtatggcaggtcaggtctggcgcacaggagcgcacaaacacaccaagtgcggagaatggggatctgctgaatctcagcgaagaatctggatgatggtccctgtctgggtcgcggaggagtcccctaaggaacacttaggtttgttggggctgaggggaggtcggctgagaaaaggaagtcaggattggagcctctaggtttttgagggtttatgtgtgcatgagtgggggagcagtttggtgcctgacgcccccacccgcagtgactaggctataaatagcacagcagagctccgccccccccccccccccccccgccaagcttctctcctcccgagccggcgctgtgcccggggcgctccgggaggagggaccaggatccggcgccggggcgcagatactgacaccaagggaatccgggtgccccccccccccacgccatgcgggcccccaggaaactggctccgccacctcggctgccccgtggccacggccccaatcctggccaggcggagattctgcggacattcaggtatctatctgggcacacagcctgggaggggaaagagcaaggagtgatggggaacatcgcaggggcaatagaaccccccaattctccctccacccgttttaggtctcaaatgcaggctgcttcc

SEQ ID NO: 2448 - DNA, 2300 bp, Homo sapien
cataagcacagtactcttattagcaagaaagaataagtactctatttactgggtatatacacacatgtattcatgccctggtcatttcacatgcatatgggattacttgtgtacctacaggcacagcatatcaataaacacacagggctagggtcccaaactctcttgcatttgttcagaagcagtagggaacccttacttatgggcagtctccgatgtctttgccctcctgcagaagcaatcccttgctttccatgtatgccctgaaacacagcctatcatgattttgcacactctctccgtggacatcccagcccattctgcaggtcttgcttctttctccaggcctggctccttattcacaccctgcttctaaccccaaccacttttcaggatatctttttcactcttcttgggggttcctgcagcaacccccagcctcagttctgctgctgtctttactgctctcaacttcacttctcaacttcctgctttttattcccaccctgttcctccaacaactacaacagattgtctcattttcccagggggtgggtcatgggctctaagctgctcttctgtctgtctgagcttatgaacacccccacaggtagaagtggggagaaaccctaaatcactcctctctccacttgacatatcaaataaatgtgttcagaagtctctgttttgtcacttctgcctggaggtgtgggtatggggaatgaggaatggggagggagggtaacactaacttatagctataattatccaagggatacttagctgttccagccaccttctttccaagaaaccaacttttctatagagaaaaggcaagtgtcctgtgtcctgaagattttaaggcatttgacaggatttcatttcctccagtttcctctatgtccaaccttgaattctttaaggttcctacaaagagttcctccctccatcatcagcagatatatcccagtagattaactgtctccttttgaaacttcctatttcttgactactcacagtttttattcagggtctaattttcatttcaccaagtgtgtttcttctattttcttctacttctggcctctatttccccatctttgatttctgagccactgtaggagagatggggggaagcagttaatataatctcacctaagcaaaaatggcctggtgaccacatgataaagggtatgtagagtgtgtgtgtgtgcatgtgtgcaagtgtgtgtgtgtgcaaagtaatcagaggaacccagtctgacatattataccaacaagggtaattttcttaattcccccaactggacttctcagtttgctaattttctgcatgtatcctaactctttctcactctaatgggaggcaaagagacttgcccatcccactctctcttattcccttcctctacttagaataagtgaactcagaaatttacccaacaatgtggcatagtaaaaagataaaaatattgggaatcagaacacctatgcttaaactctgaattccactttgccatctcttagctatttaattttggccatttttctagcttccctcagcatctgtttccttatccctaaaataacaaaatctagttagtgattgtgattgtaaataagacatgcactacagtacattgcatagtttatgttcattaaatgtcagtatctttcttgccttagctccaccaccaattgcatatgatgttggacaagtcgaattacttctctgagccacaatatcctcacctgcaatctgtgaaatgaaatggtaggacaaaatgatctctactctgtctgcaatcctccccaatcttgcatctaggcccatttttttcttcaagcccagccccaagattctgtcctgctttctagtgcttgccacaggactcccaaagacgcgccgaagctctgcgtctgcctttcagaggatacgctttttctctttgcaattggttctgagaatccccaccctcctcaataatttgcctatggcggagcaggagccctccagctcccgccccatcactggtgattggcatgggacctagctcgtccccgcccccacttgactgaaggttcggccctggcaccgccctgagtccccaggcgctagctgactggggtggttgggaccgttagctcggcaggctggcaggctccggggcgctactccattggcggccgggatggagactatgcgagcgcagcggctgcagcctggtgtgggcaccagcgggaggggcactctccgagcgctgcggcccggagtgactggggccgcggctgccaccgcc

SEQ ID NO: 2449 - DNA, 2300 bp, Homo sapien
cttgagtgaggaggtcaaggctgcagtgagccaagattgcactactgcactccagactcagtgacaaagtgagaccctgtctcaaaaaaaaaaaaaaaaaagaaaaagaaaaaagaaagcaattatggttcctggctgggcgctgaggttcatgcctgtaatcccagcactttggaaggctgaggtgagcagatcacctgaggtcaggagttcgagaccagactggccaatgtgttaaaaccccatctctactaaaaaatacaaaaattagccaggcatggtagtgcacacctgtagtcccagctacgtgggaggctgaggtaggaaaatcgcttgaacccaggaggtggaggttgcggtgaactgagatcgcaccactgcactccagcctgggcgacagagtaagacttcatctcaaaaaaaaaaaaaaaaaaattatggttccatagtcttcctttgggatctgtgtgggattggttctaggatctctcgaggacacctaaacccaaggatgctcaagtccttcatataaaatagcacagtacagcctgggcaacataaagagacttcatctctacaaaaaaataataaaataattagccgggtatggaggcacttgactgtgatcccagctacttgggaggctgaggcaagaggatcacttgatcctggggagattgaggctgcagtgaccatccactgtactctagccagggtgacagacagaatgagacacagtctcaaaaaaaaaaaaaaaagtacagtatttgcatataacctatgcacatcctcctgaataaatgctttaaatcatctctagagtacttataatacctaatacatgtaaatgctgggccaggcacagtggcttacgcctgtaatcccagcactttgggaggccaagacaggcagatcacctgaggtcaggggttcaggaccagcctggccaacatggtgaaaccccgtctccactaaaaataaaaaaattagccgggcgtgatggcgcatgcctatagtcctagctactctgcaggctgaggcaggagaatcacttgaacccaggaggcggaggttgcagtgagccgagatcgcaccactgcactccatcctgggcgacagagcaacagaatgagactccgtctcaaaaaaaaaaaaaggaaatttttatttttaatttaaaattttatttaattctcaaaacaatcatttaaggtagctctatgattattcccatcttacagaagaggaaactgaagaacagagaggttaagtgactttaccaaggccacgctatttgtaggagctccagtccatgctcttaacttctatgctgtattggtttttttacatgctaggcttgaatgcaggacagtgtgtcttaattctaaccctgcagggttacataaccaatagaagacacaataggccaatgtccaggagaccacactgctacccagaatttccacacttataccacatttcagaaagtcagtacaaaaatgtaaaatatttcattaataatgtttatactgactacagttgaaaaataatattttgaacatattgggttaaataagatatattattaaaattaattttacttgtttttttttttttctgagacagagtctcactctgttgtccgggctggagtgcagtagcccgatctctgcaatctccgcctcccaggttgaagtgattctcctgcctcagcctcctgagtagctgggatttacaggcacccactaccatgcccggctaatttttgtatttttagtagagacacggtttcaccatgttggccaggctggtctcaaactcctgacctcaagtgatctgcccaccttggcctcccacagtgctgggattacaggcatgagccactgcacctggacttacctctttatttttactttaatgtggcagagaggaaattttgaattaaatatgtggcttgcattatatttctactggacagtgctgcttgagatgataatcctggttgaaaatctatttgtcttttctgttcctctactaccagggcaacagggaggaagctgacaacccaaatacagggattggtgccttccgattcatgctggaatccaacaagggcaaatcaatgttggagttccaggtactttcccatgtacttccctggttctaataacatgggtcagcctgctactgtaatatataatggctcctactaattcctaactcattgatactggaaaagaaagaaggttgttacactatttttcaaaaataaataccttcctggctgggcatggtggctc

SEQ ID NO: 2450 - DNA, 2300 bp, Homo sapien
tcaagactagcctggccaatatgctgaaaccccgtctctactaaaaaaattttaaaaagctgggcgtggtggcacgtgcctgtagtcccagctactccggaggctgaggcagaggaatcgcttgaacccagtaagtggaggttacagtgggccgagatcgtgccactgcactccagcctgggtgacagagcgatactccatctcaaaaaaaaaaaaaaaaaaaaaaaaatgaggtcgaacccaatatgtgaaaagctagaggaagagcaccaggaacagaaagctgcggggagcagtggctcatgcctgtaatccaaacactttgggaggccgagaagggcggatgaccggaagtcaggagttagaaaccagcctggccaacatggcgaaaccccgtctccactaaaaatacaaaaattagctaggtgtggtgccgcacgcctgtagtcccagctaatcgggaggctggcgcaggagaagccttgaacccaggagacagaggttgcagtgagccaagatcgcatcactgcactccagcctgagtgacagagtgagactccgtctcaaaaacaaaacaaaccaagttgcaaaagccctgggatgagaaagagcacaccacagttgggcgaaagagcaaggagagcttcatgggttaaggagaagaacggtggttgaacaggttgaaaacacaggcagagcaggctttgtgagtttgaatttttattctaagtgcagcaaaatgccaaggaaagagccgggtgcatggttacacccctgtcgtcccagatgcttgggaggcgagtttcaggccagcctgggtagtataaccaaacccctctaacaaaaagggtttttaggccgggcgcagtggctcacgcctgtaatcccagcactttgggaggtggaggctggtggatcacttgaggtcaggagttcaagaccagcctggccaacatggtgaaatcccgtctctactaaaaatacaaaaattagccgggtgtgtgtgtgtgtgtgggggggggcgcctgtagtcccaggtactcaggaggcttggagggcgcctgtagtcccaggtactcaggaggcttgaggcaggagaattgcttgaacccgggaggcagaggatgcagtgagccgagactgcaccactgcactcttagcctgggtgatagagcgagactacgtctcaaaacaacaacaacaaggatttttagtaggtatgtaaccaactgatttttaaaatgatcacagtacctactgtggagaatgaattagtgtctcctaatcgctttttaaattttatttttcgttttactcttattcactttttttttttttttttgagacagagtctcgctcttgtcccccagactggagtgcagtggcaagatctcggctcgctgcaacctccgtctcccgggttcaactgattctcctgcctcagcctcctaggtagctgggattacaggtgcactccaccacgcccagctaatcagcttccgtttctcgggttcaagcgattctcctgcctcagcctccctagtagctgggattacaggcagggagttttatatttaaaaaaaaaattgatatctgtctcaccaaccgtattgcaaccaagtctgttagtttcctgaagagaaatttggtgctgcaggttccagaagcagctctttatgccctcactgctgatcaaactattttttaaaaacgctcctatcatacaccacgctgcctaaagacaaggtacaggcctgggatttttgaaagaaaagggtttcttcaattaccatttcccagtttgggatgaagagacgtaaagaagccctctaataaggaaattacgccgggcctcactgttaatagtacagtatttatcagcagctgccgcggttaagaggaagccacggccccctgtagtctgtacctcctaagatggatgatttagcttgcgatctgttcaagatggccacagaaacacttccggtatctttccgcactaggcccgccccaatttgcgtgtttttaccgtgcagagggagggatttagagttagcctttgattggtcagcttgactggcgacctttcccctctgcgacagtttcccgaggtacctagtgtctgagcggcacagacgagatctcgatcgaaggcgagatggcggacgtgctagatcttcacgaggctgggggcgaagatttcgccatggatgaggatggggacggtgaggacagtggagacggctggtgggaagcggggaaggtgcgagagaaggctataataggaaaatttactcttt

SEQ ID NO: 2451 - DNA, 2300 bp, Homo sapien
gtgtgctgcacccattaactcgtcatttagcattaggtatatctcctaatgctatccctcccccctccccccaccccccaacagtccccagagtgtgatgttccccttcctgtgtccatgtgttctcattgttcaattcccatctatgagtgagaacatgcggtgtttggttttttgtccttgcaatagtttactgagaatgatgatttccaatttcatccatgtccctacaaaggacatgaactcatcattttttacggctgcatagtattccatggtgtatatgtgccacattttcttaatccagtctatcattattagacatttgggttggttccaagtctttgctgttgtgaatagtgccgcaataaacatgtgtgcatgtgtctttatagcagcatgatttatagtcctttgggtatatacccagtaatgggatggctgggtcaaatggtatttctagttctagatccctgaggaatcgaaaaggcaggctcttaacagatgtaaattaacatacaaataatcttacagaagagagagcagaggtagcagggtgcggtggctcacgcctgtaatctcagcactttgggaggctgagacaggtggatcatgaggtcaagagatggagaccacctggccaacatggtgaaacctcgcctctactaaaaatacaaaaattagccgggcatggtagcgggcgcctgtagcttctcgggaggctgagggaggagaattgcttgaacccgggaggcggaggttgcagtgagccggcaaaaaaaaaaaaaagcaagcagaggcttactccctgagaattaatggctaatggcccccaagcgcaccctttaactcatgctatggacccaaatccctgtcctgcccggtcctgagtcctaggtcactcacctgggggaaggcaagcaggaaactaagtccccaggctgcccccagaagtttccttacacctgaacgggatccaagcgggttgagtactgctgcctggcggtccaatccaatgaccacaggcaggaaagctgcagaatacgtggccattagtttcaggaacatcagtgtccgacatgcgatgtccacagccagccattgaacagtgatattccaggtggcatctaggggcataaccacaaaagtgactagtaagtcggcggctgctaaatggatgaagagtctcctgaccggagaggggcggagctggctgggttcccgccgtgtcactgaccacaggactgccaggttccctccagccgaagaaacaaacagcacaatggtcactcccactcggaccttggctgctgccgagaaggtgggcagctctgagccctccacctccactcctgatccagcccagacctcctcccccgctgctgaccccaaggggtgccgttgcctgcagacatggtggcctggagagaaactgaggaggatgaagtgtgggtatgaagcggttagctttggccactgattcttcgccctccttttcaggatctggagctgattattgcgaatttcgttcactaaagcctctgcttctggagactctccatctgttctggaggaggtcacttgttcaactgtcaaggttctgcagggaacgaagatctggtaccaatcacgctcctttttccttggacagaccagcctgggcttcaggcctctactgacctagacctctttagcccctacagccctggattcagtcggggcctgcgtgcatgtgtatttgtgaggttctgccaggcgcacacctatgccggcggcctccaagacgtggagatcactgcggcgctttctcgccccgccccggcccctgcaggccccgcccttggtcatgaatatttaaagaagaaggtgccgctggaggcgtgctagggagtaggggtcgtctgataaggggaagctgtgacgcagacacgcacagtaatacacagatggaggctcaaaagacacgagtttcgcgtcctgaaattccgcttccagggccaagctttcttttctgatactgtttgtccctcgcgaggcaccgttgggtcgcgcagtaggcgtgactaggggcgggaagtggggcgggagcagggccgcggagcctgggctgcggctgtcatggacgcctgggtccgcttcagtgctcagagccaagcccgggagcggctgtgtaggtgcggcccgaataggaatgggggtggggcgggggagggatggacagaggaagactctagtgaggcgaagtcagtttaggctacaggggggtcaagaagggtcaactccggctacgggggcccgaa

SEQ ID NO: 2452 - DNA, 2300 bp, Homo sapien
cgattgaggtgactaacagtgatgcagaatctcaggacaacatctgataggtgaacagctcttttggctgactcaagggcatctgctgagttacccaggcgtagaacttgtggagattagaaagggaaagcaaggatttgtaagtggagaggcagataacaagaaacagaaacagagaaagcaagagggcaaaagttgagcaataataatgacaatttttttaaagagcagaaacaggctgggcatggtggctcaagcctgtaatcccaacattttgggaggccgaggtgggtggatcacctgaggtcacgagtttgagaccagcctggccaacatggtgtaaccccatctctactaaaaatacaaaaattagcccggcatggtggtgggcacctgtagtcccagctgctcaggaggctgagacaggagaattgcttgaacctgggaggcagaggttgcagtgagccaagattgcgccactgcactctgacctggacgagagactctgtctcaaaaaaataaaaaataaagagcagaaacagtccatttttcaatttcaaatttaatttttgtgccagtttagttttctcaaacttgacccattctctccagtccgcctaattacttccatacccctgctctcttatctcaactggactcatgcagagggtaagtgcagagccaaatgagaaagaagaacagagagggtacaggaaggagggacaaaggaaggtgagctggggatggaggaaaggttgggggataaaaggaaagacagagttacttacgctttcttccaaggctcaggtggctctccagttgtcgaatctgtttctgtaactcaggactggctccatgcctctgcagcgcatggccaagaagagagcaagcatactgggcggccctagaggagagggcaggcaaggtaaggtggagacctccctaaccttccgctcaaaactatcttccaaaaggcacagacagacttccccctttcccagtttgagaacactccccttcctcctccatgcccatatctcaccatttctccaggccagaggaagggaaaggcataaggagaaaaaagagtctagaaaggggtggggagcactactgaatgttgagcaaattagagatttgacaatgatgaggcctgaaggggccagtgcaggccgcaggggtccatcacaagcacatcagcgtgagcatgtacgtgatcgatgagggggaggcagacagttggagggcattttattcctcagaataggtgaactgagagatttcaaggccctctagctgaatggagaccaaacgccagggcggaggcaggggagttcccgaatggcagcacggtgtggggacacggaaactgggagtgcctcctcagctctgggggcagagtctggggctatccaccgtggggcgaatgctcctcattccatcaccgcccagtgaggacactgtcggtcttatgtggacacagcaaccctgagcggcctccccgctggcccactcatgcctcagtttccccatctcttccgcgaacggaaaggaatcatctcaacagcggctcaaatctgcgcctcacggtccgttcgggcccccgtagccggagttgacccttcttgacccccctgtagcctaaactgacttcgcctcactagagtcttcctctgtccatccctcccccgccccacccccattcctattcgggccgcacctacacagccgctcccgggcttggctctgagcactgaagcggacccaggcgtccatgacagccgcagcccaggctccgcggccctgctcccgccccacttcccgcccctagtcacgcctactgcgcgacccaacggtgcctcgcgagggacaaacagtatcagaaaagaaagcttggccctggaagcggaatttcaggacgcgaaactcgtgtcttttgagcctccatctgtgtattactgtgcgtgtctgcgtcacagcttccccttatcagacgacccctactccctagcacgcctccagcggcaccttcttctttaaatattcatgaccaagggcggggcctgcaggggccggggcggggcgagaaagcgccgcagtgatctccacgtcttggaggccgccggcataggtgtgcgcctggcagaacctcacaaatacacatgcacgcaggccccgactgaatccagggctgtaggggctaaagaggtctaggtcagtagaggcctgaagcccaggctggtctgtccaaggaaaaaggagcgtgattggtaccagatcttcgttccctgcagaacctt

SEQ ID NO: 2453 - DNA, 2300 bp, Homo sapien
atcctgtctattctcaccctaatctatccctggctacgactcaagccctgaccttccggtacaggataaggaggggacctgaattggtgagatggaatcttagatcgtcccccatgtgccagcctcattcgaattctactctttggttaaagttagaaattcagagatttaggggtggaggaagagctttggggaagatgaggtaaggaaagatgactcgtgaagttaataggatgtctctaatttctagatgtgcctgagcttctgttcttttcctctttctttgtgtctctcttgaatatatttactttgtgtctcttaactctgtttaaggttctgtgtctatgcatctctctctttcttttttcaaccttctcattctcctatccagggatttaatcagcagaattactttttgataggggaggtataaggtttggcctgtaaggttctaactgccttcttttttctcacagaggtggcttatggcagatttttcctccttcaaactccaaacataatttttaagactatgtgccagtggactcttcccttatatctctgcaccacaagttgttggatgtttcctcttcctcccttatgtctacctcaccaacctcgctcatcatttggcccttatccttccttgtacacctaccttcagatttctgcttacactttgatttcagagctttattccccagtctgttcttactcctttgtcgcttatccagaatgatgctatgtgtagcatcttgctgtaaatcctgtacaatgattctgtgtaaatagctgtggcctatgccaataatgaagagcaagcctttcaggtaagcaaattaaagttcagtttgctcatcgacatttggtctggtccctcattttttggtaatttgaggcccctattcctgtcactgtggtttgggtttttctcgggattagccactaacatcacccacattatttttcttgagcacctacagtatgtaaagcaacatacttagtgggcatccaaaaatctaagaagctccacactcccaactttaagaagtttataacctagctgaggagttggggtggcagaggagtggtctaatactaaagttattgtcctggctccacaaagcacatctcataccagttcagatataatccctctaagaagcagaatgccatatgacagcataggctaagagccaaggacagaaccaagtggagtggggctggtaaggatttggagctgtgtcttcacaagttgagactcccctgggtgggtagggaaatgataccactgctatcagctctttcattttccatattccaggttgagataaataaggttaggaagtgaatctatcggccaggcgtggtggctcacgccggtaatcccagcactttgggaggccgaggcaggtggatctcttaaggtcaggagttcaagaccagcctggccaacatggtgaaaccctgcctctactaaaaataaaaaattagccaggcatggtggcatgtgcctgtagtcccagctacctgggaggctgaggcatgagaaatgcttgaacgtgggagacagaggttgcagtgagccaagattgtgccactgcactccagcctgggtgacagagtgagactctgccttaaaaaagaaaaaaaaaaatctgaatctatctcctatctcccagctgggtgcagtggctcactttgggaggctgaggtgggaggattccttgagttcaggagttcaagaccagcctgggtaacatagtgaaaccctgtctgtattctcaatataaataatttgtctaaaacttttaaacaaaagtttaagattcttttcttataaaaaagaatccatctcccactcctgttccaaatttgaggaaagcattattgacctggcaacaataaacagtagaaaaaaagaaatagcagaaatgggcaaaaaaatatgttctctggatatagagatgaggcctccagggggcagcaccaaggcagagaaatagactaagatcgctcagtgttttccttggtctggggctccccacagttccccaccatcactcctcccattccttccaactttatttttagctgccattgggagggggcaggatgggagggaaagtgaagaaaacagaaaaggagagggacagaggccagaggacttctcatactggacagaaaccgatcaggcatggaactccccttcgtcactcacctgttcttgcccctggtgttcctgacaggtgagggaagttaacttcttggtttctggtggggatggaagatacatagat

SEQ ID NO: 2454 - DNA, 2300 bp, Homo sapien
caaggggctcacacaacctgttctgggacttggtgaccattgtttctgtccacgttcaattgagttcaaatttaatatttaacttttccaccgcagggatcaaatgtgacaggaggcattcttgggaggattaatcaccagctgcaaagggaattgtaaattagaacagtttgaggcctggtgctctgggagttgaggtgaggagaatcgcttgagcccaggagttcaaaaccagtctgggcaacatggtgaaaccccatctctaccaaatatatgaaaattagctgggcatggtgatgtgcacctatagtcccagctactcaggaggctgaagtgggaggatcccttgagcttaagaagtcaaggctgctgcagtgagccccgatcatgctatcacactccagcctgggtgacagcgagaccctgtctcaaaacaaaaaaaacaaggccaggcatagtggctcacgcctgtaatcccagcactttgggaggccaaggcaggtggatcacttgaggtcaggaatttgagaccagtccggccaacatggcaaaaccctgtctctactaaaaatacaaaacttagcgggcgtgatggcacatacctgtaatcccagccacttgggaggctgaggcaggagaattgcttggaccgggaaggcagaggctgcggtgagtgagccgagattgtgccactgcacttcagtctgggtgagactctgtctcaaaaaataaaaataataataataaaaaaagaaacagtttgagtggctcttttgtgtgaaagtaatgagagatgggactgggaaagagggcggcagcgtatgactcctgaagagccttgtaaaccacttaagaactttgggctttaccctgtaggttttcatatgcattttagtgagctctctccggcggggagaggagaaaagaaagacaggaagaccagttggctgcgactgactgttcaagaattaccaagagcctgaacttcaagggcagtggaaataatgaagacagttttttgtttggttattttttgtttctatgcgggggcgggggcggggggggcagcttaaaataaaattgctctcctcgctctctgctgttttctaattcagatgtgcgtttaaaaattgagcctgggccaggaatagtggtggctcatgcctataatcccagcgctttgggaggctacggtgaggagaatcgcttgaggcctggagttgaagaccagactgggtaacatagagacactccatctcttaaaaaaaaaaaaaaaaaattagccaggcgtggtggtgcatgcctgtagtctcagctactcgggaggctggagtgagagaatcccttaagcccacaagttggaggttacggtgagctatgatagcgccatgcactccagcctggccgacagagggacagattagagacactgtctcagaaaacagaaagaaaaaataaaattgaacctgatcacctttccttaggttttgtcccccaggttaccgtgggccgcgcattatctctgctctgcttaacactacaatctcctatttccgaactgctctcttcaaatgctcttttttgcttgggtttttggccggggaatagtggcgggggagaggcggggggagttggcgggggcagaggtaactttaccagtgattaaatgcaaatgcgacagtccgtgagaccgaagcccctggtagaagccgggaccctcctgcctctggctgccgctctccgaggggcggggctgaggcggggcttggggcggaggccccgcctggaactgagggtggggcgggtccgggtccgggaggagtctcagctggagcccacccggttcctttcctgattgagcaggtcggatcccagggtgggttcagatttgaagggcgaggttcgaggccaagcccccgtcgcagcctaagactgcgggcttttctcctctgcagggatggggtagggcagggccaggggcggagttttgagcccagcccttgggttcttgcctctgattgagcagggcgggttctgaggcggatcgtggggcggggcccgctctgctttttgacagctgtctcttgcacagccgcagccaagtccggtgggttcgggaacctgtggcccggctctctgcgcgtccccatcccccgtggccccgaccccggccatgaagcgtatcttctcctgctccagcacacaggtggcggtaggtgccaaaatgtgtgggaggatggggttgggatcccagctctgtggtgacagaagtctttagtcccgtctcaatgcatcatcgc

SEQ ID NO: 2455 - DNA, 2300 bp, Homo sapien
tgtggaggcacctacagcaggccctgagccggcggcggcggggcggtaaaggcccttgtgtaacttccacgttctctaagaatcagagaagtttcttagagtcccatttgtttccatggaagtaatctatctgacaaataattgtcacctgggttgagagtttacgtatttattgctgctactgtgagaggaccccaaatccccatcccaaaagtatgatcacaaaattctttaatgcagcctggtctctcactgaggacagctctggctagtgttgtttctggcgtttgtgagttgtaattgtacatctatttgtgtgatttgttggtcactctctctttcctctaccagattgtaacccccttaggtgacaggccatttctgttttgctcaccattgaagttccagtgcttattaaagtgctggacatagtgaccaataaataaatgagcgaacaaaatgaatgaagtggcccatttctgggataggaaaccaaagttgctggatagttagggatccactaaacaagattggcttctggcaccaggaagatgtgcagtgagattgatcacagagaggccactcctctcagaaaaagtctgaagataagaatgtgggctggaagtacatggaacctgtcttctctctcattttcctcatatcttttcttataggtcagaggctagtccagcacccagatctcgcatcccaggtaagaccctaagtgcctcccccttttgcttttgacacaccccaggctatcccactgtgactattcctagtggtccttggggtgtcaagacatttaagagaagaaaggcactcctagggctcagttcgttgcctagtggccacactttactattctgtttccaacataggcctctccatctgagccccaggcaggttctcctcctaagagctcatggagagcagagcctgaagaggagcaagaggagaaggaggatgaagacccgtgctcggaggagtggaggtggaagtatgaagaggagcggaggaaagttgttcggctggagcaggagctggtgcaaaagacagaagagtgtaagactcaagctgcagcctatctggaccttgagaaccagattcgagagcaggcgcaggagctaggggtcctcctatcctgggagcccagagcttcaggaaagcaaggctctagtctccggcctggaggggatggcatggagcagggttgtcctaaggacctgctggctgagagtacacaagagctaaagaagcagcagcaggcagcagccacagtaaatccagtattagctccaaagaaggctgaggactcagccccaggaaagatccagtatgaagtccatggaaggtcccaaccagaagaacaggggccaccccagagcccagcgtctgagaccatcaggaaagccacaggacagcaactgactaccaatggggcacagacctttggccctgatcatgctgaccagctgcctgctggtcagaaggagagttcccaggttctaggagttgaaccaggaggcacagtggctgaaccagtgggcccagcagccatgaaccagcttctgcttcaactaagggaggagcttgctgcagtgtggcgagaaaaggatgctgcccggggggctttgtcaagaccggtcatggagggagccctggggactccccgtgctgaggcagcagcagctgcctgggagaagatggaagcccgactggagcgggtgctggcaaggctggaatgggcaaaggcaggactacaggtgaaacctgaggttccttcccaggagtccagagagggagccctaaaggcagccccagggagcatcaaacaggatgaagagaaggagaaaagggttcctggggctcgaggagagcctctaggggcccttggaggggaaaaggccctaggaggcctggcaaagggacagctggagaaggagatgtcagtactgagactgagcaacagtaacttgctggaggagttaggggagttggggcgggagcggcagaggttgcagagggagctacagtccctgagccagcggctgcagcgggagtttgtgcccaagccagaggcgcaggtccagctacagcagttgcgacagagtgtggggctgctgacaaatgaactggccatggagaaggaggccacagagaagctgcggaagctcctggcctcccagagcagcggtctccgagggctgtgggactgcctgcccgcagacctagtgggcgagaggagtgcacaaagcaaagcagcggagtccctggaggagctgcgggcctgcatcagc

SEQ ID NO: 2456 - DNA, 2300 bp, Homo sapien
gagcagctggaatttagaactagttgagtctgagtttagcttgaagcgctcaccaatttgggtagcaaagcagcaaggaaagaacctgagtgttaggagagggtggcatcttccctagggacaaaaaccacaaagtaactgggcctagttccagttcaactggcaccttcaatctttggcctgggtagggtcttatgaggaggattatactgaaggcttaagctaaataaaaggatttttcctatttattaaagcccttttttggtgtgctgattataggtttaacatgtcttgtctctgctgctagactgtgaactcctgcaaggcttttatgtcctcagcacctaatgatccctgataagcactcaaatatttattgaacaaatatgcagccaactataaaatgctgtgagtttctcagtatgtagtgcgggtacatttcccttaagttggtattttctgggtcaggcgcggcggctcacgcctgtaatcccagcactttgggaggccaaggtgaggcgggcgcatcacgaggtcaggagtttgagaccagcctggccaatatggtgaaaccctgtctccactaaaaatacaaaattagccgggcgtggtgacgcaggcctgtaatctcagctattcgggaggctgaggtaggagaattgcttgaacccggggggcggaggttgcagtgagccaagtcgcgccactgcactccagcctgggtgacagagtgagacttggtccccccccaaaaaaataaaaaaataggtatttccatggatacagaaacagatttaatttggtgcctgcatgtgagtgatcagcttggttgggatggggcctctggagggtccaaggctttggaggaaggagagtgggtaggcagttcagagagggacagaaagatcccttttgtgggtaagaaaacccctctgttcatcttcagctacaccaaaggtatgggggctctggtggaggtattctgcacgtgtatctagggtagttactgttaggtacactttggattcagtaccccaggctttgccctagggagggacagttgtcatttcaaggaagactgctttatactgtcagatacctggttcacaccggcttagcagcagtgtgccaccaccccaatcccatacgtaagcgttgaggggtcacagaggtagtgagaatgatgggatccaaggatctcgtctctccagatccactcacaccaggagttaatctctccaacgtcgagctctgagtccctccctctctcgcccgagctccgccccccttccctcttggcggtcctggcgggcttcccctggagggggcggccccagcccgagcgctaggcggggcggagctccggcccgggcggagccgcggccgccgcgtccggctgctggaccgaacttctgccgtgcggacagcaggagcagcgccgagccccattcccccacctctccagctcgccctctgagcctcccgagccctctctccatttcccacaattgtgctggtaagtcccgctccccgcaccaaacttttttttgctgccgagtttgagtcctacgatcggaccacgagctgcactgtagttggtgtatgggggaggaggagagggtgaattactgaatgccgactccacggcttccctaagacggatcagcgctcgcccatttcccgagttggaagacctctcgattttagttgattaaacttatgcagagatggagatgagggtttgcgctccaacttcgctaccccctcccccatttctctgagctctagcagttcccgatactttccctccatctttcaagtatctttggctccctaaaagcttgtcccctcccaactctgccgtggcaaagcccccctccaccaggcacttcgggcccgcctcctccccgttgccctagggaccccgcgatcttgggggccatacactccctccggggctacgcgtcctgccaaccggccgcagacgtgtagctgctgggtcggctgtggagggaggggctcaggctggggcttgtccgaagccaggcgggcggggccgggaaggggaggtatagggggccggactgggcggagcaggcggcatttgcggccggcgccagggtggagagttgtgcgccggtccctgggcctgagctccggctccggctggggcgcctgcgatgtctcaagatggcggagctgggcgaattaaaggtaccggccccctccccccatccccatctggactcagcccggcggtacgccgtgtccgggaagcgaccgagactgggtgccggggc

SEQ ID NO: 2457 - DNA, 2300 bp, Homo sapien
ccctggtcctctagctcccattcccccaacgctgttggcccctggcaccctgctgggccccaagcgtgaggtggacatgcacccccctctgccccagcctgtgcaccctgatgtcaccatgaaaccattgcccttctatgaagtctatggggagctcatccggcccaccacccttggtatggctctttgtggtcccttagtcttctggactccctacctgttccccaaacatttcttaggctttagtcctatgggatcagtgacctgggatgggggcgatttctgtggctgcctgtgcatgggcttggaataactgcccctttgtatcctcagcatccacttctagccagcggtttgaggaagcgcactttacctttgccctcacaccccagcaagtgcagcagattcttacatccaggtacatctcttccagtcttcctgcctcatccctggtctctgctttctgactttcttctcttctgccctgtgctcttccctatccctcctcctatacctacttgtctcttgttcttctgtgtgtctcttctctatctcctggacatctgactttcagcctttctgtgcattcacccttgccctctgggggctacatgctgacatctcttcatctccctccctgttacagagaggttctgccaggagccaaatgtgattataccatacaggtgcagctaaggtgagttcatcctccctgcctatcctgggtacccactgggggtaggagtgaagtaggggtatgacagatacccttacgagatgtccctgctctgccactgcctactgcagccctgcgactcttgttggatgctgagggcttcaggcatctatgactgattttctggggttccctgtctctctgccagattcaagttaagaaatttcttcccactctttcttcctttctcatctcttaccaggttctgtctctgtgagaccagctgcccccaggaagattattttccccccaacctctttgtcaaggtcaatgggaaactgtgccccctgccggtaaatgctctccccttcttctgtcagtaatcccttaccgtttcagttcataaatattaactacaaacctattctgaaagagacatgcctagcacagtgcgtggcacatagtaggtgctcagtttactgactgaatcaatagaatctcgagagtattaagatagggctgaacaaaggttttgtgagaactcggaggaggacattagttcaacccgagatgtaagaaagacttcttttttgttttttttttttgagacagagtcactcgctctgtcactcaggctggagtgcaatggtgcaatctctgctcactgcaacctctgcctccctagttcaagcaattctcttgcctcagcctcccaagtagctgggattacaggtgcccaccaccctgcccggctaatttttgtatttttagtagagacggagttttaccatgttagctaggctggtctcgaactcctgacctcaggtgatccacccacctcggcttcctaaagtgctgggattacaggcatgagccagtacacccggccagaaagacttgaccccagagctgagagttagaaaaggtgaggcatccttattcctcctcctcagggactcagtgagttccttttttctcagtcaataaataagctctcctttctccccaggagtgaaccccacacataaccctagacagtgctccagttttgtgagccactgaatgggcctccatccccttggtcagtgagtgagcgagttggccttccctccagggattgaataacccgagacaagatatcttttgttcaaagagcagagccccttcccagagccacttctccactgaccaatccctcccttctccagggttaccttcccccaaccaagaatggggccgagcccaagaggcccagccgccccatcaacatcacacccctggctcgactctcagccactgttcccaacaccattgtggtcaattggtcatctgagttcggacgggtgagcacagctaaagcaggtgcctggaaaagcctgctgagggtgaaggggaaccatccagtgtcctgggttggggaagcattttcctctttatgagtctgtctctggtcctcatggaacaaaagtgggcagtggtggtatgagaagcagaggctaattgtctaccccctgcctccaagtagaattactccttgtctgtgtacctggtgaggcagttgactgcaggaacccttctacaaaaactcagagcaaagggtatccggaacccagaccactcgcgg

SEQ ID NO: 2458 - DNA, 2300 bp, Homo sapien
taagcacctgttttgtgctaagtactggggtaagccttggggatataaagattaataaattttgagcatacagtctagtaggaggagacaaataagtacataagtaccaggaagtattaggggtgctacagtagaagagtaaacactatgtacagagaggccagaaagggaaaagggtcaggcagggaagggaacacagagagtgacaatgtatagtttgaaagatgaggatgctttatttgcaaactatcttaacaagggattcgtaaccagaatatataaggagctcaaacaatagcaaaaagaacaatccaacttaaaaatggccaaaagatcttaataggtagttttcgaaagaagatacacaaatggccgacagatacatcaaaaaatgttcaacatcactaatcagagaaatggaaatcaaaatcaatgagataacatctcaccccaattcattacttttatcaagaagaaagaatgaatgctagtgaggatgtggaaaaaggagagccctgcctggtacactgttgggaatgtaaattggtacagccactgtggaagactacagaggttcctcaaaaaactaaaaacagaactatgctccagcagttccactactgggtatatatatatctccaaaaggaaagaaatcaatgtatcaaaaagatacctgcactcccatgtttattgcagcagtattcacgatagccaaaacatggaatcaacctaagtgcccatcaatagatgaaaggctaaagaaaatgtattattcagccataagaatgaatgaaatcctgtcattggcagcaacatggatggaattggaggtcattatgttaagtaaaataaaccaagcacagaaacaaatattgcatgttctgtctcacataggagctaaaaaagtggatctcaagaaaataaagaatagattggtagttaccagaggctaggaaggatggggaggatgaagagaggttgattagtgggcacagataatacagtttgaagaagtaagactggtgttggatagatcagggtggcatagttattaatttactgtacatttcaaaacagctagaagataattttgatggtgcctaaatcctgtaatcccaacacactgggaggatcagttgaagccaggagttcaagaacagcctgggcaacagtgagatttcatcgttacaaaaaaatttaaaaattagccaggtgtgggtagtgcacatctgtaatcacagctactcaggaggctgagacgggagaagcgcttgaaccagggaggtggaggttgcagtgagctgagatggcgccactgcactccagcctgggtgacagagcgagactccgtctcaaaaaaaaaaaaaggccgcgcgtggtggtgggcgccctgtaatcccagctactacttcggaagctaaagcacgagaatcgcttcaacctgggagatggaggttgcagtgagctgggatcacaccagtgcactcctgtctgggctgtagagtgagactctcaaaacaaaacatcactctggcagcactgtagagaatgaactggtagggtcaagactatttggagacttgcaataatatttcaggcaaaatacgaggaaggcttaaactagggcaatgaatgaaggctggagagaacatgggtttgaggaagtttaaggagatagcatctgcatacttggttgccatttgagtgaagtgaaaggagaagtggtatcgaaaatgttatttggtgtgtttcgcttggagataattaattcgaagtgatgcctgctgtaacaggtgtgcatagtgctgtagaggatgcttacagttcagcttagggctggttggaagtaacatgtgggtcctgaagtcagtcggtctgggggtcattgtcctaaacagagaagataggaaggaataggagctgagcatttagaggtattcttctttgtggtttaatattatacccatgggtcatcctcaaaagatgtgcccttatttccccggggactttcggaaaccccgctacgaccccgcggaacgttccgtggggaagcttctctaggccaccagagggcgccaggcgggccgcagcgactccagagtcgcgttatggccgaggtgcgggtgcagctgctcctgtcccggcgtccggagtcggtgagcttcgcacggagtgtgtgtggcctcctgggagccggaccagggctcgggacgtggcccattcactgcagcttgaagcgaggacggcttgtcctctcgagcaggcccttcccaggcgcctccgctaggcttccgctccag

SEQ ID NO: 2459 - DNA, 2300 bp, Homo sapien
cagcccaggatacacctgaaagaatttggcatatttagatccattgctgtagtctcccctcatcaaatcttggcagtgggaagaaccttaaatcaacaaggttaatcatctatcagatgcatctgttcccataaagaagttacccacacctatggttacctatatccctggcaataggaaacttcctaagaagttaattttattttcagatgtctatgcctgttctttattttgttgagataggtgatagatagatagatagatagatagatagatagatagatagatagatagatagatgatagataatttgttgttgttgagacaggatctcactctgtcactcaggctggggtgtaatagcgcaatcacagctccctacagccttgacctcctgagctcaagcagtccttccacctcagcctctggagtagctgggactacaggcatgcaccacacatacccagctattttttatttatttatttttttttttgtagagacagggcctccctgtgttgcccaggctgatgaactgtaatttttaacacacacagtgtagggaatgtgaaagactatcacagagtagaagaaaaaattattttcagggttagcaggtggattgtcccaagcagtcacactagaatctgtggactgaagccacatttgccagctccaggcttctaacacatctgaaactgtgtatgtagaacagctagctcaatgcctggcatatggtaagcacacagtaaattagcgccttcctcttctccatggttccttaaaactggcaacgctaaattctctctctcagtatcacggatataatttgtcccagcagctttaattcatttaaagcagttagatgttgttttataatatcttcagttttctctcaccaatgtgttttctaattgtttaaacacttgagtgtcaaacaattgccagccaccatactaaacacaacatacaaggatagataaataagacaccatctctgccctcaagccagtcaccatcatttactaagcacctgttttgtgctaagtactggggtaagccttggggatataaagattaataaattttgagcatacagtctagtaggaggagacaaataagtacataagtaccaggaagtattaggggtgctacagtagaagagtaaacactatgtacagagaggccagaaagggaaaagggtcaggcagggaagggaacacagagagtgacaatgtatagtttgaaagatgaggatgctttatttgcaaactatcttaacaagggattcgtaaccagaatatataaggagctcaaacaatagcaaaaagaacaatccaacttaaaaatggccaaaagatcttaataggtagttttcgaaagaagatacacaaatggccgacagatacatcaaaaaatgttcaacatcactaatcagagaaatggaaatcaaaatcaatgagataacatctcaccccaattcattacttttatcaagaagaaagaatgaatgctagtgaggatgtggaaaaaggagagccctgcctggtacactgttgggaatgtaaattggtacagccactgtggaagactacagaggttcctcaaaaaactaaaaacagaactatgctccagcagttccactactgggtatatatatatctccaaaaggaaagaaatcaatgtatcaaaaagatacctgcactcccatgtttattgcagcagtattcacgatagccaaaacatggaatcaacctaagtgcccatcaatagatgaaaggctaaagaaaatgtattattcagccataagaatgaatgaaatcctgtcattggcagcaacatggatggaattggaggtcattatgttaagtaaaataaaccaagcacagaaacaaatattgcatgttctgtctcacataggagctaaaaaagtggatctcaagaaaataaagaatagattggtagttaccagaggctaggaaggatggggaggatgaagagaggttgattagtgggcacagataatacagtttgaagaagtaagactggtgttggatagatcagggtggcatagttattaatttactgtacatttcaaaacagctagaagataattttgatggtgcctaaatcctgtaatcccaacacactgggaggatcagttgaagccaggagttcaagaacagcctgggcaacagtgagatttcatcgttacaaaaaaatttaaaaattagccaggtgtgggtagtgcacatctgtaatcacagctactcaggaggctgagacgggagaagcgcttg

SEQ ID NO: 2460 - DNA, 2300 bp, Homo sapien
taatttttcagattaaatttgtgagaaacgtacaaaagcaccaaacttttaagtgcaaatgagaggcaataagaatttcaggagtgaagttatatttccaaataagtttgtagaaaatgtccttagaaggtgacattatctactttgatcaggaaaatggtaaagggtggtgggtagtgcctcagacacacgtggtaagagaatctcccaggttagggaagatgtctcagagttgtgtttgtttgacaggcgtctactagaaaaatctcagagggtagaagccatcattgcatctatgcaggctactggtgcagaggaagcacagttacaagaaatagaggagatgatcacagctcctgaacgtcagcagctagagaccctgaaacgtaatgtcaacaagtaagcatcataaacttcagacctgcatttcagaataccatccagaaaatccattttgacctcctgtaaccctccagcttagcatgagcaaacctaaactcactgtctcctccagctcacttaacagaatttaatccacctatttttgtaaactagcaattctgaagatgttctgagcttcttctccatcaccatatacactctcttgttcatcaagtactgataaattttttttaagagacggggttttggctgtgttgcccagactggccttgaactcgtaggttcaaacagtcttcctgcctcagcctcccaagtagctgggactacaggcaagtgccactgcgctggcttaattttacttgagtcatgtgtctcaaatctggcctttcatcttggtccacacgcaggccttcatcacctctttcctagaccttcacatttcagtgcacaatttgtgcacctctttcattaaatttatttcttaagtatttttttggatactagtttagtggtcgcttatttcagttttagattgttcattgctagtgttatacaaaaacaaccaacttttgtgttgtgattttgtatcccacaactttactaaattcatttattaattctagtagtttttttgcagattctttgagattttttataataggattatgtcatccatgaatagagagagttttacttctgtcttttcaatctagatgcctttactttttttttttcctgccccattaccctggctagaacctccagtaaaaggttgaatagaagtacaaaagcagacatctttgttttgtttctgatcttaggagaaaagcttttagtctttcaccattaagtatgatgttagctgtgggtttttcctagatggcttttgtcaggctgaagaagcttccatttcttcctaatcaccactcactttaagcttcagacactcttagtttcttgctattttaaaacacactaggtccttttatacctgtgcctttacgttcgttttcctgattgcaaatgaagactaccttcccccaggacagaggctctgtattttgtattcttagcagtttgcatggtgtctggcacataaagatgctcggtaaatagcaaaatgatctactggttctcctgctttctttccatccactctcaagggtaaccaagcagttatccatggccacacccaccctaacctctaatcttaaatatgctaatgaacattcagtctaggcaaatgcctttacttttcactcaggttggatgccagtgagatccaggtggacgaaaccatcttcctgctggagtcttacattgagtgcaccatgaagagacagtgatccagaagaagcatcttcctcagaagatctggggggatggaaagcaaaataaaggaggtgcctggatgcattatttgcagtgggataagtcgcagagtcttcaactaaacccccctctctatcccctgcagcccaggatacacctgaaagaatttggcatatttagatccattgctgtagtctcccctcatcaaatcttggcagtgggaagaaccttaaatcaacaaggttaatcatctatcagatgcatctgttcccataaagaagttacccacacctatggttacctatatccctggcaataggaaacttcctaagaagttaattttattttcagatgtctatgcctgttctttattttgttgagataggtgatagatagatagatagatagatagatagatagatagatagatagatagatagatgatagataatttgttgttgttgagacaggatctcactctgtcactcaggctggggtgtaatagcgcaatcacagctccctacagccttgacctcctgagctcaagcagtccttccacctcagcc

SEQ ID NO: 2461 - DNA, 2300 bp, Homo sapien
cttattgtgaataaatgaggtacggcatgggaagagcaaagatttgcctaaaagctgtgatgaactaggaacactttgagaaacaaaatgttgatgtctaagtctcatccttttctccccgaaataacattgttctgctccaagggcaggctttcttcatttttccttttctggggtgagaagaacaatattcaaaggtgggtgaaataaattagtgaaagaaatgagagaaaatgaatgtcatttagacatacctgatccagtgatgttcctgtgtcatgggcaattactcttagtggctggctgccggttcttatcagatggactccaattttttctacaatctctccaaaatgctcttgcagcaacaaagaacagagcttaatttctgcttgagtcattgtactggggagtctgagagctagggaaaaaacaccaaaatggtacaatagaaagtctttcacgctggaagcagagctgctgagtgtaaattcatgtattctttctggagggcaatttgacaatacatatcaaaaagccttaaaaatcttgcatatctttgaaacaacaatttctttttggatattgtgtccaaagaaagaaaaagctaataataatgaagtcattagttctctttataataccgacttagtggaaacaatctaacgtctaacaataaatgatgccatacccatacaatggcatactacaccaacatttaaagttatttagtacgatgcgtattcatgtagaaaattattcataataggctggcgcggtggctcaggcctgtaatcctagcactttgggagaccgaggtgggcgtatcatgaggtcaggagtttgagaccagcctggccaatatagtgaaaccccttctctactaaaaacacacaaaaaaattagctgggcgtggtggcgggtgcctgtaatcccagctactagggaggctgagacaggagaatcgcttgaagccgggaggcagaggttgcagtgagccgagatcgcgccactgcactccaacccgggcgacagtgcgagattctgtctccaaaacaaaaaaaaccaaaaaaaattactcataatatattaagtgacagaagcaagctgaaaaaatataaaaattcaattattgtaaaaaaaaaggaaaaatgtatgcataggaaaagactatgcatcaaatttatctctatgggattatgcgtgattctgattttccttaaagattgggagatgattttgcggtctgtcacagaccttagtttctacacttccctgcttggaagaattaaggtcactgttcacagctcggtgggagtgaacaggcagtgttattctcagtccataaaggaaatgataatttcgaaaaagaaatttaggaggtaaaggactgcttctcaacagggtgtgtcaaacaggagatgaggttacgttgtttgcaggacagtattcaattcttaaacttctactccttgacaaagttgacacaatcagaaacggacgtagttaattttatgattacttccttattacaaattgctaccaaacattgtttacttatttcttccaattcctaagaagccaagtctttgcctccccgtccccaccccgcctcagtatcaccagagacctatttcgtccatccacatatctttggagaagcattcccagatcctttgccatcctcggaaagggcttccaaggcgcttggctcctagctctacacttcctttacacaggttcccgtttcggacgtggtctcttggtccagtcagtgccgccacgttcagacagcattttccactaacctcagggtcagcgcaatccgggggctccaactccaattcggctgagcttcccgcgacggcttcctacggctcccgctggccttctaggccgaggtggagcccaccgccctttctaggacgcggatcgccaccgaagaagacgcggaaaagcaaaaagcgcgtgccactctaccccagagtttcggcggcttccggggacgctctttctttcttctcgctggaagactggaggaccagcgaggggctgtttgtggagccggcgggcgggccgtttgtctctccttcctgcgcctctttggtgctgggaggcgggccgcagggtagctgttggcgccgccgcgtttctgggcctggccaactcacgtgaccgacgcgggctctgaagcggtgggccgcaccgaggcggcggcggcggcgacgactgcagctcgggaggtagcggcctggcgagggacgggccggctgccctctcggacggccgcggcggagggc

SEQ ID NO: 2462 - DNA, 2300 bp, Homo sapien
gggtgcggcaagtagagaggaaagaatgtatcataatgccttaaacaaaacttttgagtgagagaagactataaaacaccctttaagcacttattcactggactccatttgtgtttctaagaaataagatatacagactcacttcagaaggttttctcctacactgtatctgagacaccataaatagaaacataatgttgccactctatcacaagactgaacctggacacttgtaaggaaaggaacaaccataaagacagttggccaaggacaggattgacattcactctgggggagctcctcgtagtagctacaacccaacccaaaacagcttctgggtttgtgatgctggtgctggctagtatgctgcataaatgttgtttgtttttgtagagaggggtctcactctgttgcccaggctggtctcaaactcctggcctcaagcaatcctcctgcctcgtcctcccaaagcactgggattacagacctaagccaccgcgcctgacctacaaaagtgttttcttcccaaccacagcactgcctctcaaggggctaacactctggcagaaactcgtgaaaaccaatttcacgtcagaggaagcatccccaacattctgtcccggctctttttcttaggtgaagaaagggacagggcggggggcggaacaatgatattaaagacactggcagcatgacaaccaaaataaacgaagttgaaacagtacgtcctgccttcttcctaaagccatttccttcaacagtgataggagtgcagaccgtctgcaagtcattagtacgctgctgtcttcactgtcacaaggaccctggaaaccactgaagagcaaaatcccccttttcgccccacagataccttccaaccccctttctgtgcttccttccctagaaaaaaccgaagagtgacaatcctcagcaatccgctatttcgcttcactgacaagggaggtggcgggggcggtggggggtgaaaagtggaaaagaacacagaggaaggtgagaagacacagtggaagaagtgtggggggaggtcatcgtaggaaaaagaccaggtataaaagaatgcaagaaaattgaggggagagttatcagagggaaacttgctaagaaaaaaaaaaattaaggacacgggaggtaaagaggtgaggtcaggtggagcagcccaggatgaattaagaggtgggcaggaggtacggggccgaggccgtgatgcccagggtttagggccggcggcttagaagtgggcagcaggtattcggcagaccgatgtcgggcgagtcaatgatgtgcagaaagctccagacccagttccgggaaatcggggccaggaatctatgaggttcccaagtatagagaacacagcgctcttaccggtagtttggggctgacctcgcccttgcaaaagtggcagaaaaaccggtgggcggctacagcggcgcccgagtccgccccggccgccgaagcctccgccatttttgccctccgccgcggccgtccgagagggcagccggcccgtccctcgccaggccgctacctcccgagctgcagtcgtcgccgccgccgccgcctcggtgcggcccaccgcttcagagcccgcgtcggtcacgtgagttggccaggcccagaaacgcggcggcgccaacagctaccctgcggcccgcctcccagcaccaaagaggcgcaggaaggagagacaaacggcccgcccgccggctccacaaacagcccctcgctggtcctccagtcttccagcgagaagaaagaaagagcgtccccggaagccgccgaaactctggggtagagtggcacgcgctttttgcttttccgcgtcttcttcggtggcgatccgcgtcctagaaagggcggtgggctccacctcggcctagaaggccagcgggagccgtaggaagccgtcgcgggaagctcagccgaattggagttggagcccccggattgcgctgaccctgaggttagtggaaaatgctgtctgaacgtggcggcactgactggaccaagagaccacgtccgaaacgggaacctgtgtaaaggaagtgtagagctaggagccaagcgccttggaagccctttccgaggatggcaaaggatctgggaatgcttctccaaagatatgtggatggacgaaataggtctctggtgatactgaggcggggtggggacggggaggcaaagacttggcttcttaggaattggaagaaataagtaaacaatgtttggtagcaatttgtaataaggaagtaatcataaaattaactacgtccgtttct

SEQ ID NO: 2463 - DNA, 2300 bp, Homo sapien
aaatatggccaaaaaaaaaaacataaacacacagcaaaatcagcaaacaaagctaagtagcatttaggcggggagcagtggctcacgcctgtaatcccagcactctgggagcccgagtcgggtggatcacttgaggtcaagagttcgagaccagcctggccaacatggtgaaactgcatctctactaaaaacacaaaaattagccagggtgcggtggtcgtgcacctatagtcccagctacccggaggccgaggcaggagactctcttgaacccggcaggtggaggttgcagtcagccgaaatcatgctcctgggtgatagacagaggctgtctcaaaaaaaaaaaagaaaaaagaaaaacagctaagtagcatttagatgaaactatgactctgaagtagggggtgcggcaagtagagaggaaagaatgtatcataatgccttaaacaaaacttttgagtgagagaagactataaaacaccctttaagcacttattcactggactccatttgtgtttctaagaaataagatatacagactcacttcagaaggttttctcctacactgtatctgagacaccataaatagaaacataatgttgccactctatcacaagactgaacctggacacttgtaaggaaaggaacaaccataaagacagttggccaaggacaggattgacattcactctgggggagctcctcgtagtagctacaacccaacccaaaacagcttctgggtttgtgatgctggtgctggctagtatgctgcataaatgttgtttgtttttgtagagaggggtctcactctgttgcccaggctggtctcaaactcctggcctcaagcaatcctcctgcctcgtcctcccaaagcactgggattacagacctaagccaccgcgcctgacctacaaaagtgttttcttcccaaccacagcactgcctctcaaggggctaacactctggcagaaactcgtgaaaaccaatttcacgtcagaggaagcatccccaacattctgtcccggctctttttcttaggtgaagaaagggacagggcggggggcggaacaatgatattaaagacactggcagcatgacaaccaaaataaacgaagttgaaacagtacgtcctgccttcttcctaaagccatttccttcaacagtgataggagtgcagaccgtctgcaagtcattagtacgctgctgtcttcactgtcacaaggaccctggaaaccactgaagagcaaaatcccccttttcgccccacagataccttccaaccccctttctgtgcttccttccctagaaaaaaccgaagagtgacaatcctcagcaatccgctatttcgcttcactgacaagggaggtggcgggggcggtggggggtgaaaagtggaaaagaacacagaggaaggtgagaagacacagtggaagaagtgtggggggaggtcatcgtaggaaaaagaccaggtataaaagaatgcaagaaaattgaggggagagttatcagagggaaacttgctaagaaaaaaaaaaattaaggacacgggaggtaaagaggtgaggtcaggtggagcagcccaggatgaattaagaggtgggcaggaggtacggggccgaggccgtgatgcccagggtttagggccggcggcttagaagtgggcagcaggtattcggcagaccgatgtcgggcgagtcaatgatgtgcagaaagctccagacccagttccgggaaatcggggccaggaatctatgaggttcccaagtatagagaacacagcgctcttaccggtagtttggggctgacctcgcccttgcaaaagtggcagaaaaaccggtgggcggctacagcggcgcccgagtccgccccggccgccgaagcctccgccatttttgccctccgccgcggccgtccgagagggcagccggcccgtccctcgccaggccgctacctcccgagctgcagtcgtcgccgccgccgccgcctcggtgcggcccaccgcttcagagcccgcgtcggtcacgtgagttggccaggcccagaaacgcggcggcgccaacagctaccctgcggcccgcctcccagcaccaaagaggcgcaggaaggagagacaaacggcccgcccgccggctccacaaacagcccctcgctggtcctccagtcttccagcgagaagaaagaaagagcgtccccggaagccgccgaaactctggggtagagtggcacgcgctttttgcttttccgcgtcttcttcggtggcgatccgcgtcctagaaagggcggtgggctccacctcggcc

SEQ ID NO: 2464 - DNA, 2300 bp, Homo sapien
ttattctgtcttgttgcccaggctgttcttgaatttgtgggctcaatgtgtcctcccactatatcctcctgagtagtagtagataggtgtgttccaccatgcctggctaatttttttttcttttttgtagagatgggattttgccatgttgccccggctggtctcaaatttctgggcttaagcaatctgcctgcctcagcctcccaaagtgctggggttacaggcatgagctattgcggctggcctgatatgtggtatttgtttttaattctgtttatgtgatgaatcacatttattgatttgcctatgttgaactaaccttgcatcccaggagtaaagactacttgattgtggtagattagcttttaatttttatttatttatttttttgagatggagtcttgctctttagcccaggctggagtgcagtggaacgagctcagctcactgcaacctctgcctcctgggttcaagcgattctcgtgcctcagcctcccagatacctgggattacaggtttgcaccactagacctggctaatttttgtatttttggtagagatggggtttccccgtgttggccgggttggctttgaaatcctgacctcaagtgatctgcctgccttggccccccaaagtgctgagattacaggtgtgagccaccacactggcctgcattagctttttaatgtgctgctggttcagtttgttagtattttatttagaatttttgtgtctgtgttcattagggatattggcccggagttttcttttttcattgtgtctttgccaggttttggtatcagaatgctgctggcctcatggaatgggttagggaagagtccctcctcgattttttggaataatttcagtaggattggtacaagctcttcttcgtgtctggtggggtttggctgtgagtccgtctggtccagggccttttctgattggtaagttttttatttttcattattttttgagacagggtctcactgtgtcgcccatactggagttcagtggcatgatcacggctcactgctgcagcctcgacttcccagactcaggtgatcctcccaccttagcctcctgagtagctggacctacgggtatgtgctaccacacctggctgttttttttttttttttgagagataaggtttcgtcatgttgcccagcctggtcttgaactcctaggctcaagcgatccgcctgcctttgcctcccaaagtgctgggattgtaggcatgagccatggccctggccaggttttttattactgattcaattttggaactcgtcattggtctgttcagaatttcagtttcttcctggttcagtcttgtgaggttgtatgtttccaggaatttatctggaattttaggttttctagtttgtgtgcataaaggtgtttgtaatagtctctgagggttctttgtatttctgtgggattggtggtaatgtcagttttgtcatttctgatggtgtttatttagatcgtctctctttttttctttattaatctagctagtggtctatcaattttattttttgaaagaaccaacttttggtttcgtttatcatttatttgtatggattttcgcatctcaatttcattcagttcagcactgattttggttatttcttctgctggctttggggttggtttgttcttgtttttctagtttctctaggtgtgatgttaggttgttaatttgagatctttctagctttttgatggaagtgtttagtgctataaactttcctcttaatactgctttaactgtatcctagtgattctggtatgctgtatctttgttttcattagtttcaaagaactttctgatttctcccttaatttcattttttactgaaaagtcattcaggaacaagttgtctcatttccatgtaattgtatagttttgagagacctttttagtattgatttctattttaattgcactataatccgagagtgtggttggtatgattttggtttttttgcctacgcacttctcaaaagaagacatatatgcagcccaataagcatatgaaaaaatgctcaggattactaatcgtcagagaaatgcaaaccaaaaccacagcgagataccatctcacaccagtcagaatagctattattagaaagttaaagaataacagttgttggcaaggttgtggagaaaagggaatgcctatacactgccggtgagaatgtaaattagttcagccactgtggaaggcagtttgatttcccaaagaacttaaaacggaactaccattctgcccagcaatccattactggg

SEQ ID NO: 2465 - DNA, 2300 bp, Homo sapien
tgatggtgagacactcctcttcccaacatgggttcccaacccccaggctcccagaatggactcattctgcagtgaaagctaacactttgatggagtgaagaagtatttcttttcttttttcttttttttttttttttagagacacagtctcactctggcatccaggctggagtgcagtggcgcaatcacggttcactgcaagctccgcctcccggggggtcacaccattctcctgcctcagcctccccagtagctgggactacaggcacccaccaccaggcccgactaatttttgtatttttagtagagacaggtttcactgtgttagccaggatggtctcaatctcctgacctcgtgatccacctgcctcggcctcccaaagtgctgggattacaggtgtgagccactgcgcctggcttggagtgaagaaatatttctaatatctgtctcatttgacgatggcttcagtggagccatctgggagttctcaaaccccagagcaccctactgtttttaggaccacagagtactacaataacaggaataagaaggaaaagagagtctctagactagttatgaaaaattttcccccaccctccctccacccttgaattcctgggtagcctggcactgggtggcaatcatgacaggtgttcctccagaaccgtggggcttcctggtgtgctgtgccctttggcacagggcctggcccagccttgcaggacttagagcccaatgcttctaattctcagactaatgttcctgccatctaagggcacaaccctagaatttaggaacaattgtaatctcccaagccatcactgaccaaggaagaacagaacagaatagaaatggatgggaagctgggagtggtggttcaggcctgtaatcccagcactttgggaggccaaggccagaggattgtttgagcccaggagttccagagcaggcggggcagcatagggagacctcatccatacaaatcattttttaaattatcaaccgagcgtggtggctcacgcctgtaatcccagcactttgggaggccaaggcaggcagatcacttgaggtcaggagtttgagaccagcctggccaacatgatgaaactgtctctactaaaaatacaagaattagtccagcatggtggcaggctctcgtaatcccagctactcagaaggttgaggcaggagcatcacttgagcccaggaggcagaggttacagtgagctgagatcacgccactgtactccagcctgtgtgacacagcgaaactccatctctaaataaataaataaataaataaataataaataaaaagttatccaggtgtggtggcgtacacctgtggtcctagctgcttgaggggctgaggtgggaagatcactcgaccccaggaggtcaaggttgcagtgagccatgattgccccactgcactccagccttggtgacagagcaagaccctgtctcaaaaaaaaaaaaaaaaaaaaggaaagaaagaaaaaagaaaaagaaaaaaaatgggtgggtgggaagataaggtcagtcattcatcctccccccaccacatcaggaccattttggtgcccccactcgttgcctcccctgctcaccaccaccctcacccaagccttcttgacagctccctgaccttcttccctttcagcctggagcagctgtgttctctgtcctacttctaaccaaaacctactctcaggagaagacttggtacctttctttatacttgagaggacattctgtccttttatcttctagttattctatcatcagtcctttccttattatgaattagcaaatacaaaatctttgttccccagggtaaagaaaagaattttaagaagtggtttttcttagccccctcagcaccctagtctatttctaacaccaaaaagacaaaacaagggagaggaaaggagaaggagatggaggaccagttgcaggagagaaaggagaaaaaaatccacagtgggggtggcggaagatctatgacttctaacaacccattctgtggttttcaaagagcgaatataataacagctatgaaagtgtgagcaatgacgaaactggagagatagggttttaacaagatgcaaggacaatctgaggactgagagccatttcaacgtgagcccccagtctgagaacaagaaagaagaacttctgtctcgaggtaaaaaggcctgctggggacctggggtccaggtgaagggatgggatggttgacagaactgctcaggtgaggacaggcttctcatgaggtccctgagaaacttgccttttg

SEQ ID NO: 2466 - DNA, 2300 bp, Homo sapien
ttggacatcatgtaaatggaatcctagtatgaaaatgaatgaactacagctactcacagcaacgtgagtgaacctcacaaacatcatattgaatgaaataaaccagagacaaaaggaatacaccaggcctgtaatcccagtactttgggaggccaaggcgggaggatcacttgaggtcaggagttcgagaccagcctggccaacatggtgaaaccctgtctctactgaaaatacaaaaaattagccaggcatggtggcgggcacttgtaatcccagccactcgggaggctgaggcaggagaatcacttgaactcaggaagcggatgttgcagtgagctgagattgcaccactgcatttcagcctgggctgtaacagagtgagactccatctcaaacaacaacaacaacaacagcaatttttaaaaatttctaaaaaccatacaataacaactatttatacatgatgaaggtgagacccagagagttaaaaatgaattactctggatcaaacacctgggaaatgggaaatggtggcgtcagaattgaactcaggtgttctttctttcttttttgttttgttgttttttttttggagacagggtctcgctctgtcattgaggctggagtgcagtggcatgatcacggctcactgcaacctctgcctctcaatcaagtgatcctcccacctcagcctccagagtagctgggactacaggcatgcaccaccatgcctggctttttgtaccttttgtagagacaaggttttgccatgtggcccaggctggtttcgaactcttgagctcaggcaatctgcccgctttggcctcacaaattgctgggattgcgatgaactcaggtgttctgatcctaaatccagattttcccattctaccttctgctttgaaagatatagaggaggccaggagggcttagccccgaggtggaggaagataagctggtatgaggaagctgctcaatgtcattttaaaccgtttatccatgggctcaggtcatgtctttgttgggggccaagccaaggcccagcaaagacaaatggctcttccagtgtgggtggaagaggggtgaggtcacccagtcctcagcctgtggtttgctttgcctcagtgccgggagcaatctcttgccctgatttgcattgtgggctgaggattcaggtcagtgagaaggccagtgatagaattgtctgtgtgggtgctgctgatagggatcagctgctgatcatggctagggctagcggctgagcacacgggcaccagcctactgctcgggcagcaaggcagcaggatggaggggtttgtaaaaatgccttccacctaccctgctgggcttgcccgagaggctctgagtgtgtgaaggggaagacaattatcgctaggctggagaatagaaagagcaccatcaggtgagaaagagaagaaaaaaagagaggggagagagtggataagaagaaggaagcctgggacacaagaacaagggctttgcttgctctagggctttgcttgctaaactcctagggagcacacaagtgagaatccagggcagagggaagcaggatgggtgccctgagtgcttggccccatttcctggggcttactggcctcgtgggtgggagttttataggctactgctccttggggaggcctcagtgattgaggatactcctgtatgagcctcggccctgaccccaggatgggggactggaggatcctaacaggattgggggttggttgggtgtaaccaaggtatctgccaaagggagagtaccaaggaaagcggaggcacctcctccctggctgtccttcaccccctctcccctccttgttctctgggagtggctggcgagcagcggcctccccgcagggccaggcaggtgggccagagcttttggtttgctgaggtttgtcagattttccagctcagggcccagccagctggcaggaagcaggacagaggtcacttgaattcagaccacatgtccctgttaaatacattagcttttaaatcaatctttgttcaaagtccagtgagttgcaagcctaatgctcacctgcagagacagaattcctgagtgaacgaacagagcagctcctcttccatctccaggtaagaactgctcgtgtcctccttgagggtgctggccaccggggcctgaactaccttctttcttttccttttccctttttctttttccaagccagtagctggctgtctagggcagagaagagtcccatggggaggcagccaggcccctttggcggtggttgggggtgagagatgat

SEQ ID NO: 2467 - DNA, 2300 bp, Homo sapien
acctgcacaatatcataaaatcattgtctttgagctgaagtggtcctaaaaagtcagcctttccattttacagatgagaaaatagacccagagaggttaagtcacacggtggtttgtggcaaagctagaaacataactgtggtctcctcttcatagttctttccactacactattacatttctcaactctgaaaaaccaccataaagcataatggctacctaaaataaatggcccatttctaaagtaattagtattcctaaacaaattttaagtagctctgcttctccagtgacattttggtttaaagaatcaaggggaggctgggtgcagtggctcatccctgtaatcccagcactttgcaaggccgaggtgggcagatcacttgaacccaggagttcaagacaagcctcggcaacatgacaaaacctcatctctacaaaaaatacaaaaattagccaggcccagtggcatgtgcctgtaatcccaactactcaggaggctgaggtgggaggattgtttgaacttgggaggctgaggtaggagtgagcccagatcacgccactgcactcctgcctaggcaacagagctagaccctgtctcaaaataaaaaagaaaggataaaggagatttgattaatagattaataaactgttctttcctgattggttatgatgttgaactacttcccaaattatgtaaccaaatttctgtgtggctctggtgctattaggtcaaaactttggggaactaagcatgagatagcatactcctgtttccttctctgtcccagggaaatacaaattcccttttgcctcaattagagaaggatgtctattcttgctacaaattatgatttatgtcctggtgtcaaatgaagataagaataagatcaaagaaaggcaagatgattgtggaagagaaagaaaaaggattaatttagatttatttaaccaagaaacatttatttcgtatctcctatttccaggctgagtgctaagaaataaaatgatgagtagagtatagcctttctcctcaaggagcttaccctctaatcatgggagagacagacatgtaactagttaaaccatattgtttggtggcttgaaccatgccagtagtagccactattaaggaaggaactgaagggcacttactgatttgggtaatagtgggaaaaatcagagaggagggaggatttagattgaagtatgtgcttctattttagaaggggctgtatttactatgtttattacttaaaagttcataaaagccaataatacgggtttgagctgtgttagtaatgagttaacaaacatatcaggattatttaacctccctgagcccctgttctctaaatgggagaataataactctacctgattgagttcttggaaaataacatagtgtaatggaaagagcaggctttggaggaaaagaggatttgactttgcatctctatcaattaattgtgtgactttgagcaagttatttaactctctgagcttcactttccttatgtgcaaaatggataacaccatggcataagacaatcccatgaagataagatataaaagaagataatgtttgaaaagaaagaaggtaatgtctgtaaatcctagcctatattagaacacagtaaagtattagttcccttttctaacattatattcagataatgtaggagaaagctatgctttattatagttattattctgtaactatttacaatcttgaacattacatttgacttaatctaactagttaaatcaaaaaacaaatgaaaccatctgtttgagctgcttaagagaaactgagtggtaattgtttggtggcgatgctcttgatggagaagcttttacacacctgcgtcagaggttgggaaagctgctctgaagtagcgctgctggctatgaaacaggaaattgagaatataggcaactccgggaatccactgtaggaaaaaccaaaagtatatgctttctcattgccatttcttgaattcctatgtgattaaaaccttgatgcccattctgtgccagatcttactcttattcaacaggaagtggatgctttggaagaattaagcaggcagctttttctggaaacagctgatctatatgctaccaaggtacagagcaaggaaactgaagtgtggtttttaccaatattattaaagagagaacaagactaaatggctttttagatttctctgtggccaagcaagagatacctcacagcttctatatcagccatgaagcattagggataagggatcttcactcttcatgaaattgctcct

SEQ ID NO: 2468 - DNA, 2300 bp, Homo sapien
ttgatacaattgaaagtaaaagtgaattgtttaaaacaaggccatgcttgtctatgtgcctctaactttcacttctagtgattacacttctttgcctattatgagaccacagcacagtgtcaatcacctttacatattcaatcgattccactccacagccagtcattagtgtttgttgtagacactgaaaataaggacaatagaaatgagctctgtgcttcctctctcacaactgcctcttttaatcctgcatgttaagctgaaatgaactattaaatgagtggaatagaacccttgccttctttgtatatgtgttctagctttttcaactatgaaaatataaaaacctagaattactaagccttaatcttacaagtcagaatctccctaggtctgagcctcttcttggttgtttattacatcttcccaaaatggtgagtgatagtagatgtgtagttagaagaaaggcagaaagagctaaaagagctgtgtttcattcactcagtatccaggcaaaggtcattttcaaaaggaaacagttaagtcaacatggctgacattctttcttgttaatatcattttagctaatggctcaaaaaatttcacccatagaaatatcatttgatctttggtaccattggtactatttgtattagtcccaggcataaataccaatgctgctgcttgctcttcaccatttttatcttttgcctcccaaaaatatccaccttgagttacatttttctttggtcctgctactctatttttattagactcatcctagttcattttatgcctgtaggccttggcccattaaaccctttaaatcaattatgtacaaatgatattttattttgatcctcactaggaccctgttgatacctttgtggtgagctgggacatgccagcagctaccactgtactagtcggtcctccacagactgagaggaccaggagtggtaggtttcctgttgatttattcacctgtaggacagattgcagaaggtgagggtattggacttagagactgatattttagaaggggacaggtttatgcaattttgctatttttttttccttttgtctgcctttgaaaaagaaggaagaaaacatgtattgcgttccaaactctgtatttggtcctttagttaggtatgttagctggttttttttgtttgtttgtttttgttttgtttttgagatggagtctcactctgtcacctgggctggcgtgcagtggtgtgatctcagctcactgcaacctctgcctcctaggttcaagcgattctcctgcctcagcctcccaagtagctgggattacagacatgggtcaccacgcccagctaatttttgtatttttagtagagatggggtttcaccatgttgcccatgctggtcttgaactcccaacctcaggtgatccacctgcctcggcctcccaaagtgctgggattacaggagtgagccaccacacccagccaggtatgttagctgttttattttgtctttaaatggtaactgtagtaattaaactatgtatagcgcctcatatgaacatgaattcatatgtattatttcatttatcttcacaaccatccagagatgaggagatgaaaactctaagacctcccagcttccaaatagcagagccagtcctcaaatttattgcctagcccaaattctgtgcttcttcacccaggccacattgcttccacatagtttcccttcagttgtaagtagtagaaaagtaggactccagaatcagtatccttacataaacagctcagtacatgagaggcagttgtgagactggaaaatggatgggactagactgtgagggtccatgcttgcttgctgaggctttatattttctttcatttcaggatggcaatggcacggagaacaatgttccagaagggggaagtgcataacaaaccatcaggtttctggggaatgataaaaagtgttaccacttcagcatcaggaagtgaaagtatcctttgtccctctgcttgattctttttctcaactctggaccaagagcaaaagaaaaaaagtagtgttgggatagtcccttctaaggtacctgactacatcagagtccaaactcctaagagctaggcttaggaaataccatgtgtacagtcatctttccagcacctgcacaatatcataaaatcattgtctttgagctgaagtggtcctaaaaagtcagcctttccattttacagatgagaaaatagacccagagaggttaagtcacacggtggtttgtggcaaagctagaaacataactgtgg

SEQ ID NO: 2469 - DNA, 1796 bp, Homo sapien
gaattctgttttataatagccatcaggcttggcccaatattttacctgttaccattgttgttcatatttccttatagttcatttcatcatcctgtattttatttatctttgtaagccatttaaccacttaggccttttttgaaacaaggcttaagtaagtttaaaatcagtaaatacaaaggacaccatcaagaaagtgaaccaacattccaaaaacaagagaaaatttttataaattacctatctgataatggactgggactcgtatctagaatatataaagaattcttatagtttaatcatataatacaattaaaaaatgaataaaggatctgaataggcatttctccagagatgatatacaaatggccagtaagcacatatgaatagatgcccaataccattagccatcaaggaaatgcaaatcaaaaccacaatgagataccacttcacaccaactaaaatggctataaccaaaaaaaaaaacagaaaataacaagtgttggcgaggctgaggagaaactggaactctcatacactcctgaggaaaatgtaaaatgatgcagccacattgggaaacagtgggagtgcctaaaagattaaatatagatttatcatatgacccaacaattccactccatttctacctaaagagaaatgaaaacatacgtccacaccagaatgtatacacacacattcctagcgtctctatttataatagctaaaaacaacccaaatgtcctcaattaatgaatgcagaaacaaaatataatatatccatataatgggatgaatattgttcaaccataaaaggaattattgatagatactacaacatggatgaaccttgcaaacattatggtaagtaaaagaagccagtcacaaaagattacatattggtggtttcctagaaacagaaagtatattggtggtttcctagagctgaggagattggggagaaacagggagtgactgctaatgggtacagggtttctttatggcgtaatgaaaatgttctaaaattgatttaggtgatggttgcacaactcttgagtatacaaaaaccattgaattgtacactttaaatgggtaaattatatctcattaaaactgttataaaaagtgctaacaaaaagttttaataaatgaagtacatcttataaactaataaaagtaattcatgcaaatcaggtgtttatatcaagagtacaaaagaaatatttttgagtataacatatattactgttaacatttattttcctttaattcttacattggaatgagattcctaggggtgggtaaaacaatagtcattctaccagcaatggcatatgttgatacatgttaatggtatatgttgcctatgaatatatcaaaaacataaacattcttattttaatatatgaaattcttaagatgttaagatggtcatatatacctttcaaaaatttgtattttttaatctctacaaatgagtagattttaagagcctagtaggctgattagataggatatattcaatattgagtccaaagagcaaaaggaccctttggaagactaaagagaaagaaagttgctgccctctcttcctcccagtgacagtctttgacatttatttcagctcccgttattttcactggaaaatgaacctgtgtgtaattctgctgatcctggttttcatggtgcctttttacattggctattttattgtgagcaatatccgactacgtaagtattttaccctctcagtcagcatatagattgagatgagtatttgaggggacttaaattgtgga

SEQ ID NO: 2470 - DNA, 2300 bp, Homo sapien
tacaattgaaagtaaaagtgaattgtttaaaacaaggccatgcttgtctatgtgcctctaactttcacttctagtgattacacttctttgcctattatgagaccacagcacagtgtcaatcacctttacatattcaatcgattccactccacagccagtcattagtgtttgttgtagacactgaaaataaggacaatagaaatgagctctgtgcttcctctctcacaactgcctcttttaatcctgcatgttaagctgaaatgaactattaaatgagtggaatagaacccttgccttctttgtgtatgtgttctagctttttcaactatgaaaatataaaaacctagaattactaagccttaatcttacaagtcagaatctccctaggtctgagcctcttcttggttgtttattacatcttcccaaaatggtgagtgatagtagatgtgtagttagaagaaaggcagaaagagctaaaagagctgtgtttcattcactcagtatccaggcaaaggtcattttcaaaaggaaacagttaagtcaacatggctgacattctttcctgttaatatcattttagctaatggctcaaaaaatttcacccatagaaatatcatttgatctttggtaccattgctactatttgtattagtcccaggcataaataccaatgctgctgcttgctcttcaccatttttatcttttgcctcccaaaaatatccaccttgagttacatttttctttggtcctgctactctatttttattagactcatcctagttcattttatgcctgtaggccttggcccattaaaccctttaaatcaattatgtacaaatgatcttttattttgatcctcactaggaccctgttgatacctttgtggtgagctgggacatgccagcagctaccactgtactagtcggtcctccacagactgagaggaccaggagtggtaggtttcctgttgacttattcacctgtaggacagattacagaaggtgagggtattggacttagagactgatattttagaaggggacaggtttatgcaattttgctatttttttttccttttgtctgcctttgaaaaagaaggaagaaaacatgtattgcgttccaaactctgtatttggtcctttagttaggtatgttagctgtttttttttgtttgtttgtttttgttttgtttttgagatggagtctcactctgtcacctgggctggcgtgcagtggcgtgatctcagctcactgcaacctctgcctcctaggttcaagcgattctcctgcctcagcctcccaagtagctgggattacagacatgggtcaccacgcccagctaatttttgtatttttagtagagatggggtttcaccatgttgcccatgctggtcttgaactcccaacctcaggtgatccacctgcctcggcctcccaaagtgctgggattacaggagtgagccaccatacccagccaggtatgttagctgttttattttgtctttaaatggtaactgtagtaattaaactatgtatagcgccttgtagttgacaacatgaattcatatgtattatttcatttatcttcacaaccatccagatatgaggagatgaaaactctaagacctcccagcttccaaatagcagagccagtcctcaaatttattgcctagcccaaattctgtgcttcttcacccaggccacattgcttccacatagtttcccttcagttgtaagtagtagaaaagtaggactccagaatcagtatccttacataaacagctcagtacatgagaggcagttgtgagactggaaaatggatgggactagactgtgagggtccatgcttgcttgctgaggctttatattttctttcatttcaggatggcaatggcacggagaacaatgttccagaagggggaagtgcataacaaaccatcaggtttctggggaatgataaaaagtgttaccacttcagcatcaggaagtgaaagtatcctttgtccctctgcttgattctttttctcaactctggaccaagagcaaaagaaaaaaagtagtgttgggatagtcccttctaaggtacctgactacatcagagtccaaactcctaagagctaggcttaggaaataccatgtgtacagtcatctttccagcacctgcacaatatcataaaatcattgtctttgagctgaagtggtcctaaaaagtcagcctttccattttacagatgagaaaatagacccagagaggttaagtcacacggtggtttgtggcaaagctagaaacataactgtgg

SEQ ID NO: 2471 - DNA, 2300 bp, Homo sapien
acaatatcataaaatcattgtctttgagctgaagtggtcctaaaaagtcagcctttccattttacagatgagaaaatagacccagagaggttaagtcacacggtggtttgtggcaaagctagaaacataactgtggtctcctcttcatagttctttccactacactattacatttctcaactctgaaaaaccaccataaagcataatggctacctaaaataaatggcccatttctaaagtaattagtattcctaaacaaattttaagtagctctgcttctccagtgacattttggtttaaagaatcaaggggaggctgggcgcagtggctcatccctgtaatcccagcactttgcaaggccgaggtgggcagatcacttgaacccaggagttcaagacaagcctcggcaacatgacaaaacctcatctctacaaaaaatacaaaaattagccaggcccagtggcatgtgcctgtaatcccaactactcaggaggctgaggtgggaggattgtttgaacttgggaggctgaggtaggagtgagcccagatcacgccactgcactcctgcctaggcaacagagctagaccctgtctcaaaataaaaaagaaaggataaaggagatttgattaatagattaataaattgttctttcctgattggttatgatgttgaactacttcccaaattatgtaaccaaatttctgtgtggctctggtgctattaggtcaaaactttggggaactaagcatgagatagcatactcctgtttccttctctgtcccagggaaatacaaattcccttttgcctcaattagagaaggatgtctattcttgctacaaattatgatttatgtcctggtgtcaaatgaagataagaataagatcaaagaaaggcaagatgattgtggaagagaaagaaaaaggattaatttagatttatttaaccaagaaacatttattttgtatctcctatttccaggctgagtgctaagaaataaaatgatgagtagagtatagcctttctcctcaaggagcttaccctctaatcatgggagagacagacatgtaactagttaaaccatattgtttggtggcttgaaccatgccagtagtagccactattaaggaaggaactgaagggcacttactgatttgggtaatagtgggaaaaatcagagaggagggaggatttagattgaagtatgtgcttctattttagaaggggctatatttactatgtttattacttaaaagttcataaaagccaataatatgggtttgagctgtgttagtgatgagttaacaaacatatcaggactatttaacctccctgagcccctgttctctaaatgggagaataataactctacctgattgagttcttggaaaataacatagtgtaacggaaagagcaggctttggaggaaaagaggatttgactttgcatctctatcaattaattgtgtgactttgagcaagttatttaactctctgagcttcactttccttatgtgcaaaatggataacaccatggcataagacaatcccatgaagataagatataaaagaagataatgtttgaaaagaaataaggtaatgtctgtaaatcctagcctatattagaacacagtaaagtattagttcccttttctaacattatattcagataatgtaggagaaagctatgctttattatagttattattctgtaactatttacaatcttgaacattacatttgacttaatctaactagataaatcaaaaaacaaatgaaactatctgtttgagctgcttgacttaagagaaactgagtggtaattgtttggtggcgatgctcttgatggagaagcttttacacacctgcgtcagaggttgggaaagttgctctgaagtagtgttgctggctatgaaacaggaaattgagaatataggcaactccgggaatccactgtaggaaaaactaaaagtatatgctttctcattgccatttcttgaaattcctatgtgattaaaaccttgatgcccattctgtgccagatcttactcttattcaacaggaagtggatgctttggaagaattaagcaggcagctttttctggaaacagctgatctatatgctaccaaggtacagagcaaggaaactgaagtgtggtttttaccaatattattaaagagagaacaagactaaatggctttttagatttctctgtggccaagcaagagatacctcacagcttctatatcagccatgaagcattagggataagggatcttcactcttcatgaaattgctcct

SEQ ID NO: 2472 - DNA, 2300 bp, Homo sapien
ccgcctgcaacggcggctcttggatcccgggcaggcagcgtccacccagcgtggaaccgtggcagccgcagcccccgcaggttggagggcagacactagcaggagaaaggccacaaggcctgcgtggtgggaaagcatgggagacgtcgctttcctaccgggcgagaaggtctccctacagtctttggagacaagatggagggaggcaccccttccaggaacaaggcggctgctcctgaggcctggctccgcacggaggctcctgggtcccgcgcgccctctccctacccgctgtagccagagctgcttcacatatctcaaccggcctcctcctcctccccagccgtccttgggacagcaaggcccccagcccgtgggaaagacctagcctcctctccagcacttggagagggagttggatgcacgtctcttaaccccaggaggacagagaccctgaggcaggaggggaccccttcccttgctgcttctcttggcacagccggtccagggggctggctcagggcccaggactcctcgctcctcctggagggcctgggtcgcgtggcccaggagctggccacatgggcatctcccgcactgctcctcagggaacgggaggcattatcctgcagggcccactcttacccatgaaagacactcgggaaatgctcctgcggaagctggagctctgcgcgtttgaccacttagtctgtccgcccatccttccttcggagggtcttggggagagaagaaatgctccttcggagggtcttggggagagaagaaatgctcgaggacgatgcgctttgcagcgtctctaccaacatcagaagaaagcagggcgcgtcttcctggaagaaggcggccggaggcctgcggtcgcagggaggcttgcggggcaggaacgccctatctccgccgtgctatccagcggcttgcagcatcccacctggcggactcctcttcctctctcttctactgtggctcttctatcctggtgtcccttgaatgcctatcttccttttgtgcctccaaacctctcacgcccgccccaagttactcatttccttagttgttctgaactttaaataaggtaatgcatgtaagattgcataaatgctcaataattgtcatctgttattattttcatcagtaacatcatctgaatcatcagtattgtctatttttaacagctgcatttttcattgtccgaatatagtcacatacatttgaacattttataattattgaataataaattcgttctgctattttacaataaaaaataatgctgcagagtgtattcttacacatatatcttggcagatgtaggccagaggctcttctttggccattctgtggccaacctatcaatgtatacacttttaatgagattttgccagcaatcaaagccttcagtgaaaatgtccctagctctttactacatcggatcaaggactctggacagtaggcacaacatcctggaatattgtggaatatctcctgaaacggagatattattctttcctctcctcttttgtctttgtcttttcacaacatcttaatgacagtgctggcgacaagagtgtaactatatgtcagtgttctgctgtccttgcctgtgtgggtcttctcccaaacccgactttcctccagcagcttcactgaaaaagaggagggggctgcgggggtgggggagtggggcggggaggggaggaggaaataaactgaatagggaggaagcagctcacaggccaggagagggtaaggaagggagtcaaagacagaattttcttcagcaaacagtaaaaggggaaatccggggacgctaagagtttttaaaccctttgctccatcacataagtaatccatgattttctgttacacaaatcaggactcccactcctccctccctccccacccccaatcctgattcctgtttacaaagaatgttcaaaaacaaggaattatgtgtaacagttcccagtttactcaggaaattctcagattacaaagagactttacgaataacaagtgaagagaagaaccttagtggttccaacatagtatggccatcgttttatactcaaaatatagaaagacaacctcagaatagaattgaataaatcaagtttatcattaaaacgcaaagaaaaaaaaactctccaaacgttgctgatcttctgttttaaactactgttagactggtgagctggagagccgggggaatccaccaaagatttttggatgaaaattaatcatcccttgtccaccgtagtcgcaccccaatgcccctcaga

SEQ ID NO: 2473 - DNA, 2300 bp, Homo sapien
aacttttctattctaatacaaaagtttgtgtataggccgggcacaatggctcacgcctgtaatcccagcacttcgggaggctgaggggggcagatcacgaggtcaggagattgagaccatcctggctaatacggtgaaacccctgtctctactaaaaatacaaaaaattacctgggtgtcctggcacgcacctgtagtcccagctactctggaggctgaagcaggagaatcgcttgaacccaggaggcggagggtgcagtgagccaatatcgcgccactgcactccagcctgggcgacagagtgagactccatccaaaaaaagaaaaagaaaaagaaagatagaaagcaagcaagcaagcaagcaagcaagcaagcaagacaaaaccaaaatatcagagatgataaattcgctggatgggattaacagcagattagacgttgcagaagaaatgatcagggaatatggaaccatgaataattgaaaatatgcaaaatgaaactcacagacaaaagatttttttttaaatgaaaagattatcagtgaactgtagggcagatttaagaggcctaatttatgagtaatgtgagtccctgaaaaggagcggggaggaaaggaagcatttattttctttctttgttatttttattacgagtggggtttcagtatgttgctcaggctggtctccaattcccggcctcactcaacacctcctgattcctgaaggtgtgagccactgttcccagccaatttttgaagaaacaatagctgaaaagttcccaaccataatgaaaattataaatccagtgacccaaggagctgaggaaaccaaagcacaagaaacatgaagaaaaccactgctagatacctcataataacattgctgaaatccagccagaagaaaaagacattgtacctacacaggaacaaagatgagaattgccatcaactttctttctgctctcgccggcccccactgggagcagcaatgcaatgggagcagacagagaagcaacatctttaaggtactgagggcagaggaagttaacctagaatactctgccagaaaaaataaattcccaaaactggaagtgaagtaaggacatttagagacttacataagctgaccgaattcactaccagctgacccacactacagaaacgtcaaaggagtcttccgggcagaaggaatccaataccagatgaaaatccagatctacatgaggaaatgaagaacaccagaaataggtaactatactaggtattttcttattttgtaaatttcttttgtaaaagtttgaccatttaaacaaaagcaataacaatgggttgtgggtttataacatgcgtaaaagcaaagtacatgtcagcaataacttcaaggccagaaggcgaggtttaatatcacttgaaggttgactgtgttcagttaaaaaggtttgctataagccctaagggaattactaaagtaacaaaagaaagagttatagctaataagccaacagaggagagagaatggaatgatataaaaaccgtgtgaacactatgatggagtaattgctcttcctatagtaattgcacctctatcctatagaaatacaccagtggctgaaaacgccgaaaatgcccgtacaagaatgactagaacattatatgtaatcataaaatcacagaaccaatttaacttcaaaagcgtatggaaagggctaaatgaatgacagtaaacaaacaaacaaacaaacaaacaaacaaaatagagagaaggccgggcgcggtggctcaagcctgtaatcccaacactttaggaggcaaaggcgggtgcatcacgaggtcaggagattgataccatcctggccaacatgatgaaacccccgtctctactataaatacaaaaattagctgggcgtggtggcgcgtgcctataatcccagctactcgggaggctgaggcaggagaatcgcttgaaccagggagtcggaggttgcaatgagccgagatggcgccactgcactccagcctggtgacagagagagactccgtcgagagagagagagagagagagagagagagagagagagatcctagaatcctagcggaccttgatttacgtcctcatgtcgtatgggagacacggaggagaggcgggtaaagttggtcttgctctgccattccatgagagaatgtgctgggtagaagaaagttgccagcggtttaagcatttttaaaatgcaagaaacgctcagtagaacgagcttgaaccagccaactccagacttggaagcaagcacaccacccgactgc

SEQ ID NO: 2474 - DNA, 2300 bp, Homo sapien
atggatgcatagggacagccctgcctccatggagcccccacactggaatgcaagacacacacccaagtagataagcacagtacggggctacaggcgcagtatgagaaatcatcctctgtgctgtgagagcaccaatgcaaatgtggtcatttatctcaggcaaggaaggtaacagattcatagaggacatagcaaggggggtgagttttgaaagccttgtgggttctgcaggtggaggaaggcattcctggtaaaaggagcagcaccttagttctgagagctgcaaatggttgtgcgagggcttcacaggttcaagcaggcccatgttctgcacctcactcacaaaggaagcttgagcccacgcagggggaaaaaagtaatctctccgctcctgtggtgttacctttccccaggtgctaggcagcaaaggcattcatgagctttggagcagcaccagtgccctgcaccatgccctagaggagtcggcttccctcctcaccatgttctggagagtggccctgccaagcacccacatccctgtgctgcctggcaaagtggtaagacgccagtgtcctttcttggttcaaacccagttctcctgccctccaatactgttctgtctcctcagtgtcacagcttttccagaaaatcaggagccacacagtgaattgggatagacaggaacttagaggagtgtccctggagggacatctctgacccttggtggctgctttcattgcagctctaaatacatcccattccccaccagccccctgacccctggataagaaatcaaagaagaggaggaaggagtgtggagaaggcggagacatcataaccctggcaatccataaatgttcagtttctttacctctctgaagtttggatgagctgaaattcagttaaagctttagcacatctcccaccccacaggtcccgtggtcaaatgatcacagaatgcccccatgagactgagcctttttagccactgcctggaatcccaacatacaacttaagctggcattgctggaccaggcctggggaaagtcagcctcccctcaggatctgctcagagctcaggctaactctgattggcagaccctcatgtaggcaggtttcaggatcccctccccagggattctacttccaggtcaatggcaccaataccttttggatccaactatgctaattccagggagagggtgttgtgccatcttcatgttggcacaaatatttacaaacttgcaaactttcctgagtccagatctctctccccagcataacacttctgaactctcaatcttacctgtgaagggagagtgacagaactgatatcaggactaaagcaaggtcctcttcagagttgggagtttgataccagcctgaggcgaggttctcttaagctacaggtgtgtaggcctgtgctagtctgcatggggaattccagagtctcattattcctgcctaatggcctcatcctaaactgtcctcagctggaggtattcaaggctgtgaaggaggaaatccagttcaggagggttgagaagattgtagaatcctttgaactggaaagagccacaaagcacagggtgctttatgtcttctgcctggtcagtaagagtctgttcctcttatccagagagaatcgacagaaagggaacttctagaactgagaaccaaagtatccaaacaggagtggctccttcagagcacagctgagcatctgaagatcgccaaccagcagaaagagagcatggagcagttcatcgtcagccagcgtaggttccctgagagggaatgggggaagaaacgggcagtcttcccgatgccccacttgtgctgctgatgagcagtgactggggggcttggggatgttgggagttgaggctgatttgatgtccccaaacctcctgtgccccgagcagttgtggatgcagagggaggggaggacagggggtggatagcaggaaactccaagctgaatggccagagagaaataaatgctttagcattctcatgctaagcaagtagggttaatttctgctgatgatttctactctgtggtgctcttttgttgtttcagtaaccagaacacatgatgttttaaagaaggcaaggactaacctagagttaaggaaactactgcaccagtcagaggcaccaagcctgtccccaacccatcaccatctgttagcagatcttgtaggtgacgcttggcctgctttcgccttccaggagaagatttccagtccacttgtaagatcacaggtcctcagtgggcttcctgctagtttctgttc

SEQ ID NO: 2475 - DNA, 2300 bp, Homo sapien
ctctggctgcccttagcattttttccttcatttcaaccttggtgaatctgacaattatgtgtcctggggttgctcttctcgaggagtatctttatggtgttctctgtgtttcctgaatttgaatgttggccttccttgctaggttggggaagtcctcctggataatatcctgaagaatgtttcccagcttggttccattctccccgtcactttcagtacaccaatcaaacgtagatttggtcttttcacatagtcccatatttattggaggcttgttcatttctttttactcttttttctctaaatttctcttctcgcttcatttcactaatttgatcttgaatcactgataccgtttcttgcacttgatcgaattggctactgaagcttgtgcatgcatcacgtagttttcgtgccatggttttcagctccatcaggtcatttaaggtcttctctacactgttcattctggttagccattcgtctaatcttttttcaaggtttttagcttccttgcgatgagttcgcacatcctcctttagctcagagaagtttgttattaccgactttctgaagcctacttctgtcagctcgtcaaagtcattctctatcctgctttgttccattgctggcgaggagctgcgatcctttggaggagaagggatgtcaggtttttggaattttcagcttttgtgctctggtttctccccacctttgtggttttatctacccttggtctttgatgatggtgacctacagatggggttttggggtggatgtcttttttgttgatgttgatgctatccctttctgtgtgttagttttccttctaacagtcaggtccctcagcttcaggtctgttggagtttgctggaagtccactccagaccctcaaacagagatttcttggtgtcgcctattctctcccatgtgtttaaatccagggagagatgtatatatgctttcttcccatttgttggtagtatgttggctagtatttttgcaagaaaagaaattgaaaaagtaaatatattatatcaaaatattgggaaaatggggcccttaatacacaagatctgtgtctgcactgcgtcaagaactctcttcacttgaatgctgcgtgtaaaattcaacccaatttatgcaaagtagttgaagccctgtgtcagttctctgtgctgcaagtcatgatggtagtttacagggagagtctgggtgccctgagttggctcatctgtggcaaatgtactgagcacatgctgcccatttttgctctgtccccagagcagtcaccctccaccctgtatttagaaggatagttttatttctcttgaaggaaaaatgcctttggtttctgtgaccactccattctgtctcccatcagatcatctgggaggttttgttgtctaatgtctgttggttaaatcttctatcatccctgtcctgcctggctcatcaggaatctgcaggagtctgaagaggaggaagtcccccaggagtcctgggatgaaggttattcgactctctcaattcctcctgaaaggttggcctcgtaccagtcttacagcagcacatttcactcattagaggaacagcaagtctgcatggctgttgacataggcagtgagtactccattgtgaaggtgataaagctccagttcatggcccaggtagaccccataatctttgggccttgtgcccctggttgggctgagagttgccatcactgtgggctgaacctatatatcaatgtagatttcaatcactctggagtcgagtctgaagcacaggcatggggtgggtcagtgagctttgctctcttcctagtctcaggccatgcccatgccaacctggactgactgtcacgacattgaactcaaggcaggtgtggcaaactcacaccaaactgtgcagcacatgcccaggagttgtctgtcagatcagctcatctgaattaaatgtctcttgccagctacaaaattccttatgagttttgttcccaaagcatgtctgtgtggttctttacctgcccaaggccagtgtcacccttgtctacctctcagtgaaagatgtgacccaggtttcactgaatttatccccattttctgtgtcttctaagttcgcttgttttagctcatctgtccgtcatgttcctggtatgttttctagataaatggcttacttttcacccacaaaagccataatagctgatgcttctgtgtagaaccaagtttcattttgactcaagagctggtacattgcaccccttcatcaaatctctgtgtccacaatctcataaa

SEQ ID NO: 2476 - DNA, 2300 bp, Homo sapien
tgaggaactgaaaggatgtctttttgaaacggaattaggaagacacctacttttgtttacagaaggaaagatgaatggaacatcatcgaggatcttgcaggagccctctctgatacagaggaagcctgtaaaccattttctattctttctcttggccacagacattcctttcaacatgtgctgaccttctgcttggaggtctccttgaggacattgtctcagaaatctctgttgcaatatttgaacggatcactcaaccctttccactcttaaattttctctaccgtctcaccttaggcaatataaagtcctggttcactctcaggaacgagagctgacccagttaagggagaagttacgggaagggagagatgcctcccgctcattgaatgagcatctccaggccctcctcactccggatgagccggacaagtcccaggggcaggacctccaagaacagctggctgaggggtgtagactggcacagcaccttgtccaaaagctcagcccaggtaaggtggccataggccctgatgacccaaaaccccaggcttatgagaggctccagacctccatactttcacaatgacagttgtatcaatggtgtttttttccactaagcttatgtggccatgacatgaccaggacttcctgggtaagaacggagatgggaaacccatggggttggaggtcacagtattgcaagtgtccctccttccttgatggaaggtggtctttggagtaagaggcagcatctgtctagttttaaaggacaggaaggaggctgcgatgggagcaggcttgttagagtgaaaagagctctggactaagaatgaaggttcccaggctgtctttttggcaatgttcttagtaactgtcggtgagtgaatgacttgtccttcctgagtttctctctctccatggcagacaaattgtctcttgcaaggtctgaagcattcaaatgtgggaacacttacaactgctttccaaaatgagatgaagcccctctccgtgtggtgttggagaaggcacttgatgtgggggcattttgtggtaggaagtgcttcagactggagcactccccatggatagaatgtccctgaataacacagcagaagccacttggaggcttgaaatcttctgatgcatagaggactgtgggacaagtttgcttctaagagaaagaattaggtttgaaatgcaaactgtgacaggacaccaagcctgtgcctgggaatcagatctggcaggatgggggagacagctgccaaagtccagagagaggctgcacaagcctccagtgatatgggaagcaaaaggtcttttcaatatttggccacatcttgatggtggccctccagatcagaaatgcattgcctgatggaccaggaaaccatgccagggcattctgttaaagataaaacatgagagttttcagttgaacggtgacccatgcctagatgttcatgtccctgttgcacattgggctgactgtgcttgcagactgtgaagtgggaaatatctgaatgaacacttctgtatttacagaaaatgataacgatgacgatgaagatgttcaagttgaggtggctgagaaagtgcagaaatcgtcttcccccaggtaacactgaatactcaggaacaattaatggatggtaacatatgaagaatatctaggaggcacaccctctctggcatgtatgatgggccaaaaacccgcattcgcttggccacagtatgtgaaatataacccagcttagacacagggtgcggcagctgtcatgtttctctatgtgtgccgagtgtcatgtctgcaccgtacagggatagctgagtcttcatcctcctcagctcctatctgtccagtgcaatgaacagcagctgctctcttcctctctggttcccatggcagccatgctctgttgcagacagaacaggattgcatgttccctcttaatgggaacgtccattttgctttctgggaccactctcttaatgccgcctgtcaaaaccagctaggactccctggggtccaatccctctgtgtttaatcttctgtcatctctgtcccacctggctcatcagggagatgcagaaggctgaagaaaaggaagtccctgaggactcactggaggagtgtgccatcacttgttcaaatagccatggcccttatgactccaaccagccacatagaaaaaccaaaatcacatttgaggaagacaaagtcgactcaactctcattggctcatcctctcatgttgaatgggaggatgctgtacacattatcccaggtagcctct

SEQ ID NO: 2477 - DNA, 2300 bp, Homo sapien
gtatgtgaaattcaacccagcttagacacagggtgcggcagctgttgtgtttctctatgtgtgccaagtgtcatgtctgtaccatacagggatagctgagtcttcatcctcttcagctcctatctgtccagtgcactgaacaccagctgctctcttcctctctggctcccatggcagcgaagctctgttgcagagagaagaggattgcctgttccctcttaaagggaacctccatttgttttctgggaccactctcttaatgccgcttgtcaaaaccagctaggactccttggggtccaatccctctgtgtttaatcttctgtcatctctgtcccacctggctcatcagggaggtgcagaaggctgaagagagcaaagtccctgaggactcactggaggaatgtgccatcacttgttcaaatagccacggcccttgtgactccatccagcctcacaagaacatcaaaatcacatttgaggaagacaaagtcaactcatctctggttgtagacagagaatcctctcatgatggatgtcaggatgctctaaacattctcccaggtagcctctattttccttgtgtctcatacctctgtctaggctatggaagatcaattctgaggacaggctgtatatacacatattgttattgttttagtcagaaactaggatggagctaggtgctgtgactcacacatataatcacagcactttggaaggcccaagtgggaggatgacttgagttcaggagttgaagaccagcctggagtatatggtgaaacccatctttacgaagaatacaaaaaattaggcaggcatggtgctgcccgcctatagtcccaactgctcaggagacttaggtgggaggatgggctgagatgatcctcccaccctcattcacttctgtcaggctagactctctctccttttcattggcttgtcttagctattaataagtcttggctgggcgcagtgggtcacacctgtaatccgagcactttgggaggccgaggcgggtggatcacgaggtcaggagattgagaccatcctggctaacacggtgaaaccccgtctttactaaaaatacaaaaaaaaaagaaattagctgggcgcggtggtgggcgcctgtagtcccagctactcaggaggctgaggcaggagaatggcatgaacccaggaaccggatcttgcagtgagccgagactgtggcactgcactccagcctgggagacagagtgagactgcatctcaaaaaaaaaaaaaaaaagtctctgaccagggacgctggctcacatcttaatcccagcactttgagaggccaaggtgggcggaacacctgagctcaggagttcgaaaccagcctgtccaagatggcgaaaccccatctctactaaaaatacaaaaattagctgtcatgttacttggcgcttgtaatcccagatgcttggcaggctgagtgatgagaatcgcttgaacccgggaggcagaggtggcagtgagctgagattgtgcctctgcactgcagcctgcgcgacagagtgagactccgtctcaaacagaaaacaaaaaaccaaaaaaggaaaaaatttaaaaagcaaaatgaaatcttttgtgctacacagaaacattggccactcatgggataaaaatctcagggccaagccttgctttatagaaacgtataagcaagtgtagaagtgtttatgtcttggtttcaaggtgactgcatagctaagacaagttgacttaaaggagatcaagactggagatgacaagagtgaaaccagggaaacaacatcttcaaataagtaaacaaggctaccagtgacatccctcagtcctgattaagcctatttgatttcaccagtttttaacccatcatatgtttgcctttcttctccccagtccctggccccacctcttctgccacaaacgtcagcatggtggtatcagccggccctttgtccagcgagaaggcagagatgaacattctagaaatcaatgagaaattgtgcccccagctggcagagaagaaacagcagttcagaagcctcaaagagaaatgttttgtaactcaagtggcctgcttcctggccaagcagcagaacaaatacagtaagatctatatgctcaccatcacgaaagtgatgaacgaagtcctgtcttctctctgagaaactaagtgctctctccatcaaaaataatgtcatcctccccatacttctaggaaaacagaaatgggtattttaacattttgttaaagttggaagacagaggtaccaaagtatttagcaactttc

SEQ ID NO: 2478 - DNA, 2300 bp, Homo sapien
gaggaactgaaaggatgtctttttgaaacggaattaggaagacacctacttttatttacagaagggaaagatgaatggaacatcatcgaggatcttgcaggagccctctctgatagagggaaagcctgtagaccattttctgttctttctcttggccacagacattcctttcaacatgtgctgaccttctgcttgaaggtctccttgagaacattgtctcagaaatctctgttgcaatatttgaacggatcactcaatgcttttcactgttaaattttctctaccgtctcaccttaggcaatataaagtcctggttcactctcaggaacgagagctgacccagttaagggagaagttacgggaagggagagatgcctcccgctcattgaatgagcatctccaggccctcctcactccggatgagccggacaagtcccaggggcaggacctccaagaacagctggctgaggggtgtagactggcacagcaccttgtccaaaagctcagcccaggtaaggtggccataggccctgatgacccaaaaccccaggcttatgagaggctccagacctccatactttcacaatgacagttgtatcagtggggtttttttctactacacatatgtggccatgacatgatcaggacttcctgagtaagaacagaaatgggaaacccatcggtttggaggtcacagtattgcaagtgtccctccttccttgatggaaggtggtctttggagcaagaggcagcatctatctagttttaaaggacaggaaggaggctgtgatgggagggcgcttgttggagtgaaaagagctctgggctaagaatgaaggttcccaggctgtctttttggcaatgttcttagtaagtgtcggtgagtgagtgatttatctttccagagtttctctctctccatctgcaaaggcagacaaattgtctcttgcaagggtctgaagcatccaaatatgggaacacttacgaatgcttttcaaaatgagatgaagcccctctccgtgtggtgttggagaaggcacttgatgtgggggcatttggtggtaggaagtgcttcagactggagcactccccatggatagaatgtccctgaataacacagcagaagccacatggagggcctgtgcagtctcatgacgcatagaggactgtgggacaagtttgtcctctcctaagagaatgaatgaggtttgaaatgcgaactgtgacaggacaccaagcctgttcctgggaatcagatctgtggcaggatgggggagacagctgccaaagtccagagagaggctgcacaagcctccagtgatatgggaagcaaaaggtcttttcagtatttggccacatcttgatcagggcattttgtgaaggataaaacatgagagttttcagtacaatgctgaaccatacatagatattcatgtctctgtgcacgttgggctgactgtgcttgcagaatgtgaagtgggaaatatctgaacgaacattttgtatttatagaaaatgacgaagatgaggatgaagatgttcaagttgaggaggatgagaaagtactggaatcatctgcccccaggtaacattgaatactcaggagcaagtaatgggtggtaacatatgaaaatgtctaggaggcacgccctctctggcatctatgatgggccaaaagcccgcattcccttggccacagtatgtgaaattcaacccagcttagacacagggtgcggcagctgttgtgtttctctatgtgtgccaagtgtcatgtctgtaccatacagggatagctgagtcttcatcctcttcagctcctatctgtccagtgcactgaacaccagctgctctcttcctctctggctcccatggcagcgaagctctgttgcagagagaagaggattgcctgttccctcttaaagggaacctccatttgttttctgggaccactctcttaatgccgcttgtcaaaaccagctaggactccttggggtccaatccctctgtgtttaatcttctgtcatctctgtcccacctggctcatcagggaggtgcagaaggctgaagagagcaaagtccctgaggactcactggaggaatgtgccatcacttgttcaaatagccacggcccttgtgactccatccagcctcacaagaacatcaaaatcacatttgaggaagacaaagtcaactcatctctggttgtagacagagaatcctctcatgatggatgtcaggatgctctaaacattctcccaggtagcctctattttccttgtgtctcatacctctgtctaggc

SEQ ID NO: 2479 - DNA, 2300 bp, Homo sapien
ttatatatatacacgtatgtatatacacgtatatataatatatattcgtgtgtgtatatatattttatatatacgtgtatacatgtatatatgtgtatatatatataatatatatacatgtgtatatataaataatacatatacacgtgtatatatattatatatatatatacacgtgtgccatgttggtttgctgcacccattaactcgtcatttacaccaggtatatatcctaatgctatccctcccccagccctcaccccatgacaggccctggtgtgtgatgttccccgccctgtgtccaagtgttctcattgttcaattcccacccatgagtgagaacatgctcgcaccgccgcttctaaatgttttaaaaacaaagacaccaatgcccttcattggggaaatgaaagacttttaagtaaaacgattttgagtgaaataatatttgttgttttaaaaagttaatattaaccactctccatcatatattgaaattaacttaagatgtgaaagttaaaattagaaaccttgtaaaggaaaaataggaaatagtttcatgaacttgacacaggaaaatatttcttagactagatactgtagcactcaccacaataagaaatcaagcgaattgcacttcatttttaaaaagcttctccttattatgttgttgtttaacaacttaaacgctatctctagaccaggaataattatttgctatataatacagcaaaaaatatgtatgtataaatggactcattcaaaatatataaagaactcctattacaaagaaattgacaaacagcccagtatatcaatgaatataaaaatttgagaagatattttccataagaagatatctaaatgaacattaggcatgagaaaaccaaattttaggatatcactacacacctggcatagtttaaaagactgaaaatattaagtgtgtgggaatgtagagcaactggaaatggcctacatctttcatagaaatgtaaaacaatacaaatactttgcaaaactctgtccaacattttctacccattcaccaagcaactccatccctagctatagatacccaggaaaataagtatgtatcttcacagaaataattgtatgagaatattcatagttacttatgcacagtagttatcaagtaaacctgtctcccatcagaaaaatggatataaaattgtgtgataatcatacaatcaataggatattacttggccaaaacaaaatgaaacaagggaaaaacacaatcaaacaaattagtggcatatatacccacctgagtaaagagaagtcggccgtgtgcggtggctcacgcctgtaatcccagcactttgggaggccgaggcggcagatcacgaggtcaggagatcgagaccatcctggctaacacagtgaaaccccgtctctactaaaaatacaaaaaaaaaaaaaagaaaaattagccgggcgtggtggcgggcgcctgtattcccagctacttgggagtctgaggcaggagaatagcgtgaacctgggaggcagagcttgcagtgagcctagatcgcgtcactgcactccagcctgggcgacagagtgagactctgtctcaaaaaaaaaaaaaaaaaaaagtcaaaacaagagaacatactaaatgattccatttttttatttatgacttcatgactaccattaagaaaatataacctgttgggaaactgtttctgccttgatgatgttgtacagacaagagataaacagtgaggaatatgcttagatgtattgggaaagacacgggtctgtggcattgtcacaagggtacacgaatactgagagtgaatgctgaaggaatgatccccattggtggtgaccctcaggtgagactagggtgcctgtgtttcagcaaagcctgggcaattggaatgcagggctcctaagattccatgacacccctaccttctaattctgttattgcaactgcagacggttacctggcacgctggccacaatctacctcactcttatcagagtctgagcagtgctttcagctctgagttgaggcacctcgaaccttgtttttgtggtgaaggatcctaaagtgctgtggggagtgatcacatttttcacaacagtaagttaagaatttcagttactgacatccctcagtcctgattaaacctatttgatttcaccagtttttaacccatcatatgtttgggtttcttctccccagtccctgactccacctcttctgccacaaacgtcagcatggtggtatcagccggcccttggtccagcgagaaggcaga

SEQ ID NO: 2480 - DNA, 2300 bp, Homo sapien
atgaaattgccatggataccttctttgcccatcagcaggcctagcgtcttggcagtcatggtgacaatgacgttgaaggtgggggctccaccgatgctcttcatacaaagatccgtggtcaattccccatcctgcagcagtgagtccaggaccacagtatatttctggccccccagtgtcagcccattcatgacaaagcttgaccagtctttgccaaccaggacaccaacctcagctggcgtgatgttgaggaaggttttccctgggacggtggcacagatggaaggtgggtccttgttgcccacaatggccgtgtcctaacaggtcccgtccgccacgaggctgtagatggaggtgtccacctggcctttgcgttgctgcaggggctcctctggtcgctgctgctggggccgcctgggctggcgggttggggaggcggagagctcgatgcaggtgctgtcctcctcgccacgactctgctagctgtgcagtagccctcgctccgccacttaaaaaagaaaaaatatatatataatatatatatacacgtgttatatatattgtatattatgtatatacacgtattatatatatacacgtatgtatatacacgtatatataatatatattcgtgtgtgtatatatattttatatatacgtgtatacatgtatatatgtgtatatatatataatatatatacatgtgtatatataaataatacatatacacgtgtatatatattatatatatatatacacgtgtgccatgttggtttgctgcacccattaactcgtcatttacaccaggtatatatcctaatgctatccctcccccagccctcaccccatgacaggccctggtgtgtgatgttccccgccctgtgtccaagtgttctcattgttcaattcccacccatgagtgagaacatgctcgcaccgccgcttctaaatgttttaaaaacaaagacaccaatgcccttcattggggaaatgaaagacttttaagtaaaacgattttgagtgaaataatatttgttgttttaaaaagttaatattaaccactctccatcatatattgaaattaacttaagatgtgaaagttaaaattagaaaccttgtaaaggaaaaataggaaatagtttcatgaacttgacacaggaaaatatttcttagactagatactgtagcactcaccacaataagaaatcaagcgaattgcacttcatttttaaaaagcttctccttattatgttgttgtttaacaacttaaacgctatctctagaccaggaataattatttgctatataatacagcaaaaaatatgtatgtataaatggactcattcaaaatatataaagaactcctattacaaagaaattgacaaacagcccagtatatcaatgaatataaaaatttgagaagatattttccataagaagatatctaaatgaacattaggcatgagaaaaccaaattttaggatatcactacacacctggcatagtttaaaagactgaaaatattaagtgtgtgggaatgtagagcaactggaaatggcctacatctttcatagaaatgtaaaacaatacaaatactttgcaaaactctgtccaacattttctacccattcaccaagcaactccatccctagctatagatacccaggaaaataagtatgtatcttcacagaaataattgtatgagaatattcatagttacttatgcacagtagttatcaagtaaacctgtctcccatcagaaaaatggatataaaattgtgtgataatcatacaatcaataggatattacttggccaaaacaaaatgaaacaagggaaaaacacaatcaaacaaattagtggcatatatacccacctgagtaaagagaagtcggccgtgtgcggtggctcacgcctgtaatcccagcactttgggaggccgaggcggcagatcacgaggtcaggagatcgagaccatcctggctaacacagtgaaaccccgtctctactaaaaatacaaaaaaaaaaaaaagaaaaattagccgggcgtggtggcgggcgcctgtattcccagctacttgggagtctgaggcaggagaatagcgtgaacctgggaggcagagcttgcagtgagcctagatcgcgtcactgcactccagcctgggcgacagagtgagactctgtctcaaaaaaaaaaaaaaaaaaaagtcaaaacaagagaacatactaaatgattccatttttttatttatgacttcatgactaccattaagaaaatataacctgttgggaaactgtttc

SEQ ID NO: 2481 - DNA, 2300 bp, Homo sapien
tgtatgtatagctttggccaatacccatagacactgagcgctcaactaggtgttagctactagattttaaattttaaattatttttatagtttttaagataaaatttacattcattgaaatgttaactgaattttttgtaattcctacccctatcaagacagaccatttttagcacccagaaatttctcttgtgtgccttcccagtcaatatcctgttagaaggaactgctgttatgattttttcaccacagattaattttgccttttctggaatttcaaataaatgggatggtatgcactcttttgtgtcatttatttatcttcacatactttaaaataaaaaggtccaattggggatgtagtaaaaacctctttcccaccagtagccaccagtcaagagtctttctttctctctctctcttttttttttttttttgacaggatcttgctctgtcatccaggctgaagtgcagtggcatgatcatggctcactgcagcctctcaaccttctgggctcaagcaatcctcccacctcagcctcccacacagctgggactacaggtgtttgggactaccagctaattttgcttgtattttgtgtagagacagggtctcaccaagttgcccaggctagtctcaaactcctgagctcaaatgatctgtcagccttggcctcccaaagtgcttggattacaggcatgagccactgtgcctggctcgctcttcctctcttgaagcaaccaatgttattcgttttatgtggaccatcccagggctatcattattaattcaggtgtttatacaaggctctctgagaactcagttttaaagattacccaaagagtccctgcaacaatccagcctaaaacgatataaaatcagttttaatataactgaagtttttagattctgcctccaaatatcagattgtgacattttacctttctctgactttatgccaaatttacttcaacttctagcatctatcgttctcatttaggaacaaatatgtatttcacaaatgtggaaatacaaccatgagccaaacaaaaccaaatcctggacttacggagctgatggtagattccccaacataaccacttgattacagttttatgcaatgtgatgggagtaagggaccaccgtagggaggtcagaagttgcctctcagaggtggagactacagctgtcgtcagaaggatgagggttggaagaatcttcaggcacagagcaaagcatgagcaaaagctctgtggagtccaggaagctgagtaaatagggaataaaagaggccagtttggctgaagcagagagagcaggatggaattggtctgacctgtaagaagacatggagaggtgggcaaagcgcctggccattcagggcttggttagttaggaggttttgtctaagagaacgggaaggtgtttaagtggtttgggctgggaagtgacagggtcacattacattttgaaaaagccactctgcctgttgtgttgagattagagaggcgataaaggggatatgggtaaaccacaaggagactaggtcagtagtccctccacccccactccccaggtgaaggtagcctagactagggtggtgatggaggaggtagaagaggacagattcaaggaaaatttggaaggtaaaaaccagtaggatttgctgatggacggaatataggaggggaaaggtagattatcagggatgtatcttagttttcttatagaagatgtatttagttgcaatgcaattgttaattgaaattgactttaaataatggcacgacttaaaattatgcaaacatttgccttagataaaatttcaagttttcaaagtttttagctgggtagatggcatggctttacttcatatttcttggtatttcctaatcttgttaaaaaaaaagtttttctttttctcaaaggcttatttcagtggaagcccatctgcgaaatctgttataaatttaaattagaaaataaatacaagtgccattgacacgttggttattgtttttgcgagtgacctaaggccacctctcgcgggagctgggggctgccttccgactcctgtgcgtctgcgccgcgggccgagcccggaagtcagactatggggcggtgcggcagcgcgaagcctgcagtcctaaacgctgggtagctccgggcttccgagggggtgtgtctcccgcctctttaacctggcaggggcggttcaagtggccggggaaatcagcgaattgcagggtcaagggctggtgctttgaaagagaggcggaggggagagagggattttccc

SEQ ID NO: 2482 - DNA, 2300 bp, Homo sapien
aagaggtttttactacatccccaattggacctttttattttaaagtatgtgaagataaataaatgacacaaaagagtgcataccatcccatttatttgaaattccagaaaaggcaaaattaatctgtggtgaaaaaatcataacagcagttccttctaacaggatattgactgggaaggcacacaagagaaatttctgggtgctaaaaatggtctgtcttgataggggtaggaattacaaaaaattcagttaacatttcaatgaatgtaaattttatcttaaaaactataaaaataatttaaaatttaaaatctagtagctaacacctagttgagcgctcagtgtctatgggtattggccaaagctatacatacacaattttgtttagtcctcatactgtcttcacgaggtaggtattattatcataacccccttgcatatgaagaagcccaaatttagtaaatactaaataactttccttaatttataccccctggaaaatgggggaagagctttgactaccgtcagtcaaatgccataagttattaaatattagaccctatagcacttctctgaaattgtaatatttttggtatatatatatataactcatctactagatcaagagcttcacaatgattgaaatcatagtttgctttttgtttgaggtttatgggtttattttatgttattattttaaagactgggtcttggctgggcacggtggctcacgcctgtaatcccagcactttgggaggccaaggtgggtggatcacttgaggttaggagttcgagaccagcctggccaacatggtgaaacaccatctctactaaaaatgcaaaattagctgagtgtggtggcgcatgcctgtaatcccagttacttgggaggctgaggcaggagaatcacttgaacccgggaggtggaggttgcagtgaggcaagcttgtgccactgaactccagcctgggccacagagtaagactccatttcagaaaaaaaaaaaaaaaaaaaaaaaaagactgagtctcactatgttgcccaggctgcacttggactgttgaattcaagccatcctcctgcctaggcgtcttgagtagctgggactacaggcacacactatcacgcccaatatttttgtcttaagtttctaaggagtcccaacactgcacagtagctgttcaatacattttgagtgaatgattaaaaacaagcttggtgttgattttattggtacaatttatatttacatatgtaatgtttatattatatgctttttatatatttatatgtgtgtatgtatataattggcaccaacgtagcattgctgtgcttaagtgcctgagatgtatctcaaatgaatagacctgaggagagaagcttgtgtcattagctctgaccctgcagcactaatcctggtttacccctttatttcactcaccctgagcacatcaattaatttggtgaaagagcttacactttaagtgtaagcttaacatctcactgaaatagttcattccaaagaaagagctaattctaacctctcacaagtgcttgagcatttgcataagtgaaatttcactgtgtgagtttcacccaacaccacctctgctccagctcctgctactctgctgctcatactgtggaactccacaggtggagtagaagatcatcagagagagttttatttgcagtaaatttggtgtgcaacaggccaagcaacgaggagtcaaggtgaggcagaagaacagcagagggaagtggaagttggataaagggtgaactgagtaggagcggaagcaggataaagaggtgggtgagcaagaagcaagataagcagaagttgagcagcgaaaacaaaagtgagatggagtagtgagtaaaagtttatggctggcaggatccagaacaaaccagtaaaaggcatgcatatgacagagaaaaagtagccttaaaatgaccccgtatgataatcagctcattaaagctaatgcatatggactgcatatcatgggtgtacttaaaattatgggatggaggtgatgcggaagcacacaggggccaagtaactaagcaacccacctatcaatcagaaggcacatgctgggtagagattaggcagccccaggaagaggagaaaaaagaaaaaaaaaaaaacatgtaaaaagacccaaagcccaaagttcaccaaactgacgctgatctcattttgcagaagtcagcccgttctcccctctctgagagtgttactgtgcttaataagtctcttgctgctttgctacatgtgtgtgtgtcacttc

SEQ ID NO: 2483 - DNA, 2300 bp, Homo sapien
tcgcctggtgggaaagcgacgtctcccatgctttcccaccacgcaggccttgtgtcccttttcctgctagtgtctgaccgccagcctgcgggggctgcggctgccgcggttctacgctgggtggaggctgcccgcccgctagccaagagccgcgctaggaggcaagagtcgggaagtcgtgtgcaggccgggaggagtcccaagctctgggtcagggctttttttgccaatagccaaattcaacgtgtaaaagacagagagctcacatctgtctgttcgtgagcttcagtcggaacaacaaggaaggccctcaagatccctaggagggtggcggaagggtctctagcggcgatatccgcgtcgggggcggtgagccaaggactgtcaggagcctgcgtgaacccagcccccgggtagcgcaaacaccaccgcagacaagcgccccgcgtgtagggaaatcgcaggggtcagagcagctggagtgtggtggactagcctcaaccagggagagctcccttcttgaccacggtctgtccctcgccaggtaagaggagacgagtgtcagtacagcctcctctcccctagccagacgctcagggtcaccaccttcccctctgctcgcccgtcgccattcttccaaccactcgctgccaaagattccaccaacagtcacccacaggacaacccaggcctcctttcagcagaggctcccgccccgcagccaccgcgccctctcacccccgcagttctgcccgccgcctctgcccagtctgtgcacttcacctccctcgctcccgctctcccctgagctttacagtggacacagggttcgtcccaacccttcttgggagtactgaatggaaaagggggagggtgcacaattgcttggtagagtgtagacagacattgcgggatttgactgtggtactatccctttgatgtcctagtgatttttacacctgccttctgcttagggcaccggccacagttttccattagtgcctactccacctgctgtcgttgttgggtaagcgaacatcgccctcctgtaccacccagtcaataaatgggcggtcctggaggacctcacccgccgctcacccccctcccaacctcgcggccatcgcctcctgtcgcctcttccgaaggcctaagaagcatgttagctgcgaactgaggtgaggaggctcagctgaccgcctgtgtcagctgacgacgtgtgccgcacacaaacgccacgacttggcttggcctctctctctcttagttatttgcagctcagcccaatcggcgcctctgggatggcggaggcggcaaagatggtgggcttcttgggtacacctccaggagagctgccatctctgcacggtggtgtacacctgagcgagacgctcagtcgctctctaaagccccttctgcgaatggtggacacggagataaataagagggtgtgtcatgagaggccgtccaccaggacttgccctccttcgccagggtttgcaccttgcagggagactcttctgcctctggctcttggagcaggccggctgacagcggagtaaagaaagattactgcgggtgggcagtcagtgcaaaacaactccctgaccggtaatcgaacccgggatgcggtggtgaaaggactgaatcacagccactacaccagcacgggggcacgggagagtctttctcaaccttattgccatttaagtgactgtttctgagtgcgctgggaggacttgggccttgtgggggtcgctggtcgctcctggagtcgtctcacaaggcctttccctccctcctttctccaaaagaggagcccgcaggcgacacacccagcactctgcgaggcccaccaaggccctgattcccgagtcctggagcgagttgcagcgccctggctgcagctgaccactgacctagagatgtgcctttgcgaagtggcagcgcatggagaaacagtagcgggtcgctggggccagagccgcccaccgggtagccaggagcaggccggagcgaggaggctcccggggtgagaccggggcaccctgaacatcataaaggactcagaccttggcattcccgacgtcataaaggactcacacggatgcggaaaccgagacgggctggatggaaaactctttccagacagactccggggccctcaactggtctccgaccttcccctgcaacctgcgacacctgccattttcccatcttaggctccagaagcagaatcaagtgggatgtcttggaagaaaaacaaacaaaaggcccactaggtggagtgaaatggatca

SEQ ID NO: 2484 - DNA, 2300 bp, Homo sapien
taggccctggtacccagatatttggtcaaagatgtctggatattgctgcaaaggtattttttagaagagattaacatttaaatcatagactgagtaaagcagcttagcctctgtgatggttaattttatgtgccataatgtgaatggacctcatccaatcagttgaaggtcataaggaaaaggctgatctccactgaggaagaggaaattctgccagcagactgcctttggactcaaactgcaacatcagctcttccctgagtctccagcctgcccacctaacctgcagattttggacttaccagcctccatgattgcatgagccaattctttatgaatgaatgaatgaatgaatgtcttcaacatctttgctttactctgatgctctcccctacccccacaattccagtgaagtgaggaaaactattttgccaagccaaaactttggatctttgccctaaaatcccagagtcttccctttaaatagagagtgaaagccctgatactgacaaggataagacaggggaaagataatttggtgggggggtgttgagggaggagaagaattcaccaactcccctcaaaatctctgatttcatatttactgttaatatccaatgtaaaaacagttggcttgatttaaatgtctttgttggtttcccaagccccatcaccaccaccaccaccggctcaccctgccaaggcctgagatgctgaagaccacttttcagcctgatgtaatttctaacagctgagatactaaacactgaaaaatggggtttataatggaaatgctgacagactattaactatagcagcactgctctaataagtggaatggcctatcttaatctctagttcataaatatgcaaatacaagactggagatttgctccaaaaaatgtctctataattttaactgacctttactgataccaaatgagcctgttgcttcagtttttgtacgctggatataaagtacaggagatccagacgcctgtcggcctaaagtatataaagtttaaactgccagctactaaactctgggctcagattccatttctcttcacattcacagtctttattgacattttcatttttttttccccagggggtgtaagccgagtcggggcggggcggggggaacaaaccttgttcatcccccttcccccacgacattacttccacattcacagcgcctgcccagccaaaattcatggatcgcctcaaggacaaacaggccatctacactgaattataaatttgagttttatccagttttctgcctttggaccaaatgggcagcaaatccagtgacttcatatttaataacctagatgtcatttgtactgtgtctttcagcacagagtaaagaattggatggctagcagttttgcagatttttccccctaattatttgaagctgttcagcctggtattcgaactattgatgcagagccaaattgccagcaggggagagatctgtccaacccaggagctaaatgagtcactgagagtcaatctgtttttcccttgctgctggggtttcctctggccctggcctctctgtctctctgctccagtcagacacagagctgcgggctcagccctcattggctcctatcgcctcccattcccctcctcagccctgcttgctgcagctgttgatggggtctgactggctggctgcggagattcagggcctcaatgacaccatagttgaggccttgctttgacagaaaatgaagacatctttgccttgttgcatttgcttctccagtaatacatcaggtatctggagagtaaggcccacaagcagagtgtgttgttggggtgcgatgccagttcatcaattcccgacgtccagttttcagagtgctcttctacttttcctaagtccaaatggagtccttggtgccagaatcctgcatgtggtcataaaataacaaaaataaaggtctgtggatgtgctggaggtagtggcagggcagaatgccaccaacataagccaggcttgctggagtggtcactcttcaagcattggagaaaaattcacagtgcttctaataacatatttttttttccagtagaaacattttatttctaacaacatttacttaaaaacaaaattcttgtattcttcatgtagggtcagtattcaattgcacaaaaatatgcagccaacttaagaactatatataagattaagacacctggtatttcatggtaaatgattaaattaactaacacagttatatcctgaactttgccattaggaatgacaattttgttcgatatgc

SEQ ID NO: 2485 - DNA, 2300 bp, Homo sapien
ccgggttcaagcgattctcctgcctcagcctcccgagtagctgggactacaggcatgcaccagcatgcccggctactttttctgtatttttagtagagacggggtttcaccatgttggtcaggctggtctcgaacacctgacctcaaatgatccaaccgcctcggcctcccaaagtgctgggattacaggcgtgagcctctgcgccaggctgtgatgatgttatcaattgagatccaaagaaataaatcatggaatccaaattccatgtgctaccaatatggcaaacaatactctattcactctctaaagccccagttccctgggaagtgatgaaatgataggaaacatcaaacacacccgaatctcctcaagccctccatttttctatctcatccagtcagtctacctggaggaattacttgtatttcatgctgacagctctgaaagccattagaaacattagaatggtaatcgctgctatcagctccatctgtcctttcttacagagtgaaaacaagttgttctcttcctgaaagtccttggaattgagagcaaggtcttcagggcagctgtgggttgtcgtttttttagccacgcaacattttgaagtactactgaggagtaaacaagtcgtggaatcattggctcttccacctacggagcagcagcggggcgtgaaagaggcacagcctcagccaccacaactataaagtatgggacaaaaattaagcagtcaactaaatgatgtccttaattgatccccaagactaggagaaagtattcaataagcaagtagttgctgcttacagccgtgccaaaagggaagaggatcacaactgtagagctgctagaagagcaaaaatgatactgatacatagaaattttcagaaaaagaatttcatttagccacctcagggcaaaggtgagaaactaccacctatggtcagcaactcgtgcaacctaccctctgaagttgtccaccagggattacaaactacaaattcagcaacgctatggaagagagccattcgtgctcggaggatcggggatggggggatgtctattgtccccatcctaaaaatgtggccaacagattagtcagaacaccaggaaagcaagaactccgcctctttatcctattttgaggcggcacttcaagaggaattatcatccaacacctctgtccccgataaatccctttaattcaaaaaaccatagcccggttcggcgcggtagaaaagaaccaagaaagggaagaggagcccagaaatcaacccgctgcagtactgacaccaactgcgggcatgggacgcttaccttggagtcagggaggctgaacacgctggggtcgtccgtactccccaccatgatcttgtgctccttccccggggcatggccgcctgcgccctcggagcgtgcagccttggcgccgtggcgctccccggacacccggtcgctggtggtgtttcccatggctgcagctcgtcggggaccacctaccgcggggaacgacaccgggctgggaacacctcagccgccgcgtcaggggcgccccccggccccgcccctgcgcctcgggacagggcaagggattccccgccccagggaagccgagccctggagccctctccctcctggcctgcgggaacgcctgcaaataccccggtgccctcactggccctagctcaggaaacccgctatcgggacctcccccgcgtccccgcgctcactgccaggggcgcccccactccagtcacctcgggcgatgcgctccctcctccaagggccactgatgtgatggctgttctgcagatcaggccaccaataaagttattgaaattgaagccgcacccctcgctggcgaccagcgattcctcctaaaatggctacaaggccggcggcgcggagtccgcccagtgcgcgttccctgcggcctgcagcctcggcgcccgggacccgccggcctctctagccgccgccgccgccgcctcgatggtgggcagtcgcacgcagcctccagcgccaggagggggcgccaggcagggcctgtcccgcctggggagactgcgcccgggataataggagcgcttggcctctgagactacccggcagaagggacgtccccaaatgacactcggaggccgcctccctgggctccggtgctcggtgccgggaggagcggcacggctttctaccccgcctcaggtgcgccagcacgttttctgggcagcatctgtgtgttaggcgaccggagaggtgggttccttatagggaataagaaaactgaaactgacttcca

SEQ ID NO: 2486 - DNA, 2300 bp, Homo sapien
tgttctgtgtctaaaacctgcaatattcaaaactgacttttattattaactgttgagtgacttacaaatgttgttagagcagagcagggcagaacagtgtcatggataatcttccaaagcagataattcaaaagtcatttccatttagctgtgcaaaaacagtttatttctctccgtcagttttccattggttaacgtactttgtttctgctaggctgatttgactactgcaaggaaatacataccaaggacatattatttggcatggtgaaaccaccttggggtcagaaaactgaatactacacaagtcaaggtttaatgtattatgtatcttcaagggccttgcttcagtgtcctatggtaaggaattgaggggtggagggagaaaagtagggataaccaaaaagcatgtactcagacataaagattttggaggggtgagcaagaagttgcagtaaaatcgtaccttttttttttcttcctgtaaactgtctttggtttatgagccaaagaatgagtttataagaggcagagcaaagaataggggagtagtgaatttgttgtacttaagtgggatgtcaacttcataatataaaaatgaacgtttcagcaaatagagctgctcactcagaaagggtggcctatgtaacttggggttccccatcattggccgtgtttaagcctaagtggcatatctggttagaaatggattacagtaaacagtattcctgtatccttcattccgcaaatgcaaaagcctactctgtataaggtacatgcagaatatgaaaaggtatcaaatctggatctgctctctgccagctgtcaaagcattgcttctcacacactttaatgtgatcttgttaaaatgcagattcagaaccctggggatggggcctgattctgcatttctaacaggctcccagttgacgccaacactgctggtctgtgtaacacagagtgataaacgtttctagaaggagacatgcaaatacttataatacaaaggtaagtatcttagggattccactaattttcataaaaaacctggatccctcccaaccctagggctgtctttgccctttttatacctttagtgttccttctgatgttttcgttgttgctatcttccttgaattttatttcttctgaggtttctcactgtgtatgctgtttcttagcctaggagagccttttcgttcttctcctaagactaacattttactaatttgtcaaggagctagagctcctaaacacgccatcttgaattcttccctgcgaccccagtcgggctgaaagctccttccttgtcgctccccactgaacagatttttcttggggcggggagagggggacggagtatcgctgagtcgccaggctggagtgcaatggcgcgatctcggctcaccgcaacctccgcctcccgggttcaagcgattcttctgcctcatcctcccaagtagctgggacttccggcgcgcgccaccacgcccagctaatttttgtatttttagtagagccggggtttcaccttgttggccaggatggtcttgatctcctgacttcgtgatctgctcgcctcagcctcccaaagtgctgggaatacaggcgtgagccactgcgcccggtcagaacagttttaacctccagcaatgaccactgcttccttctgcctgcagttggaagtcagtttcagttttcttattccctataaggaacccacctctccggtcgcctaacacacagatgctgcccagaaaacgtgctggcgcacctgaggcggggtagaaagccgtgccgctcctcccggcaccgagcaccggagcccagggaggcggcctccgagtgtcatttggggacgtcccttctgccgggtagtctcagaggccaagcgctcctattatcccgggcgcagtctccccaggcgggacaggccctgcctggcgccccctcctggcgctggaggctgcgtgcgactgcccaccatcgaggcggcggcggcggcggctagagaggccggcgggtcccgggcgccgaggctgcaggccgcagggaacgcgcactgggcggactccgcgccgccggccttgtagccattttaggaggaatcgctggtcgccagcgaggggtgcggcttcaatttcaataactttattggtggcctgatctgcagaacagccatcacatcagtggcccttggaggagggagcgcatcgcccgaggtgactggagtgggggcgcccctggcagtgagcgcggggacgcgggggaggtcccgatagcgggtttcctgagctagg

SEQ ID NO: 2487 - DNA, 2300 bp, Homo sapien
tgccaggacttgggggtggggggtggggagtgattgactacaaaagggcatgaagaaattttgaaggggaggtatggaacaggtctgtatcttgactgcagtggagttattgatacttaccaaactgtacaataaaaagtaaatttttattgtatgaaaattatgcctaaattaaaaactattaataaaatcagcattagcaaaatatatgagtttatacacaagagactactcaaccattgggtaaactaattatttttaaacaaataccattgattttaatctttttatagtttttatacaggcagagaaataatagtgattctgctcacctaaaggaagatagacccaattcaaaggtacagaattttccccaaatagtatcataatttttcctttcagattccaaaggatttgcatgtaaattctatcatgtgatcctcagaaccaccctatgagggtaagcagaacagatgatccatgatattccattttataaatgaggtgcaggttaaatatttagccagtatttcttgataagtatagtccatttatttcaacaaaccttgattgagggccccagtacttgttgagcttttgctgagccacccctgctctagaggagcacatgctctggaaatctctaaggaaactactacaactctaaatagatatggtgtatagtgatactgtgactaaatattcactgcaaatttcctctaaaattatagatatacattactggaataattagtatctcaacatcttcattaactatgaatctactatgtatatatcatcaccatgtgagtattaatttggtacaaataggctgccaactctaaaattatttgatgtagggcaagtacttttatctttttagccataaattttctcatctgtaaaatgagaggagtaggcatgtgatcattaaatcctgggttacggtaggaggcatcaatatgaaatgtttagcttaatatagatacagatgggtaaatatagaaatacttaaaaatgcatgtggattcatgtttaatacattagtatacacacatatatttccaagttctgtcctccgaaggcctagaagcaatgacaagcagaagcaaggagcacacccagcatccagttttttgtttctaatactgttctccaacaaagggaaccagagcccttgagaaaaatgcctaattctaggactggggcaggggatatacaagatgagtctgaaacatcttatagtgccagaaaataaacaagtgctttaaaaagacacaaaaaactgatggtatatcaaagtgacataggagccaactaaaagagatcccaatagctaaagctagaataattcaaaaaataagtaattcagcattggatttaacccaaattataaaataagatccatgagttcatactgatacaagtaaatgattgaagaaacaaataattgggagataattctcatattgaaaaattccaaaaaatttatgtactctaccctcgagaagatggaacataattctccaccccataagcatgagtcgagcctagtaaatgtttttcaaagagcgcagtatggaaaggaggaagaacactacctcaaccagctgatcaaggctaacatctctagtatgtcattagtggcatgtaaccttgatatgatatgatgagaatagcatttgatctttgatctgtttcctccccgaaactcattgccccagcctaatcatgaagaaatatcagacaatctcaaattaagtacaaaataaccagtactcttcagaactatcaaggccaccaaaaacaaggaaagtataagaaactgtcacagtctagaagagcctggtgatgactaaatgtaatgtgatatcctggatgggatcccaggacagaaaaagaacattaggttaaactaaatcaaacttgagtatgaaacttctttttttttaagtgcctaagtcctgaatgacaacaaaagactgaagaactgacaacgattagaggacactaaggagacttaacaactaaatgcaaaatgggaccctgaatctgatcctggaacacaaaaactaaattagtagaaaagtggtaaaataggtggtcgcgcgcccgaccgccgcagtcccagtcgagccgcgacccttccggctgcccccaccccacctcgccgccatgtgcctccgccgcccagcgctgttcccgggcgtggcgctgcttctcgccgcggcccgcctcgcggctgcctccgacgtgctaggactcagggacgacaacttggagagtcgcatctccgacac

SEQ ID NO: 2488 - DNA, 2300 bp, Homo sapien
gcctcatatgttatcttggaattagttgttcttatttctcactcataatattgctgtctagtaatagcatgagtaactgagttgagtctgtatattaatttggatgtatcaagttatttttcaatgaagaaattgacttacttgcaaattgtcagctaggcaagagagagaacatttgagtcaaggtttaaaacattgtataagtaattttaatacaacacaaaacatatttgctatattcaaaagcaattaattataagacacaattgaagtagggggacattaaaataaaattacattgttaactacattttaaaagtaattcttgcattatttgtaaaactgattcagtaggaggaaattaatactcagtttataaaagtattcatgttttcctttaggcatttcttctagcgcattcaaaattatccaatttacaagtaattcattttaagttaacttctagcatataaaatggttgtgttgaaacactgtcttcagaattttatttttaaaagatactattttagtataaattcacatttatagttgaatgcttttgtgaaagatattagtctttaaaatattttacaggctggccttgttggctcatgcctgtaatcccagcactttgggaggccaaggcaggtggatcacttgagcccaggagttcaagaccagcttgagcaacatagtgaaacctcatttctacaaaaaatacaaaaattaccaggtgtggtggcacacagctgtagtccctactcagaaggctgaggtgggagggtagattgagcccaggagatagaggctgcagtgagccatgattgcaccactgcactccagcccaagtgccagagtgagaccctgtttcaaaaaaaaaaaaaagttcgacagttccaaaacacattaatgttaattagagtctgctaagttgctataaatacaacaaaaaattcaatggcacaaacaaaatatcagttgcctctcatgaaaaagtccaagattagcaggtgcagattggaagagcaaaattgactcagggagtggtagaaggagagcaaggatccaaggcatgagccacaatccatgcctcttacaacccctcacatctgtcaaatagaacccttgtctggatgggcccttgttctaacccagtgcctgaaatcttgtatctgttatattggtggttctacatgactttatatttgaaaagttacattttagaagtggatattttgtatttttggttactaatataactgtgtgaaagcactattaaaaatacttttatttcgttaaaattacctgtttatgttttggtctcctccactaatctgtaagcccctctgagtaggaaacaatacattcctcactatactccagcactcagctcagtgcatggggatttaaaagtaaatttcttccagaagtgtagattcttagatccagattgtgaggaggggaggagagaggtataggtgagccgggggcggaagtgggggcaggatcatcttaaggaaggagaccactactactactgctgccctcctcccaccaccttgcctcgttcacaagacaggaggagagaaaaagcaaaaagttggaaaaaaaaaaaaaaaaagtaagataaatagccagacaaccttggcaccaccacccggccctaggagttaaaaaaagtaataataataacatcaacccctgacctaaactacttgtgttatctgtgaattcctgacactgtatgaaaaaagcattgtagcccccagtcacgtttcccactcttgtttgatgtatcacgaccctttcacgtggaccccttaaagttgtaagcctttaaaaaggccaagaatttctttttcggggagctcggctcttaagacgcgagtctgccgacgctcccggccgaataaaaacctcttccttttttaattcggtgtctgaggagttttgtctgtggctcatcctgctacaatctgtttgaacagatcacctgaaaggtaggtgttcatttaagcatttggagtagaactggctttggggttgttgacagttttcccttcactaggaagtgtttgtcactttaaggcaaaaaccaggaagttaaaagtggatgcagaagcgagcacagacggggctaggggtttcagagaaagtaattgagagtgctggcaacagcagctgaaatatagagaagttgtaggattaactttttcgcccaaagcagcttcagcccacgttttattcccatcgagggagggagaatgggtgccgctgagtgggcgggggagtggtccctg

SEQ ID NO: 2489 - DNA, 2300 bp, Homo sapien
gcatctgtctcctgctcatccctgggcaatggaatgtctcggtgtaaaacccgattgtatattccatttactgagataggagaaaaccaccttaggcctggaggtgggacatgtgggcagcaatactgctctttaaggcattgagatgtttatgtgtatgcacatcaaaagcacaggacttttttctttaccttgtttatgatgcagagacatttgttcacatgttttcatgctgaccgtctctccactattaccctattgtcctgccacatcccactctctgagaaatgcccgataatgatcaataaatactaagggaactgaggctggtgccagcgcaggtcctctgtatgctgagcgccggttccctgggcccacttttctttctctatactttgtctctgtgtctctttttttttcttaagtctctcattccacccgacgagaaatacccacaagtgtggaggggcaggccaccccttcactacctgatttttatttattgcttgtctcctccttttaaaatgtaagatccaggagataagtggcctctatcttcagtaccatagagtgcttggcacatagtatgtaattcagtcagtgtcaggcctctgagcccaagctaagccatcatatcccctgtgacctgcacgtacacatccagatggctggttcctgccttaactgatgacattccaccacaaaagaagtttaaatggcccgtctttgccttaagtaatgacattaccttgtgaaagtccttttcctggttcatcctggctcaaaaagctcccctaccgagcaccttgtgacccctcactcctgcccgccacagaacaaaccccctttgactgtaattttcctttacctacccaaatcttataaaacgaccccacccctatctcccttcgctgactcttttcggactcagcccacctgcacccaggtgaaataaacagctttattgctcacacaaagcctgtttggtggtctcttcacacggacgcgcatgaaagtcagtatttatgaatgactcaagacacaaaaatagcttcataaaacagtgctttgcttgagtttttatgaataaaccaatctgaagtcatcccttttctagctcagaacaaatttctcccttttattttagaggaagatgagaatggagggtacaaatttaacatgagtttactgaagaaggaagcaccaagattaacctaaatgagaatactattctaatgacattagccagagaataatatcgttcctgttccagtactgccaattaccattacaagtcccaatatcttcatttacaatgtggggacaattataacacctaattattggttattgtgaaggttaaataagaaaatatacttaaagcccttaggacaccacccagaacttcatcaataaatgcagctattttgttattatcatatttatattagtggtatactacatcataaatccactcaaagctgatgctgagtcacggtgacccctaactgaacacattgcctcaatctgctccccataatgcacttgagatacccactgccacaatgacgtctttggtgattttaatttactactattcagaggttcccaattttggcctacaggtcacaggcagtaagaaagggatttcagggactaaatcaatttatcactaggtaaaccgaacaagaacagtttgatcttatcgtgaatcactggagggcacggaacaagtcttacttctagaacccccagggcccagcggagtgtctgacacatgatagtcgatgttgattaaataataaatgaatgatgaacacatgccacctccttgacgggcagttcaggcaatcagacgtcctgtgcgtgatcagacgcctagcgcttcagaagcacgactggtgagaactgggcagcccttccacgctccgcactgcaagaactgcctgtccggaagggtgactgcaccagctccgctccggatatcttggcaggacgcgccctctggcggcgcctcgctcataggtgggccccagcgcgcagtcgcccgcccccgcgcgttgggaagttgggagggaggtgcgcgcttggccgcgcggggcggggcctctaccggcccgatggagcgcgcgggcgctactagccgcgggggccaagcgcctggcttcttactgcggcttcatactgagggccgagccgaggcggcgcgggtgcaggagcaggacttacggcagtgggggctgacaggtgagcgggctccgggcggacttcggccaggcgggccaacctattgggactgc

SEQ ID NO: 2490 - DNA, 2300 bp, Homo sapien
gctaaaacaaagctcagtttcacaaatgtccctgggatccaggctaactggctcttgcaccgggaaagggccttccctgtacagtcttctctgcctcagtcattgcagttcccctactgactttattcagggccagcaaatgctacttgtcctttctttggatgttcacatagctctgctttaagctctctaaaaagatatcacctccaaatttgttttgctaaaattttgtttagactttttgcatctatgttcatgaaagacattggtctgtaattttcttgtagtgtcattatctaattttagtattggggtaaagctggccttgtagaatgagttgagaagtatgcccttctcttccattttctggaagagtttatgtagaattgctgttaatttcttccttaaattcttgctagaattcactagtaactccacacttgttttgtagacacatctggtttatagtaataaaagataaactttctctaaattgcatcctcagggaaagctagactgaatggttttaattcaataagccacttattaaagaatggttcctggcacagcttgggctgagaagccatagataatttaaaaagaaaattatttctgttataaaaactacctaccaccctgtaatcaagcactctaaccataaccatgagttgcaatgcgtgttttgcatgattgaacttttgtttttgagacagggtcttgctctgtcacccaggctggaatgcagtggcatgatcttggctcactgcaacctctgcctcccaggctcaaggaatcctcagtctcctgagtagctgggactacaggcgcatgccaccatgcacagcttatttttaaatttttttgtagagatgaggtctcactatgttgcccaggctggccttgaacttatgggctcaagtgatcctcctgccttggcctcccaaagtgctgggattacaggcgtgagccactgcacccagcccatggttgaaattatagtgcgtatatagtttgtattttgttaatctaacagtgtcactgtaattttttacttcgttatattcttcacagtcattatcaacattgcataatattccatcaagagaatttataatttacttaaatgttctacagacgagaaatggtgattcctcccctttttgtgctgtttaatcttgataggaacatctttgtgcttgtagctttctcaggattttgaattatatccttaggacagatttttctcagaaatagctcagcatttgaagatggagtctcttgacacatttttgttttaaaataggttattttctctgtatattacagcaacattcaagtcataagtgtgtactagaatcttctgaagtatgcccatttgcctttaccaatatttccattttatacccttccttaagcttaggatcgtgtattgtctgttttccccgttagaatgtgtcctccaggagggctgggcgttttgtcggttctgttcactgttgtataactggagcataggacagtgcctagcaaatagaagacaccctgtaaatacatatggaagaaaggaagacagtaggggaaggtgggaggaagtgagggaggaaggaaagcatcctccctcactcgggaaagcctggcaggcagcagagggccaccatgcgattggccgtttttacagtcatatcttggcacttcttgcttaatgttttcagagtatcgcagatcttggccatcagttggattttcattgatttctattgtctttcctgactttttctttacagtagaggttcaattacctaaacattgagcctcattgcttgttaactactgaagtaattgagttccataaatttccgtgcaagtatattgaggcttacatgatttcgctctacgaatggattactcccctgatatgcggaagttcgtacaatatttctttgtaaaacaagtcttaaacaagagtgtgtgttccctacagggttgtgggaacttcatggttgtttctcatggggaaatgtgatcaaaactgcctttctttttctgtgttccagactattgctctcttcatttatttggcaggaagattaaatgatgaagggccatttctgattctttgtcccttgtctgttttgagcaactggaaagaagaaatgcagaggtacagagtagatgtagctgaaattttattgtttatcttgattaagattttttttctggatgatgtataaaatatgataaaacaacctattgtcgtaattagtaagtttattccagaaaactttgagctgatagagtgt

SEQ ID NO: 2491 - DNA, 2300 bp, Homo sapien
cttgatggagtacatgcaggaacatgaaagagatgtgtgtcctctattaaagacagattgacatttttctaaaaagagagttcagtcttatttagaaagctttctaaatgcctgctgctataagggtatatgaaagaagtgttagatataatttttgattataaggagattatttcacctgtgtttgttttatctccctaataaaattaataacataagattcatttggcctcactcttccaagatcatagactgcacatggagtctcagccattttctcatgtgatcagttgcctcagggttagtctcaggagaaactgaaagaatcaggcagtgcatcatcactgccgggaaaacagttttatttatgctttaatgatttcatcatcctcatattcagagagcagcattatgtttgaaatgtctaaaattaggaaaaaagagatctctgcttttcagttaatctccttggaggactcagagtagatctgggagctgaagcagtcctggacattagtcttctccaaacactgttgtgtttgctgtcacagttttgttgtagttttgcagtattttcatttatttaacaggtttccttccaaatttcaaatatttctgtgatgagtcatgttgccaccagatggcagtgatagctcatgaatatgttcctattcatggatgtgggtgtggcttatttataaaaatctcacccctcggtgaagagctgcacttagacaacatgaattcaagaagataattttatggaacacattttaaaatgaaataagcacctgaaaagtattatagtatagtggataaaagcacgggctctggaccaagactgcaagggaatgaatcctggctctttcaccttctaggcttgcaacttcagagaagtcccttaccctccctttcaacatctataaagtggggaaaatcgtagcaactactcaacttcccgacagggttgttgtgagggttaaaggagttaatatagagagagtgcttagaataatgcctggcaagtagtaagcacagcgtaagtgtcattatcattattattaggtataatttagcatctctcagtaatcggtcatgattacctccttgttccaacttcaacttgatacgaagactttaattagaatattcctgcctgatttgtctggagatccagcttatggtcagtagtccttcttaaaagttagtccttaattcaggtttatggaacaagccctttcaggcttgcttgtttcagcaaccagctctaacgaccctggcaagagggagtctgttttgtacttgttttcacattaatcaaagagaaggctgcaatgtaccttcacggttctcttaattaattcctgtaactcaaggtacctcctcagctctcttcctgcagcactgaagaaagaccagcaagagtgttctgagcaagcctcagaacactcagagtaaatgacaagagtgttcttgtcttgccgttggttttgttactttctttttgattaatgtggaaaccagtacaaaaaagactcactggagttttctctaatcagagggaggaggtttcccactctgctcaggagtataatatcatccactcttctcattaactttttatcagagatcttgctacctagttgtaacttgcaagcgacattcggcactcttctcttgacagtgcgcattgcagacctctcatatttagatctgttttctgaaagagcatgtgtccttttcctcagactactctaatcaaaatctaatcaaggtttttaagcagaagagataaagtggctccatggcactgacttaagtatccaccttggccacttgcccctgctccgctcattctgttccattcagtaataaaaattttcccatcaggcaataagaggtcaggtagcacttctcaccgctggaacaaggctttggagttaggggtgtgggtccatttgaaggatgaagccaattgttttgactgatttcagtttatcagtctgacccactctagccttgtgcttattttctagctcctcgtctttgtgctgctgattacattcctttttgcattgttttcaggtggagttggcatgaacttaacagcagcagatactgtgatttttgttgacagtgactttaatcctcagaatgacttgcaagcagctgccagggctcatcgcattggccaaaacaagtaagtgatttttttctgctttcttggcttgcccagcagcagttctgggttgtgaaaaaggtgaagaatatagtcctggtgacagtcccacactgggagc

SEQ ID NO: 2492 - DNA, 2300 bp, Homo sapien
ggggtatcttgtgatgtgggctgctggacacatcactgtgaaagatgtagacatacctccaccccatggggccacaaacgagtgggaacatggactgctggctgagagcgactctgttggacttcttgcccagctcatggttatcggaaagttactttctgactctaatgtctgatttatctcttccccatgcagatgctatgagttatttgtggttgccaaaagcaaaggtgataacccagagcccttgtctaaaaagaaagcaggggatttttgtttgtttttgttttttgggttttttttttttttttttttttttgagacagagtctcgttctgttgccaggctggagtgcagtggcgcgatctcagctcactgcaacctctgcctcccgggttcaagcaattctcctgcctcagcctcctgagtagctgggactacaggcgcgcaccaccacgcctagctaatttttgcatttttagtagagacggggtttcaccatgttggccagaatggtcttgatctcctgaccttgtgatccgtccacctcggcctcctaaagtgctgggattacaggcatgagccactgcgcctgggggatttttttttttttttaaataccaagaaaccaaaagtaaaagatgtggttctgatttggtaaatctaagcagtaggtatggagttctgaagtcctgaaagaaggaaacaggttttttatcctgcagggaggacacagtagaaacaggcaggcagatgcaggtgtagtgaacacttattggatactgtgtgctgagtgttgtctgaggtgctcttttccagttgtttcagtaaataagaataacagcaggatgagatagacactatctttatccccatcttaagtaatttgcccaaggttattcagatttaggattccaatccaagcactctctaacctccgagcacatgcccttaattactgtaatatacagcttctcataaaaacacatgtaattttcttaatgactaagacacattgcaagtgagcaataacaagggagagccaggaggtgagcataagtacaagggggtgaaagggagggtcccagtatggaccaattcttatcataaatagttggcttcctactattcttggtaccagctgccaaagccagtcatcctggttatgtgtatggagggtaaatataatatatctaggtacattcatgcttaagtgagctgtctattgtttcttcaagctgttacagaataccttaacatttccaagttactcacaaaatagacgatctggagataacccagtctaaaagggcaagatgagaacaagggcccaaggtttgaatccaccttgggtcaggatctcagaattagtgcttacggaggtgcaaagttggaagtagcaagtgaaagccaggaaaaattatctgtgctttctgcatggttcctacagccatagggaataggctgagagtactccagagagggacgagagaagagaagcaggatagtgcaatgccagaggaacatccagaaaaattcaaactgagaaaaggccttcgggtctggtggtcagaagttgttactgatctttgccaaggtggtttcgatagaccactgtgttaggaaaacaaattgccaaagaaaaggagtcagttcatgatagaggtaaagttcctagtgtagccttccctttctaaggagtctggcagtggagaggttggaaagtagctaacagggtctctgatctcaagtggctgctgggaatgcttatgaaaaagtcagtgagaggtgctgtagaaaatgcaggaagttactattattcttcaaaaaaattggaggcttatacattttttttgttttgtttttatgcagaattgtcaaagtcaatacctctgataatcatttatcacctctctgcttacccatcatccaactattaaatggccctggctgttactatctatgatggggagagcagaaaggctgcctgttcattagagaaggactgtgcctggtgtcgttaatccacttagccaatcactgatatcctaatgtttcttttcatgagaatttgctggacttttttgtttcctctattcaagttgagtgagatactcaaatttggtttggataaactgctggcctctgaggggagcaccatggatgaaatagacctggagtccatactgggagaaacaaaagatggccagtgggtctctgatgccttgcctgcagcagaaggagggagcagagatcaagaggaaggaagtaagttggaggttagagcagagcaaatggca

SEQ ID NO: 2493 - DNA, 2300 bp, Homo sapien
gaagaaaccctgtctctcctaaaaatacaaagttagccgggcatggtggtgcatgcctgtaatcccagctactggggaggctgaggcaggagaattgtttgaacccgggaggctgaggttgcagtgagctgagatgacccattgcactccagcctgggcaacaagagcgaaactccgtctcaaaaaaaaaaaactaaaaaaaaaaaaatcggccgggcgtggtggctcacgcctgtaatcccagcactttgggaggctgaggcaggcagatcacaaggtcaggagattgagaccatcctggctaacatggtgaaaccccatctctacaaaaaatacaaaaaaagttagctgggcgtggtggcggtcgcctgtagtcccagctactcgggaggctgtggcaggagaatggcatgaacctgggaggcagagcttgcagtgagccgagatcgcgccactgcactccagtctgggcgacagagcaagactccatcaaaaaaaaaagaaaaaaaaatcaaattttctcctaattgacagaaaccttctccccataagtcccactcaatttgagaagatgtgtacattttgaccggtaaccagtcagaccttaaacaactaattaagttgtagaaatattaatggccgtgctcatgtttgtctagaacttaatgaagcacatgaggtgagaaactagaactaaacgaagcacatgaggtgagaaactagagttacccaagtttggaaatcttataaagtggttagtgttcaggaaaggtggaagaaaattgagaggctttaaaaaaaatcaagattgggaatattagagaatgtaatccactagaaaaatcattcagctgggaataaatgagaaatagatgaatgaaaaaattctctcatttctttctttggcatgtattgagtatgatgtggtaggacatgttctagcagctggggtatgtagtagacccctgttgtctggtggagcacgcatcccccagttactaaggagtcacagctgcacccttctctggagccctgcagcagggaagcactccccccagctatgcctgggagattatgctgccttcatcccacacacacacactctaggagcagcttgcagccaatgcccagttgttggggatgggggtaaaagcacagtccccttgtctcaagtgggctgactctgtgatgttattcaagctccaaagtgccccctggaatcaggctgaggctagacccacagcttgactgatctccccagccctatccagtttccctcactcatatgaatttcatcctcaataaatcacttgagtaagaagaattctcacctcagggtctgcttctaaggaacccaagttaagacaatgggcaatgctgaataaatcagaagtagtctccctctgggaacttgtactgggggaggatacagacaaatacacaagcatttataatgtagagtcacaatggtagcttcagaagattcatggtgctctgggaacaggaatggtcacagagtgtttctttagagttgaacatttctgagctgagaactgaagtataactaggagctggctgggtaaagaggtgggggaaataaagaatttctcaagcagaggaaaaagaagatatggaggacgaatggaagatactgcaatatatgccccccaaatcataaacggttcagtatgactgaagccaagggtgacagtagcaagaaaagacaccagatacagattatgaagggcatagtgagatattaacacatttctattgtatccctgggcaaaggaaaaataatgaagaattttaagtggaggacacatgataaggagaggtgaagccagctggacttcctgtgtcgagtgggggacttggagaaattttctgtctagctagaagattgtaaacacaccaatcagcactctgtaaaaatggaccaatcagcactctgtaaaatggaccaatcagctctctgtaaaatggaccaatcatcactctgtaaaatggaccaatcagctctctgtaaaatggaccaatcagcaggatgtgggcggggcaaataagggtataaaagctggccacgcggagcacccagccagctgctgcaacccgctgccctctggtgtcctgctgtgggagctttgttctttcactctcgtaataagtcttgctgctgctcactctttgggtccgcactgtctctgtgagctgtaacactcaccgcgaggttctgtgccttcgttctttaagtcagggagaccacgaacccaccgggaggaacaaacaactgtgatgcg

SEQ ID NO: 2494 - DNA, 2300 bp, Homo sapien
agaagttcccctggctcaaaatgaaaggatccaaacccaaccctggggtacagaaaaaacagtgtacttatatggctgactggacttgaagtgccatggagtacctggactactccagtgagaaggcataatatggcgggtaaacgctggggctttagaatcacacaggcctcagttggatttcagctctacctctgccttgctgtgtgacctcagacaagttgcttaacctctctgtgcctcgtttttctatcatctgtaaatggaaatgatcataacaaaaattacttcatgatacaaatgagtgggaaaatgctaagaatcaagtaaatacttaaaaaaaggttattattattattattatattaccacatcatcatcattaatgggagtcgggacagacagttcagggatcagggataatggaggagcaaattaagggggaaaataacaggaacaagtctgtgtctttgatgtggtgagttttaggtagtgacacctcatttagctggtgttaagtatgaaagaagtcataatttattctttactgcatacctatgaaggaatgagtgatgtgtgttctcataatttccattttgtaaaggaagattctgaggaatagagtctaaacaatcttcatgaaaaagtacagaactgattcagcagcagttaggagctaagcttccattcagatcctgttgtatagggataactcttctggcctaggcagaggagaccttgttaggtctgtgagtccacagtatctaaaaatatgaatgtcatataatcatcctgtcattcttcttcctgatctcaattggccctcctgatttcatgccatctgcaaatttgcacatcctttgtgctcctttttgctcacattttatgccttcttttaccatctcatttactctgcatgtttcaatctttctgggcttccatttttcttctttttttaatgcagtgttgtttctctctctctctctctctctctctctctctctctctctccactcctttacagcccccacctcctccctccacaccaatcaaattcctgcttgtttcttgccatattcattatcctacctcattcccctcttattcctagaaaacagcacactcaccctcccctcctccaactctcaggcccaccctccataaattccagcagcctggcaatcagtaactttagcatcacacttcacagctctcctagtttacactacttgttactactctccttgctactgctctctagggtttctgctaaaataaaaaataaaaaaaaataaaaaaagcttcactttaaaaatatcttgggtacaagttgaacctacagttaagtttactcacacatttacacatttcatgattttattttaactagtagctcaagtccatgctcaattatgcagtgaaagaaggctagatccttaggaaacaaatttttctctattgtaaagaagaaaaatcacctaaccactcaacagaaaccccagtcctggggccactcaccctcttatctccctactcccccaatctccagctaatgggactttgctttttcctttgtcgggtcatttatttcacttttcctggcgctgagatggcctgagtctgtgtatgtgtgcacacgtgtgtggccactgcttttcttccaaaggactcacctctcttctgccattttactaggacacaggaggcggctctctgctctcgctctccctctctttttctccctgcccccaactcagcctgggctttttcctgtctcttaactccaccagtgcagcagcaactagctgagctgcttgagagagagagagagagagacagagagagagagagagagagagagagagagagtgtgtgtgtgtgtgtgtgtgtgtgtgtgtgtgtgtgtgtgtgcctgcgtgcgcagctaggccaagcctgcgagcctgcctgtcactggagagttttagtttgcattcagaagaaaggaggaggggagacaagaggggaggaggaaaaggtggaggggggaggagtgggggggcgcagagaagggagggagaatgtcttgtttgtggcttgtcagcaattgcttgagacaagcttccatgtgtgaaagctacttggcatgaatgcctgggccgtaccaagtgtcaccgcagcaagagggggagtcagaagaaaaacagatcagaccagagcagacaataggcccctaaagtgttccccctaagttgctttgatgttgtcctggtgtcttgataccaggaggccagggattgcaggaaaagggtcttttttgt

SEQ ID NO: 2495 - DNA, 2300 bp, Homo sapien
tggagagagagatccttctttctcttcttataaagccatcaatcctactggattaggacctcacatttatatcttcacttaaccaaaattgctactggaaaggggtcctgatccagactccaagagagagttcttggacctcgggcaagaaagaatttggggcgagtccataaagtgaaagcaagtttattagagaaaaagagaaacaaaagaatggctactccatagacagagcaggggcatgggctgctcaactgaaaatacttatggttatttcttaattatatgccaaacaaggggtggattattcatgaattttctgggaaaggagtgggatttcctggaactgagggttcctccccactttaggccatatagggtaactgctggccccgacattcgtaaattgtcatagtgctgatgggagtgtcttttagcatgctaatgcattataattaacgtaaaatgagcagtgagtttgaccataggtcacttccatcaacatcttgcatttggttggtgttggccagcttctttaccacttcctgttttatcagcagggtctttttgactggtttcttgtgataccagtcctgctgacctcccccctcatcctgtgactgagaatgcctaacctcctgggaatgcagcccagtaggtctcagcctcattttacccagccgctattcaagatggagtcactatggttcaaatgcctctgacagaatcaccttctaaaagtcctatgtccaaatgcagtcacttagtgggtacgaatttggcgggggacacaactgagtccatagcaaacagtattcgatttttaatcacatcagcacacacaataagactctgaaaagtgagtcccttggctgggctagggagaaaattgtgacaatatgtagtgttccaaaatgaccctcctccctgcatcagggaggggagcactcagaaccttccagcttggtgaacagaatttgttctcaggccaggagccatgctctgtaagtatgttgtctttacatctggcccagtttgatctttggagatagacacatagtgggtcccagattgtgtcctgttgcaaagatctggaaacacaggcttgggatacctgtatatcaacagaaaccagactagcaggtggtaaggctggcattgttctgtgttcttaggttttttttttgtttttttttttgagacggagtcttgcgctgttgcccaagctggagtcgtgtggcgcgatctcggctcactgcaagctccgcctcccgggttcacgccattctcctgcctcagcctcctgagtagctgggactacaggtgcccgccaccacgcctggctaatttttttttttttttttttttttgtatttttagtagagacgtggtttcaccgtgttagccaggatggtctcgatctcctgacctcatgatctacccgcctcggcctcccaaagtgctgggattacaggcgtgagccatggcgcctcttaggttcttaatcactgggacacccacaggcaaggcctggctttttccacaagaagtattctggatggaagtaaacacatcagtgacctgaaagttctacatgattacaatgacttaagcttgagaatttttttaaaaacagagaagggagtagtaaatgactaaatataaagcacctagtgctgtgtttcgcaaatggcaatcactcggcaggtgtctcagctcctcgctgcagcaaccaggcttccaggactggaaggaagtcttctacattcaaaactagactcaaactactcccctccaccacccagttctactcctgcgctcgcgatcctcctgcctggcaaactccatggcccgacagattcactaccactccactgccggaccaggcacgtccgtgggccatccacgcctggaaaacggctggctgggccggaggggcgaggcccgcaggcgaggggggcgggtacaagccacttcttgggagccgcggtacgcgcagccttgtgggagttgtagtttccgcagctctgagtctccaggcgaggtgtcaccacaggactcgttttcccgtgctcctgtgcgcgggtccacttgggacgggtccctgagtaggtgaggaggtgggtaggagcttgcttatagaaaagtggaatcgagtagtccttgctggtggagccgctgccgccagggaactcagggccggctcctgttccttcaagagtgctggaggccaaacttgaaatacaagtttaatgttcctcgtcgggcaaaagataaggatccgatctcccccggcccgg

SEQ ID NO: 2496 - DNA, 2300 bp, Homo sapien
gagcgtcagcaggaagtcatacatgaaaaacccttcaccctatttcctctgcctgggcccaggaggtctgcctcacccctatacctcctcagatagtttctctttttccctcccaataagatatccttcctaatactgcctttctggttttccaaggtgttcctttcttgtatctgtgctttacctcttccaggtggaattccttggacagcagtgaaggagtcagcagtcaagcctcttggcagactagaccaaagggtcacattctttgcctggaactatttttatacttccttggggacttgcaaggaatgagtgacagagtgagaagatcaagggagaagtcttcagggactgagtgtggaaaacttgccccaaatcctggaagaatatgacatttgtttctttttttttctatttccattttcctctcatttcctccccttctactcttgctcccatttcttttctcctttgtaatgcacctttctctactttctgctttctctttttccctccttcttctactctcatccttccccactgctcttgttgctagtaatggctaccttttattcagttcttatttgctgaacactgtgttaagtgctttgcacgcatcatctcatagcactctatgagttaatagtatgtccattttgcaggtgaggaaagtggaacacagattgagtcatttatctaagcccagcagatggtaatagaaatttgtcaaacctcagtaagctaactcctgcatctgtcttttcttaaccctacatggtctttttctccatttccaactctcccttgtccttcccttttcttctcttctttttattcctccccttctctccctccctctttttctcagacatttaccatagttcagtcactgcacgtgtgtggctgaccctgaaggtgctgaacactgtacatgtgcccagaagagaggacagacaattcaaactcttatctaatcagccattttccttttgagcacatgctccacaattttccacatttggaggctgaaagagggggcgcttcgccacctaaggaaatggggcagatgtctgatcacaaatgacaggaaaggcctcaagacctggatgggtctttgatatagagaggagcagagataagatgctttccgctcactcaggaactccctcattcccagggacactgtatactctcaagtttggggacctggggtctgagagaatacagggccaggaggttggtccctgtcaaggcaacaatcaactcaagagctgaggaagcctggactatgaaatgcaccaccctgaccccatctttccccataagcaagaagaatgttcagacagaaaccaggagcacgttggcagcaaagatatgacggtcaaagtttgaatttgacaaacctctaaggacccacccaaatctgaggtttatgattctaagaaaggaatatttatgctccattccctccgagacgtttgtcatcctgttggttaggaatggttagaggcttaaactgtaagaacattcgttattcactaagtaagaattctggaggtagggagcctcaagagttgcttcagaggcctcagggcactggttgacatttctgagattctctggacagctttagacatcttggttcatacaactctgtccacaggcaggaagcggtggggctaagtgaggctcactcctattcaccgggggatgggagcactgtgagtagtctccctcctgttcaccaggggatgggagcactgtgagtgaggttccctcttgttcacagggggatgggagcactgtgagtgaggctctctccatttactggggggtagaaaaaccttttctggagcattccctctactttagattctccccatacctcacctaccagaactaactgcagaggagattaagaaagtgatacctggctttttcaccctgccaatgggaggcaggcaagaaacagggaattggttttctattgggtaggaaacaacagtgcctgtcagcccctccttcattcactcaactaagatgtattaaacacctactctgggccaggctctggtgatacagaagaaaagacagtctccattttcaaacagtccctcctgggagaacacagacaggcagaggattacaacacaaggcagcaagcactgggagacgagtaagtgtcccgggggccatcacaggagctgaagaggctcagcttgagggaagagggagggctggaggaggcaatgactgggttaagttttgaaaggtaaatgggattcagctaggggtga

SEQ ID NO: 2497 - DNA, 2300 bp, Homo sapien
caagcacgaagggaaaatttaccttgtataccctgctctccctccagggtcatgagtgtgtctgtatctgggcagctcttcccttctgcacattcagaggaaaacggcattttcctgtaatctccaggcctgcccgagatcatctctcctctggcagcccagtgatctaggagtgtacattccactaaacctttcccactttcagactatctcccagctgagactttatgggttctttaactggctacctcctggatggagataataaggtgttcctaggtgtcccctgctcttgtagagaggctgggatgtaggggcaaagtcacagtgtgaaactcatctctgttttggagaagcagggcttgctattggtttcacatgctaaattccatcacaggactttggtacagccatggcaagtacaggcagggaggaggttgtgtattgtattgtattgcattgcattgcattgcattgcattgcattgcattgcattgcattgcattgcattgcattgcattgtattgtattgtattgcattgtattgtattgtattgtattattattttgcagccacatctacagtacctccatgttcccaaccattctatgtgcttttcacatactcgttagtcctcatgacagccctgtgaagtagataatattcccaatttagagttgaggaaactgagatgcatagaggttaacttgcccaatgtcacacagctagtaagtggcggagccgggattcaaacccagtcaggctggccccagaatctgctctgatgctgcataaaagtggggtaaactctggccaaggaatcaagaatcctacatttcctttcaccagggctgttgcctcccttgaaactggaaattcagccccttgctcttttccctcttgctgatcctaagctcattcacccatgaaaaatatagcccattaaggaaacatctttgcagaatcttggaatgcttgtgaccggtgctttgcgggaaaggcatgtttcaggtgatgatgtggagcaaagggaccattctggcttcctgccctgcctctgccacatactactgtatatgacattgacaagtggccttttctctgggcctcagtttccctggctgttccagatgatcactgaaattttctttagttctcataatctgtgggctcttagtcattgttttgtctgatttcagtccactcatagtaacctctgttgttgacacttacctcattccaactgggtccacggctaagtgtttaagttgaggagtctgggggagaagttggagaatgggagggtttgagggaagagatacccccacagtttctgaatttggtcacctgtggcatgtgatctaacaagagccaaccttactttcatcagttcaattccagttgggagacctgtttgctttcacggaaggagcaataagataaatgttggcattggtgaaaacttctaatcctgattctaccacttactttacaaactgggtcgccataatcatgttacttaatttctgtgaacctcagtttcctcaaatgtaaaatgcagaaaaggtctaccttatagaattggaaaatagaatgattaagataaaaataggcaatatatatatatatatatatatatgaagtctctagcccagtgcctgatgcgtagaaggtgctcgcctctctttagaggagaaggggagagagtatgattctgggagtgaggaatgccctacacttttggagctgggaggttagcatttctttcctttcaggttagtcctggtgcctattctgggtgctggatggttgtgacttgtgagaccgtgttttcctgtgctggcttatgcttagttcattggtgtgggcatagtggaaatcccaaaaaaggcttgttatgtgagtgaacaccctcttttttctgatgatgggaaaaggatgggaagagggatctcttgggcagtgccaattttcctgctgatgctccaggaaagccatggcctgggaagtctgaggcgacgcagcagaggggtgggcaggaagagacttagggaggtggtgcaccagcggcccgggggagaggcaatgtggaggactgctgtgaggacaaggacaacaggcagacagacagggggagggctgcagggaggagggggctctgcctccttgggggccagggaaggggagcacagtgagctgaggctacgaggaggtggagggaagaagacttttagagcaaagactctaagagcacaaaagagagagaggggagggagggattcagaggggaaaaggggtg

SEQ ID NO: 2498 - DNA, 2300 bp, Homo sapien
atgattggattttttcccctcatcctctgacttcttaccttattgatattgcagggatcagccttgaccatctatttttaactgaaggatttgctatagggcattgtcccagtcagtgtgggccctcaaacttgggagttcaaaagaaatcagacatctaaagtaaacaaggttttgggctagtgaccattttatttaaaatggaattggggactcacacaacattggtaccatcctccttcaaactgcccccatcaaaatgcaatatgtccatgacaccagaaaggacaggaagggggggtggggtggtgaagccagtgcttagattttttttgtctagtttgccctccaagttgtcttcaatttagtaatcatacattgcagatttcataaaacaatctaagtttcaactatttttgctccattgttttcacgaataaacttgtaggataaaatgcccctatttttggtttggaaatgtagtcaaaataaccattttttatactaccaatagtcagtcccagatgatgggacgggagtgggcctcagagagcatatgtccatgccctccaagcatcattcctcattaagccacattagaatttaatccaagagcctcctggtgagcaaaaccatcatatccccatttaacagatgaaggcactaaagtctaaaaatgttagctgacattgattgaacttccgctactcaaaagtatatgtaattataagtgaaacgtggtgagaaaggctattactttgacaaatggcaccagaattctttggagtgttaaggctcctttcaaagagggagaccaccctgctgaaggtttgtttgtgtttcttttttattgttttgatctttttagaaagctctttccttttatgtttagttgacacataataattgtacgtatttgtgatacacagtgatatttcaatacatgtatacaatgtgtaatgatcaaatcaggataattagcatattcagcatctcaaacatttatcatttctttctgttgggaacaatcaaaatcctctcctctagctttttgagactatacaataaaatagttaacggccaggcatggtcgctcatgcttgtaatcccagcatttggggaggccaaggcgggcagatcgcctgaggtcaggagtctgaggccagcctggccaacatggtgaaaccccgtctctactaaaaatagaaaaaaaaaaattagctgggcgtggttgtgggtgtctgttatcccagctactcaggaggctgaggcaggagaataacttgaacctgagaggcagaggttgcagtgagctaagatcgtgacattgcactccagcctgggtggcagagcgagactctgtctcacacacacacaaaaatataaaaattaaaataattaattaattaatgttaaccatattcaccctacagcactgcagaccaccagaacccattccccctatctagctgtgcttttgtatctattagcaacatgctccccatccttccttccgccactacacttcccagcctctaatatccacaattctgctgaaggctttgagagacaagagcaaaccaccaataaaaaatgaaatatggtcctttggaaaggaccaaccactcttggtgtgactcagggcagagggattcacacaactgaccacttactgtccctacatcattaagattctcccagctgatgataaggccttgggaaaatgcccctaggctcatgcgctctggagagacgccaaaggtttactgatgtacaggcccagtctgctgctaaaagaaactttgggaggcacagaagccccagctaagctttcacacatcagctttccccatcctcctcccctcagtgcccaacacagctctcccattctctcactcccattgtttcccaaacatccctcccttcataaaagctgtctggctgggagcttaaaatattgctggacagtaaaacctacccatcagggccaatccagtcatatctgctcagtcgtgcagcacagtaggggcggggtagagaagtgggaggtgggcttttaggcagcaaaggaaagagacgaaagttgccattttgctgctgagcgccaagagagaaagagcacatatttctccgtgggacactccttgtattggcaagttttccttgggtgatattagtttgtaaccttccccccaattgttctttctcagcctaatctaagggccatatataggcttctccaaaaggaaaaaggttgccaataagattcagtcttgggctgggatggctagacttacact

SEQ ID NO: 2499 - DNA, 2300 bp, Homo sapien
tgaacatgacatattttgaaaagctcccttggaaaaagcacaaactggggactcagagcccagatggtgtgactgtccatggaggcagaaccaaaagatcccactattctaagaggatggcagcagctagagtggatcgggagaatattaccagcggtagagatgggaggacaagccattttagtgtcagagtccaccaccagcagaagagacttgctttgaaaggagagtcaattggatactaaatgctgtgcgaaggtttctaaagacattcctcaatcaaaatcaggggataaagcagtcgcttgaatcacctaggcctgtcctttacctggacacaagtggtacagtagggagaattctgaatagtgtcacccaaagctttgcataggccttaggccagcaggtattgcacacctttctctgctattcctcgttactgatattctgatccccactgtgcaccccagtaagccaccaaggtaaactgcttgccttgatagtctctttcagcactctgcactctacacactcttgaatgtcagttaggtgctgttatgtgggaatctacctgcttacctaatagacatagcctggacacaaagttctctggtttatgacactcccattgtacagctgcctccacagctccttgaaattctggatcagggattggacatctgacaggtagttttgactgcttggtatcacagagttcaatccaacaaaaggaagacatgttcccttgtgtgtaatgaatctgcaggtcacttattcaaactatagtagtctgaactcagatgctggatgtcaggtcccctcaggattgtcttcctgcgtcttgactgcagccactcctacacagggtgatttcctgggctggagccagtttgcaggactatgagactatatagactacaaagcctagctaggccccaggtcggcggcagagtaagccccacagcaatgcgttaagccttcatgaaatgagtgttgaatgaatgaggtagtgattcagtgtatatttgatccactgcaacaggtgggaagggggcagaggcagctacttcctaaaataacccttcttcagactcttaaagaactgatccttgttttgaattaaaatctatcttcaattaacttccagtcctttgccctacagataattcgtagtgccacatcagttctacccattctttcacatgaagacagatgtcatgttctgagtcatctttcttcgcctccttccagcagcccttatctggtggctcacatttgagcgagctccaatatgtctctgtagaatctctctcttcttttttcttttctttttttttttttgagatggagtttcgctcttgttgcccaggctggagtgcaatggcgcgatctcggctcaccgcaacctcccctcccgggttcaagcgattctcctgcctcagcctccctagtagttgggattacaggcatgcaccaccacgcccggctaattttgtatttttagtagagacagggtttctccatgcttgtcaggctggttttgaacttgcgacctcaggtgatccgcccgccttggtctccccaggtgctgggattacaggtgtgagccggcccggcctgtaaaatctcttcaaagtgtggtacatggagtgcagtactccacctgtggcctgactgatatgcagtacaatattatcactaaattgctacagacagtgtgcttttcattgttgtcacagaaatgtatttggttagttatatttgttcatatctcatctgactttccagtcttccctcactttgtacagtcatatttgccgagtcaagtaaaagttataacatttaggacacaatgcccgacttactataattaccattattatcttaggatcattacaaaacagaattaccacttagctctcaggccctacctccttcagcctcagaaacgttaacgctaccttgcattgctgcttttagcaccgcccctaataagccccgcccctggggcttccgcggcggaagcctagcgtccgccccacccaccccgagcccgaggcggggctgtggatgtagccgctgattggctgactggggcgcagcttgacggcgtcgggctggagagccgcagtcccggctgcagcacctgggagaaggcagaccgtgtgagggggcctgtggccccagcgtgctgtggcctccgggagtgggaagtggaggcaggagccttccttacacttcgccatgagtttcctgatcgactccagcatcatgattacctcccaggtgagtcaccgcct

SEQ ID NO: 2500 - DNA, 2300 bp, Homo sapien; identical to SEQ ID NO: 2470

SEQ ID NO: 2501 - DNA, 2300 bp, Homo sapien; identical to SEQ ID NO: 2471

SEQ ID NO: 2502 - DNA, 2300 bp, Homo sapien
cccgcctgcaacggcggctcttggatcccgggcaggcagcgtccacccagcgtggaaccgtggcagccgcagcccccgcaggttggagggcagacactagcaggagaaaggccacaaggcctgcgtggtgggaaagcatgggagacgtcgctttcctaccgggcgagaaggtctccctacagtctttggagacaagatggagggaggcaccccttccaggaacaaggcggctgctcctgaggcctggctccgcacggaggctcctgggtcccgcgcgccctctccctacccgctgtagccagagctgcttcacatatctcaaccggcctcctcctcctccccagccgtccttgggacagcaaggcccccagcccgtgggaaagacctagcctcctctccagcacttggagagggagttggatgcacgtctcttaaccccaggaggacagagaccctgaggcaggaggggaccccttcccttgctgcttctcttggcacagccggtccagggggctggctcagggcccaggactcctcgctcctcctggagggcctgggtcgcgtggcccaggagctggccacatgggcatctcccgcactgctcctcagggaacgggaggcattatcctgcagggcccactcttacccatgaaagacactcgggaaatgctcctgcggaagctggagctctgcgcgtttgaccacttagtctgtccgcccatccttccttcggagggtcttggggagagaagaaatgctccttcggagggtcttggggagagaagaaatgctcgaggacgatgcgctttgcagcgtctctaccaacatcagaagaaagcagggcgcgtcttcctggaagaaggcggccggaggcctgcggtcgcagggaggcttgcggggcaggaacgccctatctccgccgtgctatccagcggcttgcagcatcccacctggcggactcctcttcctctctcttctactgtggctcttctatcctggtgtcccttgaatgcctatcttccttttgtgcctccaaacctctcacgcccgccccaagttactcatttccttagttgttctgaactttaaataaggtaatgcatgtaagattgcataaatgctcaataattgtcatctgttattattttcatcagtaacatcatctgaatcatcagtattgtctatttttaacagctgcatttttcattgtccgaatatagtcacatacatttgaacattttataattattgaataataaattcgttctgctattttacaataaaaaataatgctgcagagtgtattcttacacatatatcttggcagatgtaggccagaggctcttctttggccattctgtggccaacctatcaatgtatacacttttaatgagattttgccagcaatcaaagccttcagtgaaaatgtccctagctctttactacatcggatcaaggactctggacagtaggcacaacatcctggaatattgtggaatatctcctgaaacggagatattattctttcctctcctcttttgtctttgtcttttcacaacatcttaatgacagtgctggcgacaagagtgtaactatatgtcagtgttctgctgtccttgcctgtgtgggtcttctcccaaacccgactttcctccagcagcttcactgaaaaagaggagggggctgcgggggtgggggagtggggcggggaggggaggaggaaataaactgaatagggaggaagcagctcacaggccaggagagggtaaggaagggagtcaaagacagaattttcttcagcaaacagtaaaaggggaaatccggggacgctaagagtttttaaacctttgctccatcacataagtaatccatgattttctgttacacaaatcaggactcccactcctccctccctccccacccccaatcctgattcctgtttacaaagaatgttcaaaaacaaggaattatgtataacagttcccagtttactcaggaaattctcagattacaaagagactttacgaataacaagtgaagagaagaaccttagtggttccaacatagtatggccatcgttttatactcaaaatatagaaagacaacctcagaatagaattgaataaatcaagtttatcattaaaacgcaaagaaaaaaaaactctccaaacgttgctgatcttctgttttaaactactgttagactggtgagctggagagccgggggaatccaccaaagatttttggatgaaaattaatcatcccttgtccaccgtagtcgcaccccaatgcccctcaga

SEQ ID NO: 2503 - DNA, 2300 bp, Homo sapien
cttttctattctaatacaaaagtttgtgtataggccgggcacaatggctcacgcctgtaatcccagcactttgggaggctgaggggggcagatcacgaggtcaggagattgagaccatcctggctaatacggtgaaacccctgtctctactaaaaatacaaaaaattacctgggtgtcctggcacgcacctgtagtcccagctactctggaggctgaagcaggagaatcgcttgaacccaggaggcggagggtgcagtgagccaatatcgcgccactgcactccagcctgggcgacagagtgagactccatccaaaaaaagaaaaagaaaaagaaagatagaaagcaagcaagcaagcaagcaagcaagcaagcaagacaaaaccaaaatatcagagatgataaattcgctggatgggattaacagcagattagacgttgcagaagaaatgatcagggaatatggaaccatgaataattgaaaatatgcaaaatgaaactcacagacaaaagatttttttttaaatgaaaagattatcagtgaactgtagggcagatttaagaggcctaatttatgagtaatgtgagtccctgaaaaggagcggggaggaaaggaagcatttattttctttctttgttatttttattacgagtggggtttcagtatgttgctcaggctggtctccaattcccggcctcactcaacacctcctgattcctgaaggtgtgagccactgttcccagccaatttttgaagaaacaatagctgaaaagttcccaaccataatgaaaattataaatccagtgacccaaggagctgaggaaaccaaagcacaagaaacatgaagaaaaccactgctagatacctcataataacattgctgaaatccagccagaagaaaaagacattgtacctacacaggaacaaagatgagaattgccatcaactttctttctgctctcgccggcccccactgggagcagcaatgcaatgggagcagacagagaagcaacatctttaaggtactgagggcagaggaagttaacctagaatactctgccagaaaaaataaattcccaaaactggaagtgaagtaaggacatttagagacttacataagctgaccgaattcactaccagctgacccacactacagaaacgtcaaaggagtcttccgggcagaaggaatccaataccagatgaaaatccagatctacatgaggaaatgaagaacaccagaaataggtaactatactaggtattttcttattttgtaaatttcttttgtaaaagtttgaccatttaaacaaaagcaataacaatgggttgtgggtttataacatgcgtaaaagcaaagtacatgtcagcaataacttcaaggccagaaggcgaggtttaatatcacttgaaggttgactgtgttcagttaaaaaggtttgctataagccctaagggaattactaaagtaacaaaagaaagagttatagctaataagccaacagaggagagagaatggaatgatataaaaaccgtgtgaacactatgatggagtaattgctcttcctatagtaattgcacctctatcctatagaaatacaccagtggctgaaaacgccgaaaatgcccgtacaagaatgactagaacattatatgtaatcataaaatcacagaaccaatttaacttcaaaagcgtatggaaagggctaaatgaatgacagtaaacaaacaaacaaacaaacaaacaaacaaaatagagagaaggccgggcgcggtggctcaagcctgtaatcccaacactttaggaggcaaaggcgggtgcatcacgaggtcaggagattgataccatcctggccaacatgatgaaacccccgtctctactataaatacaaaaattagctgggcgtggtggcgcgtgcctataatcccagctactcgggaggctgaggcaggagaatcgcttgaaccagggagtcggaggttgcaatgagccgagatggcgccactgcactccagcctggtgacagagagagactccgtcgagagagagagagagagagagagagagagagagagagagatcctagaatcctagcggaccttgatttacgtcctcatgtcgtatgggagacacggaggagaggcgggtaaagttggtcttgctctgccattccatgagagaatgtgctgggtagaagaaagttgccagcggtttaagcatttttaaaatgcaagaaacgctcagtagaacgagcttgaaccagccaactccagacttggaagcaagcacaccacccgactgc

SEQ ID NO: 2504 - DNA, 2300 bp, Homo sapien
atataatgtgcactgctttgaatatttaacccttttctgcccattaaaccattagagctggcatttccttttctatccaatctgagagacttaaatccattataattcacagcagttagtgttacattggagatgacaggcacagttagtctcattcccaccacctcattgtatgatttctgtgttttggctttgtttataaaatctcttcctgcctttcttaactagactggtctgtctgggtaaattttctgtttttctgtagtgtttttgaaattccatgtccctgattagttaatatattttcttagatctcaggtgcacagggagaaggtaatcatgtaccttagctcagggcacattatggtggcagctctgagcaaggcacttactgtctttccttcttttctctgtttatcccactcccatttccctgtccacttccagaaacacgttctgaggagtttagtatatgctcttttatctcacactttctctgcatatttcaataaggggatgtctttggaagacatacattgttctttgaggatggaggatattaaaacaactttaaagtttgaattggtttccaaaaacccattccatcctctttactccattctgtgtactatcttctcaacttttctattcaaatagaaaagtttgtgtataaatttggggaggaagaaaagagtcaagccaatggaaatgggcaaaatacttgaacggtgtttgtttaccaaagagaatttcttaatggccaaattgcataagaaaggattcttggcattattactcattcaggaaacacaaatttaaaatgccatgatactccataacacacccatcagaatgggtaacatttaagagacagggaaagccactggcttataaaaatgcagagcaactgtaactcttgttgctggcaagagaatgcaatactgtaaacaaacagatgcctgtaatcccagcagtttgggaggccgaggtgggctgatcccttgagctcaggagtttcagactagactgggcaagatgaggaaaactcatctctaccaaaaaaattcaaagaattagccaggactataggtgtgcctgtagtcccagctactcaggaggttgcagtgggaggattgcttgagcctgggaggcagaggttgcagtgagctaagattacaccactgaagtccagcttgggctacagggtgagaccctgtctcaaggaaggaaggaagggagggagggatggtgggtccaggtgcggtgatttaccactgtaatcccagcactttgggagtctgagtccagtggatcacaaagtcaggagatgaagatgatcctggctaacacagtgaaacccccatctctactcaaaatacaaaaaatgagctgggcggcatggcacatgcctgtagtcccaactgcttgggaggctgaagcaggagaatcactggaacctgggaggcggaggttgcagtgagccgatatcatgccaaaaccacaatatcagagatgataaattcgctggatgggattaacagcagattagatgttgcagaagaaatgatcagggaacatggaatcatgaataattgaaaatatgcaaaatgaaactcacagacaaaagagattttttttaatgaaaagattatcagtgaactgtagggcagacttaagaggtctaatttttgagtaatgggagtccctgagaaggagcagggaggaaaggaaacatttattttctttctttgttatttttcttaggaatggggtctcagtatgttgcccaggctggtcttgaatttcaggcctcactcaacacctcccgacttggcctcccaaaggtgtgagccactgtgcccagccaatttctgaagaaaaatagctggaaagttcccaatcataacaaaaattataaatccagtgacccaaggagctgaggaaaccaaagcgcaagaaacatgaataaaaccactcctagatacatcataataacattgctcaaatctggccagaagaaaaagacattgtacatacacaggagcaaaaatgaggattgcatcagcttcctttctgctcttgccggcctctaccaggagcagcaatgcacacgagcagacagagaagcaacatctttaaggtactgagggcaggagaagttaatgtagaatactatgccagaaaaaataaattcccaaaagtggaagtgaaataaggacatttagagatgtacaaaagctgaccgaattcactaccagtcaacccacactacaagaaacatcaaatgagtcctccaagca

SEQ ID NO: 2505 - DNA, 2300 bp, Homo sapien
catttctgccttaagagataacaggaaaaaataaagcaaagtagaatttcaccaaagttatcaacttctgctcatcaagaatcaccatgagaaagtgagaaggtgagccacagactgggagaagataattgcactgtgtttacctgaaaaaaaaaaggctcaaattttgaatatagagagtactttttacaaatcagtaataaaaagcaaagccaattgaattagggaaaatgcttcaaagcctgtcttctcaaagaaggattgctaaacggtgaaaaggcattagaaaatatgctcaacagcattactcattaaaggaaacacaaattgaagccacgatgtggtaccgttttacatccaccagaacaggtgtatttaaaaaacagtaaacaccacgcgctgtcaaggatgtccagccagtggaactctccttgctggtgagaaagcattctggaagaaaccatttggccgtttctaataaagttaatattacacctaccctatgatccaacaattccagtacttggtattcctcaagggaaatgaatgcacgtgtccacaaaaagacctatacaagaagaattttcgttcatcttgtccagcaagtggcatcggtttcctatcagcaggagtctgaacacttctggccctagcctcttggtatcagagtcgccaaggaaatacaaggcagtcagagactggacgggagaacaacacattattcatacagagaggagacagagcggggtgtgggctccgcttcagtcttgggcgttggtcccccatggccagcaggtccctccatttggcctgcacacacagcctcttgagaagcagaagaaaggacccccgcttcctcccctcagtggggggcagatacagcagctggccaggtgccagttgatgcacatgcttaagtggaacaaaggggtacacaccaagtctgatcgggggaaagatactcccacacaaggaggtgagtccagcacaggctgtgatgactccttatctctcaggaaggaagtgctccaggcccaaggcccattcctacgtggcagagtggaggtggaaagacccctggcaccagattgcctttcctcacactttgctgttggcatacaaacttggtgacgggcacagagacaagccattgtaggccacaacaaagagtttggagtttaaagtcattaaaagcttcttgtcgtttcgtgtgtaacagccccagtgactggaaaacaggtcctgagcacaccattgccttcgtgtaagccaccaccaacagggctgactgggttatttgctctgtgaggctcagagacaggacggtgcacgtccagagtttcccttggactcctccccaggtgagtgagctgtgaggtctcttttccttaccccgacgtgcccccagtgaccagaagaacggttctgagcacaccattgccttcgtgtaagccaccaacagggccgactgggttatttgctgcgtgaggctcagaaacaggagggagcacgtccagggtttcccttggattcctcgccaagttagtaaggtgtgaggtctcttttccttcccctgacgcgcctggttgcgggagcaaaagggaagagctgacagcctagactaacgacattgccgtgactcggattcgaaccgaggttgctgcggccacaacgcagagtactaaccactatacgatcacggcgagccacaggctaagccgcgatggcggagcttgctctagcccttttgacgtcaatggatttcgattattaggcggattcgttcccagacagccacaggggactcgcgcttttctttcatgcccgctctgcttttccctcccttcctcccaatcttcatacgtgatgagaacaattctcatctcctccactccagcctgggcctccctgcaccagcctctctcgggaggtctctctgtcctggtccgcacctcctctgcttctgtggggcctctccgtatttctgcttttcacccctcctctctcccgccccaccgaccgaggccgaggtgagcgaggggagcgcaagcagcagtagagaatcgggtgaaggcggagccaagaaggggaagagccatcactagagcccacggggcgttctgcttgcttcccctgggacccacgcggctcaggcccagggagtcgcggacccgggcgtttcctgggatgctgggtctgacgcctgcgagggtcaggacggggcgaaggccattccgctgcccttccagcttcggaatcacccaatgcacgggtttcaaccgtagccagcaagatgcgcc

SEQ ID NO: 2506 - DNA, 2300 bp, Homo sapien
tgcctttctggagatggtactgacagaaaggaagaagagagggggaaaaacaatgcaacaaaaaacgaaaaccatagcaagtgaattagtaccatgaaactatgagcattaactggttatagttcagggcaaagcacctcagtgatgattcacatctgacaataaatacaggaatagctgttgaaagctagtttgattttcacaaagaggtttaaacaaactttcgtttgttcattagtcttaagcaacacatttatggcaggggatgcattaaacctaacatatgtctgtgaccaaggtatttggtggttttaaagatgaagacacaaagccgtgcatatagtttatgcggagcggccttgaactacccgtaatggagtgagatacagttattatgtattaatgctgtgaatcttcatccagagagagaaaacaaacaggcgagaaggaatgcagcatctttgaagataaagacttagagggccccattctgcaattggtattgagtttgcataaactcattttgttgttgttgttgctgcataatttttaaaatgcaactggtttaaatctgttccctgaggtaatttacgctaaagcagcattctaacaccataaattccctgcttatggcaatctctggttgggtgtcaggtcggtgtaagttactgagcaaatggctgcttcaaaatttttagggtaattgcctctataactcgtttagcataggccttgtcaggaaatctctaattgtaattgatgcctctgcttccttttctcctcctgctttttaaccacattgttgtactaaaagcttcactctccagtgcagaagagcatggggcttttcatcttctgtagcactcggattttgttattattaaagccttccctcatgaaaacgtgatgtcacccccgatggggtccagaaggtggtggttggttgggtgtacctctgccccagcccaatctctacccttgcctaggaaaccttcagtacagagaaggtagatcttgatggggttgagataaaatgaagagcaagttaccactactccaattctaagttttgtatgaatgctgggttggctgttgatttctaccagaatggtgtgagcaaagtcaacagcatatttttctctcttctctcatctcatgtgtatgggcatgatgccttggtaggaagggtatcattggaattgtatattacaatattcatggccaggagcttctgttgatttgtgtctacatacggggatttttcatgaaattgcataaagcatgttaaagaatcaactccaaaatccaatttgttaattatcttgcttaaaatatacttcaattatatcacatttgacatcgtatgtcattgatagtagagggaaataacacttaaaatcaataagtgtttttaatttattttacttattatgcttgtcataatattttgacatggagtgctgacatgtcaacgatgctgttatcaggaggtaaggcaatggcattaaactgtctcaccatctgtgctactgtttcagcataaagtgggcccatggggaaaatatagctaaaatctccaatgaagtgtctgcttatgaagtaaatacaggtcatcactgaataaagcagcctgagctcaaaacaaaagctgagggaaaaaaatccacactctaatctattatcttttctcccaaaggattcaacaataagagcactaaaaatatgcgagtgctgtctgtgtgccagacttgtgaaaagtgttccacatattttatctcatctcctctaagaggtgaggtacttgcacatggcaaaacccagctctgaatgaaagtctgtgtgattccatgcctggatctattctcagaaaccaaagccatcactattctatatggtttggatagaaaatggattctgacttctggatcctctcctggctattacaatccacatcgcaggggggtgaggcaccccccgcgatatggggagtcatagcaaccccctctccccccctggctgtcacaatccacatcgcaggtgtgtgaggcaacccctgcgatatggggagtaataggaaccccctccacctgccccggctatcacgatccacatctcaggggggtgaggcaccccccgcaataaggggagtaatagcaacgatctctccacccctagctattacgatccacggtggactcatagcctgtttacgatattgtgagtatatatcaactccccctctggaaattatgaactatttcacagacctgtgtacacccatctgtattgggagtaatatc

SEQ ID NO: 2507 - DNA, 2300 bp, Homo sapien
catggtgtggagctgctcaggatgcccctcctccacatgatgcagccagaaagatggatgatcagattccccatgattgaggaactgacaaatagaaagtggggactgaaatcaacccaagagtcccacagacagtgtttttggatagacatagaaatggacccttctggtcttaaagcttgaaacttaggacatttgttttatctgagttccttcctcagcaaaggcctctcaggcctctcaaaaagcgtcatagacctgaaactcagcagatgacagcctccagacaatgagatgccagacccctcactcatcatgagtgcttcctcacccttccctagttcctcttttcccacccacagttaacatttcttccctgctacataaacccctcactttagttgatcagggagattgatttgaaactgatcttccatctcctcagctgcagcacccaattaaagccttcttcctcagcaatactcaatgtctcagtgattggctttctgtgagctgagtagcagggcctagaccgaactcccgggctttcagtagcaatacatgtacacttttaaagactgtaattaatgggtcatgatatattgacaaattgtaatggtatcaacttggccaattctgagaaaatacactgtgcttcaatatcagggccctgctcctgacctcgacagtatatggctgattttgagtcatagtaggagagtatggcctggtttgagtgttttatagaaatgtaaacatggctgattgcttttattttaaatccaacaaatctccatttctggtgagaaaattttgttaaaaccaaccaaccaacgaaacatagaagaatatgaataaaaaaataaaggattccctgcttcccaatctcacttgattgctgtcttctattatatgctacagggaggaagggggcaaagtgcccaggaagtcccatgtcctgttttgacaatcatctggcctccttgggcaaatggaaaagagggaaagcatcaagaaaataacagaaattttgcagatatttcatctccgggctgggtgcggtggctcacacctgtaatctgagcacttcgggaggccaaggcaggcaaatcacttgaggtcaagagttcaaaaccagcctggccaacatggcgaaacctcatctctagtaaacatacaaaaattagctggacatggtggcccacacttgtaatcccagccactggggattacaatcacttgaacccgacagatggaggttgcagtgaggggagattgcccactgccactgcactgcactccagcctgagcaacagaaggagactctatctcaatgaaaagaaagatgaaaagaaagaaagagaaggaaggaaggaaagaaagaaagagaaagaaaggaaggaaggaaggaaagaaagaaagagagaaatttcatctcgacacaggaaactctgacctaggctttaaggaaagaaaagaaagaaagaaagacagaaagagagacaaagaaagaaagaaagaaaaagaaagggagggagggaaaggaaagaaggaaggaaggaaggaaggaaggaaggaaggaaggaaggaaggaaggaaggaaggaatgaatttcacctcaaaacaggacccagactgtgtcggtcctgaagcctctgtgaccgaggcttcaagggctcttctctggccctaaatccacagtggattttgccttattttccgaggtgcacatgaaatgatagaagtcgatcaaaggagagggcagagagaaagcaagagggctgggtccttcctgcaggtccaccttcctcaggtattgcttgtgggatcaaaagaaatgccttgacatgggtgggtgggaactattgatacttattaggaatccacacacctgcagaaaacttgcattgtgaggttccatggtgtaatggtaagcactctggactctgaatccagccatctgagttcgagtctctgtggaacctttctgtgtaactgggacgataatgccgtcttttactccctaaatggaatggggattccgctgacgttcttcagaagctctgcgctgcgggcctccgtgtcccttctactcccgctgtctgaaccccgcgatgtcccccgcgctgttcgtcccctcttcgtctccctcttcgatgttccgggtcccagaaaccaggttatcacagtggcccggatcatagggaaattgcgaaatcatccagttgggatcaccgagcctgcagggtccccttcctgggcgagcctcctggccccgtgctatcggaggcctggacacc

SEQ ID NO: 2508 - DNA, 2300 bp, Homo sapien
tcggctcactgcaacctctgccccccaggttcaagcgattctcctgcctcagcctcccgagtagctgagattataggcgcgctgtaatttttgtatttttaatagagacagggtttcaccatgttggccaggctggtcttgaactcctaaactcaggtgatcatgagcacctgcttcagcctcccaaagtgctgggattacaggcgtgagccaccgcgccaagccagaagttgtttactttctttctcataggaggaggagtttatttggtttctaataatagtaggttattttgttggaacatcaggggcatctgtttactgagagttgttttaataaaccttagtgttatatatatatatatacatatatatataaaatatattacatctattatatatagtagtagtgttaaaccccttacacaagtattgatgcaacatcgtatgtcaatgacagaatctgttaagttggaagagtatactgtagaaggtacatacttcactttttttttttttttttttttgagatggagtcttgctctgttgcccagtctggagtgcagtggcgcaatctcagctcactgcaaccaccgcctcctgtgttcaagcaattctgctgcctcagcctcccaaatagctgggattacaggtgcccaccaccacatctggctaatttttgtatttttagtagagacagggtttcactatgttggccagactgatcttgaactcctaacctcaggtgatctgcccgccttggcctcccaaagtgctgggattataggcataagccaccaccctggctcatagttcactattgaaacaaacttttttttgtgtacagaagaaaaaaaatcgtacagttaacagtgtcagagatagtgaaaatatgaaacaagaactgcttacaagaaaggagcactcaggggaccaaacctctgccagagccagcggggaagtgacttatgcctctctcttctttccctcctgtccccgcccctcgtctcccgcaatgaagcgggtacttaatctgtgtcctgtggaggtcccctttggcagccagctggaagcccgtgcacccttcttcaaataatggctttcaatgagcagactaggacgtttaggattgcaaaggaaaccgattcctttcaaacctgattatctttgtgatgtggcactgtttgcatatcttccttaaaatgcattaaaggccactgcactccaccctgggtgacaagaggtgactgtgtctcaaaaaaaccaaaaacactcccccctcaccccaaagcattagacgtcaaggctggcagggatgtctgttctcttgaaagttcaatatcaattcaatactttaaattcactgtagtttcaatccattggtatggaaagtgttttgaattattgtactgatttttttctatcctctttctgatacgcatgctaatcgtatggaccttggacatctaccttcctgaacttttctctcctgtttttacattattattttggtttgtgggaaatattcttgacattatcttcaacttaatttttgttcttgcttctactattttagtttaatttccaagtattttgatattgaactttcaagagaacagacatccctgccagccttgacgtctaatgctttggggtgaggggggagtgtttttggtttttttgagacacagtcacctcttgtcgcccagggtggagtgcagtggccttcaatgcgttttaacgaagatatgcacacagtgccacatcataaagataaccaggtttgaaaggaatcggtttcctttgtaatcctaaacgtcctagtctgctcattgaaagccattatttgaagaagggtgcacgggcttccagctggctgccaagtgggacctccacaggacacagattaagtacccgcttcattgcggcagacgaggggcggggacaggagggaaagaagggacaggcataagtcacttcccccgccggctccgacagcgggtaggtccgctgaggggcgttgggtgaggcggaagagcagacggggatccggaaggcgttgtcggtgacatcacggagagggcgatttctatgtagatgaggcagcgcaggggctgctgctttgccacgaaagagttcccgtgccgtgggagcaagtctgggaccgctggtcggaccggagagtcgcagctgtgtgttagggctaggatggctccgggatgcgcgtgacgcaagtgaccttgcgtgtaaagggtgaggaatatgaggctgcggcggggcggaggggtgtgagcttatact

SEQ ID NO: 2509 - DNA, 2300 bp, Homo sapien
atgtggagaaataggaacacttttacactgttggtgggactgtaaactagttcaaccattgtggaagtcagtgtggcgattcctcggggatctagaactagaaataccatttgagccagccatcccattactgggtatatacccaaaggactataaagcaactgctttctaagtgggatggctgaagcaagagaccttaaatcacttgaccgtcttcacaaaacagaactgaagcagaaccagaagtcccctgatagcctttcagggacaccacctacaaatacaccgtaatccctcatactccacatgccacttcagggaaagggacatgaggcaggaatacaaatatataccatctgtgacacttcctaagctcctggcttcagagtagccatcctgataattattttttaaagtccacattataaatgtgcaagttaagtgagttatggaaatcattccagatactggttcaccagtaacatcagtttagccctaaatattgtcataagttctctgataggctcatgtgatttaagctggtgctctgccaagactagacttaggcgttttatcctttttatgacattatgtatgttgaagagaatatatgaatacattttatatatatgaatatatataaaaccttcattatcacattattctcaatccagcattttctcagcccctgattttcatgttagttcagcattcttacatctttacagattttcatctaagactacatttctactgttttatataatcagcccccctaagatcaacatgtccacattttttggcaaagacaaagcctactgatttcaggatcattcttttcctttttcaaaagcacaaacccaaactgagaaataaatcaagagaaattctccttttttctatgctaatttagaagtagagtctttatttcttttcaaacccaaagagaatcagacatacaatatgaatttatctactttcgcttgctcagactgagaggaaagattaatattttcaggctgttagtcaaaactgttcattcaaatattatttaataaaatccaagaaccagctaaaaagtcgcttaagctaagaaaccttcaccagcctcatgggaaattgtgtacagttttctactagaatagcctataaatgcttactgaaaatgtctaagttcatatcttggtaactaacattttaattcaatctgcagaataatatatgcttctttagtgctaagatatgaatattagaggcattctttcttaaaatttctatttagttatactttcacaaataactataatattaaaattctgcatgtggcataaaacatattttaatggagaaggtaatgtgtagggagtttatttctgtttgctattagaacttatgtttattcttggttaaaaaaactgcactgattacaacatagaaaaaaacaaaagtatgttgtatatctcttacagtagaagataaagagtagttctaaatttagaaaggaaaaataaatatacacagtgaaaatatgtgtcagtgagatgttaatcaaagatcaactattgctgagaccagcaatattaaatccctgcacaattactcatattataatgagaattttaaaaagaaaatatgaacacataacataatgaaggcagaagtcactctcatccttcatctttgtattcccaattcaggaagctggtatagtatcttcattataattactattcaacaaacatttgtaaaatgaatgaataaggaatgaatgatgagaaaaatgataaacatctccctctgtctcctgggagttaactgcactactttctttcaaatttaattaatcctcaatgtccttgtaaaatagccaaagggaaaatgtatttacattactctaaatattgatgcaatctacaaaaagggttaaacaacttcctcaaagtaaataaaacgttcacaatccagctaggataaaaggatttaaatcatttcctaggtagagggctttcaattagagcccctgctgcattaaccatgggaactcatttcactctcttcatgatggagccctgagtgttgctgctaatctgtactctaccattctaatgcttttaaggttccttttcagcccttcctcctcgtaatccacaaatactgagaccaaggcattttttgggtcagtcctaatttcaagcattctatcctgccctccccaaatgaactcacacttattagaccatatgttcctatattagttcaggaagggggaaaaaatgttcatcacacttgtatataagaga

SEQ ID NO: 2510 - DNA, 2300 bp, Homo sapien
aaaaagactcaggcactgagggaaggggagggtgcacatctggagtaatttcaaggctttttccgtgttatctgaggtggcaacaagtaaagatttgttcgttttattattttttttaatttttaaagattttcttttccccccttttccccctcccggccactccggtttgtgtttgccacaagactcataattcctttagaaagtggagtcgaattcataaaagtgatggggggagagcgcggagagggaaggctgggagccccagggagtcttcactacctacactgccgctcagctcccggcgcgagtggaggtcggggtggggagacgcgactcctgcccgggatggctgacactctgcgagccccggcggcccgcggccgggccgggtgactaggcggagggcgcggagggtccgcggcgggcgggtggcgctgcagcagcctgggcacggctgccgccgcccgcgggcgagagtgtgcacgggtgtggaaggccggagtgcgggccgtgaggggtgtgcgcgcttgagccggagcggggctcgcccctcgtcggctcccgccgcccagccggtgatcgctctccggccgtccccggcaccctcggccccccacggcggttggtccgggcgggggaaggagaaagtgagactcggtttcatcaccaatccatcgccagaaggggaggaaattggaatccagcagcggcgagcagcagctgggaggtcacatctggaaatggaaagccgacctcccccttctcctccacctcctcctcctcctcctcctcctcctcctcctcctctcacccaggatcacttccgaaaccacttggccttcagcccctgcctcggccagaggtttcatttttaactgaatatttacgaaagctgaaagcgtgcgaggggggtggggtggaaatagcggctgcttcttttccaaggatttatttaatggggatgtgttcaaggcaagaccgaattcagaaggatatcgacgtcgtgatccagaagtccagagctgaggactgcctgtttgcaggtgagttcttgcttttccagaacctcggaccccgcgcccccttcccagttctctgaccgcgacgtgtgtggctgggggtggggtggagggtttgcacgtccgcattccggggttcatttggcaacagctgctgcaacgaacgcgggagccaaaagcgggagggggcgccagcctcgccccttcccctccccccacccccaagtctggggcagctaccagctttgagggcagaacccgcgtggcccgagcgggggtctaggcgaaggggcagtgcgtggtatttccagccccgcgtagtgcccgaagcctgcaagcacgcctcctgggttccagcagcggcggcagagcggggttggttggacccgccaggtttgcgtaatgggctgagcggcggcggccgggaatggagcctgctgcgctgcgctcgtaagctgcgcccggcgccgaggacccccggggggcagcgctcggcccatctccggccccttcggctccatctagtcccctccgactggcaaagagaagggattcctcggattcccaaggcacccagcgcccctgcctggggggtcgcctttcgtccattttgctcccccgggagagagatcggattttgctttcgctgccgcgagcccggctggggctgcttccggccgccccgactgggaaattcccgccgttgccatggcacccggcacttgctgccgggggcggcctgccgctgcacccagtcgggggcgcgccgcatcccctgggacgctgcgcggagagacctcgccgccctctagccctcgccacccgcccggccaggcctcccctgactccaccaaatggagcgcccaagtcctgatcggggttaaaacaaatccactccaggggtagcttttgacaggactttctgtttcagatttcagatactcagactccacctttacttttacctatgttggcggccccagaaggtatttatgggtgtagagttgcttcatttcctgttcacactcttgtgtttcctttgttcttagcgtgttccgtgttcgggtattttggttgcttgtttgattactgtggcttttctttacctacaacccaagcctgacgtccctcggttttaaatagcagggggaggggaatcaatgtttgattcaggtgtttcgaagaccacgccacaggcgatgagcagaactcttcatgttgaaacggttctgctacagtactagattgctctcaggcgatttggggttgatacaggca

SEQ ID NO: 2511 - DNA, 2300 bp, Homo sapien
ttcaactggtccttaatgaataaaaggtgatcaaacaagaaaagagacttatactgtttgaaggaaagatgaatgtctcttctttccttaaacaagaagtagtactaacaaagattccttgcttggccaaactttagtcagatgtctatcttccttgcaaaatccaacttttttttttttatgtcgtacaatgtgatgttttgttctttttaaaatttattattattatactttaagttttagggtacatgtgcacattgtgcaggttagttacatatgtatacatgtgccatgctggtgcgctgcacccactaactcgtcatctagcattaggtatatctcccagtgatatccttcccccctccccccaacccacaacagtctccagagtgtgatgttccccttcctgtgtccatgtgttctcattgttcaattcccacctataagtgagaatatgcggtgtttggttttttgttcttgcgatagtttactgagaatgatgatttccaatttcatccatgtccctacaaaggacatgaactcatcattttttatggctgcatagtattccatggtgtatatgtgccacattttcttaatccagtctatcattgttggacatttgggttggttccaagtctttgctattgtgaatagtgccgcaataaacatacgtgtgcatgtgtctttatagcagcatgatttatagtcctttgggtacctacccagtaatgggatggctgggtcaaatggtatttctagttctagatagaatgtttcctcttataactcatagtgaatatgactggacaatgaaactattttgtaatttctttcctgaaagataaaggcgttagaacatagaatctttcattgattctacagaatcttaagactccttcagagatggcagtcattcctaccgtgctgaacatcatgttgtcacggtcagaatcagaactaaattgattaagggtctgaaacagtttggcactcttgggcacttattctgataagaaagctgatgagacagggtaatgaaaagaggctgcaagaaatgaccattcatgcattcagccaacatttaggccaccctcctgtattccaggcactgtacgtggcactgagaatgcaaagcaaaacgagtcatggtctactggtgggagccttctcagcggagaaaagatcaataagaaaagtgcctgctggagacctctcctagggcataaaccaatatagaggtggggcagctacgtcagcctgaggtgtccttaggcagaacagaaagtgagaatcagagcagtatctcatttctgaacacctggattgtagctttccctggactgactgtcaaaggaggtggttttaaaaagcaagccaaacaggtttccatcctttaggaagaccctggaacgtgccagttgattctgacaatttctcatgaacagaaacacctaggaagggagaactggtgagtcttttcaagaggaggaagtccctcaaaaggggctgtgtttcgcaaacggcgccccaaaagggctgaaatacttcgatctggaggaaaaagactcaggcactgagggaaggggagggtgcacatctggagtaatttcaaggctttttccgtgttatctgaggtggcaacaagtaaagatttgttcgttttattattttttttaatttttaaagattttcttttccccccttttccccctcccggccactccggtttgtgtttgccacaagactcataattcctttagaaagtggagtcgaattcataaaagtgatggggggagagcgcggagagggaaggctgggagccccagggagtcttcactacctacactgccgctcagctcccggcgcgagtggaggtcggggtggggagacgcgactcctgcccgggatggctgacactctgcgagccccggcggcccgcggccgggccgggtgactaggcggagggcgcggagggtccgcggcgggcgggtggcgctgcagcagcctgggcacggctgccgccgcccgcgggcgagagtgtgcacgggtgtggaaggccggagtgcgggccgtgaggggtgtgcgcgcttgagccggagcggggctcgcccctcgtcggctcccgccgcccagccggtgatcgctctccggccgtccccggcaccctcggccccccacggcggttggtccgggcgggggaaggagaaagtgagactcggtttcatcaccaatccatcgccagaaggggaggaaattggaatccagcagcggcgagcagcagctgggaggtcacatct

SEQ ID NO: 2512 - DNA, 2300 bp, Homo sapien
ctattgttcttaggatttggaacaaaatgcttctttctttgacaaaataaatgttttctttaaagaactcttgattgatcctggaccattgtagaaactgaagtcctatcaatgcaaaaaaatatgacaacatgagctgcttatcatgaaataagtgttttccaattaactatcctgcttcatcagcaggtaggaataatagaatctatacctatgtcttcatgggaagttctctatggccagttgattagtgagggaaaaattgagcctgatttacagaagtcactgtacaacatcacagcaacagccaaaagtagattgcttaggcattataacctacgtgaatgcaattttaaaagaaattcagcctatgtaattggttgtccacgatgtctagaaggagagatattattgatgtatatgtggcagctaataatttgtctagataattagggacttggggccaggcctgatggttcacacctgtaatcccagaacttttggaggacaggacaggtggattgtctgaggtcaggagttcgaaaccagcctggctgacatggtgaaactccgtctctactaaaaatacaaaaattagccagatgtggtggtgtgtgcctgcaatcctagctacttgggaggctgaggcaggagaatctcttgaatccaggaggaagaagttgcagtgaaccaagattgcaccactgcactccagcctgggcaacaaagcgaaactctgtctcaaaaaaaaaaaaaaaaaagaaaagaaaagaaaagataattagggactcagaaagacaaacactgaaggattggtggcaatgagttttggggaaaaaatatgtagatgaaccacagaaaatgagccagagtgtaagaatatttgtgcttaatacaaatgctcaccaaactatcatcaggaaggttatcaaatagatatgaaggtatgaaacaatctctttcaccaggcactacattgcttgctcagaaggctaataaacagcaacattggtggtagcagtagagaatacacataggtttagcaacatgttggactttaccactctcgcttacaaaagcctatttagctgtcaagactattaggcgtccaacacacaagcaacaaagtccaaggctaagcacacaataacatatcctgggtgaataaaccagtcaccttttgtcagacttgttgattttactggagctcctctatgataaaggcaacaaggaattttgtaaatggaatctacctttatccttgaattacatttgctttacctgacatcatttttctctgatcgccactctccatgggtacattgaatgccttatatatactgccataatatcctgttctacatccttctattaaaagaacttgttgtataacaaatgagtagatattcattggactcacctggtccaccatttatcctatcaccaaccaaaattattattattatagaatggtgaatattttattaaagactcaatcacagtgccagctggagacaatggcttataaggttgtactcatgctagacgatgtggtggtgtatcctctgaactagtaactaagtataagcttgtctggtgtctcccatataaaaaatacaacaatctttgatatttgttatgaacgttgaagtgactccttttgtcattacatctaatgatccactccaaatacttgtctcttgtctctgagattctaggtttttgcagaattagtacccaaagggagagtcttagcagtattccattttacaatccatccttcgttagaggatgagagacttctatctagccttttaggttgcctgagacctttaaacaaactgtcaaaaatttaaaatttaaaatgcggctacattgttgcatggggtagtaaatcttgaccttaaaactggtatttgtaagaaaaacagaaagaattcagggatcccctttgatggctcctaattctatacagtcctgtaaatattcctgaagactaaccaggcgtggtggtgcacacctgtaatcccagctactccagaggctgaggaagagaatcacttgaacctgggaggcggaggttgcaatgagctgagattgtgccacttcactccagcctgggtgacagagcaagagtctgtctcaaaaaaaaaaaaaaaaaaaaaaaaagaagaagaaagaaagaaagaaagaaagaaattaatgaagactgccacaacttggaagcaaccaagatatccttcaataggtgactacataagcaaactgtggtatattcctacagtggaatattattcagt

SEQ ID NO: 2513 - DNA, 375 bp, Homo sapien
gatcagatgccagaaagtcaggagactgaagagtaaagatgtggaaatccctgtctagaccctggtactggggagagttttgtccttgggatggacctggctcctgtcctgtaggcaatgaccacagcagcatgtccagccttccactgaggcaggtgtgtctgtcttttctcagaatatgaagagtgcaaagatctcataaaatctatgctgaggaatgagcgacagttcaaggaggagaagcttgcagagcagctcaagcaagctgaggagctcaggtgaggggaccccatgggggcaggcaggggggcaggtgtgtaaatctctgaagtacagcagctcggtggggagacgtaagagctaagctgggccagg

SEQ ID NO: 2514 - DNA, 2300 bp, Homo sapien
ctgatgttcataagctgacttctttttttctttgtcaagtttattgatcttttcaaagagacagctttattttcactagtttccccttttgtttttttctgttttcaatgccattgatttccgctattatctgtattatttccttccatttgctttaggttttttttttttgtagattcagtctcattcccatggcgcaggccggagtgcagtggtgcgatctcagctcactgcaacctccacctcccgggttcaagcgattctccttcctcagcctccagaatagctgggattacaggcgggtgctaccatgcccagctgatttttttgtatttttagtagagacggggttttgccttgttggccaggctcgtttcaaactcctcacctcaggtgatccacccaccttggcctcccaaagtgctcgtattaccggcgtgagccaccgtgcctggcctgctttaggtttcttttacttgcttttttcttgtttcttgaggggggagcttaagtgtattcatttgagacatcccctcttttcttttatcccttttaaaaacttttgtatataattattattgtaggaagttaggcttgggcccgcaaactatggaagaacagaatatactaggccgctgctttaatagctggtgcctgcttgtcgcccacccccactcccccaccttagctgccttgtccaaaccaaagagtttagtctagaatggacatttactagcctgcaaaatagttcactacatctattcttatcagcttgcctgactgcccaggtcataagtcaaatacttgaaaagcccccgagctgaccatgattgcaatgcattatggactgcaacaaaatacagggagacaaccctaaaaaaaaaaaaaaaacaacctaaaagtccaaacccaagatccaataggcgacatccgggaatactgtgaccccatagtactcagcctatgaggaaccgggggaggcacttccacactaggggataaattgcttgttgtaagcctactgggtgtgcctgcctaccagacacccgatcttgcaagactgtcattaataataagtcgcacttctgctgttttccgggtcttggagtccattctttgggtttggacaggtgagtttatttctcacgattatttccaggcaggccttgcccagtgggtggctcatgcttgtaatcccagcactttgagagggtaagcctggtggatcacctgaggtcacgagttcgagaccagcctggctaacatggtgaagccccgtctctactaaaaatacaaaaattagccgagcgtggtggcgagggcctgtggtcccagctactcaggaggctgagacaggagaatcacttgaacccaagaggcggaggttgcagtgagccgagattgcatcactgcatgcgacagtgcaagactccgtttcaaataataataataataataacaataataataatggcacgacctaaagttatgcaagcatttgccttagataaaatttcaagttttcaaagttgttagctgggtgggcggcatggctttacttcctatttcttggtatgtcctaatcttgttgaaaaagtttttctttttctcaaaggcttatttcagtggaagcccatctgcaaaatctgttattaatttaaattagaaaatcactacaagtcccactgacatgtgggttattgtttttgcgagtgacctaaggccacctctcgggggagctgggggttgccttcccacgtctgcgcgtctgcaccccatgcccgggcctggaagtcagactcgggggcggtgctgcagcaccaggcctgcagtcctaagcgcggggtcgctccgggcccccgagggggtgtgtcttctgcccctttaacctggcaggggcggttcaagtggccctggaaatcagcgatttgtagggtcaagggctggtgctttaaaagagaggcggaggggagagagggatttcccggtctctgctgcactctgtctatccgctcggttactccttttcctggcccgcgcgaacccgctgtgccgcagaggcggccatgtacctttaaggccccgctgcgcctgcgccttgggctctcctgacgcgccgggcgggaccctgaggagccagctggcgcaggctatgggctgggcggcggttgagacagcggcggtatcgggaggggtaggtgagggtcgcgaggctgcgtgagcatctgagtgaacgcggtgcttttgggaacgcgggacgggcgacctgtggcgccaggagcgggccgaggcgtggcgca

SEQ ID NO: 2515 - DNA, 2300 bp, Homo sapien
ccgaggcgtggcgcacggatgccgtctggatgggaagttacggtttacagcgaagtccacccagcgtttccgaggtgaaggcgccgcgccaggccgggcgggcggtgagtccgggacccgcgggtacacagctgggtcgagctgcggctgtcgcaagttttgttgcgagcgacggagggcgaggcggggtggggggttgggagggcgtgtgttccggccccgccggggcttaagttccatgcgttggattcctcgcttgccgctgccgcccgcagccctccttgggcgctggggaagaaactcgctggcgggtgttctgtggcatctcagggggtggagggacgagcagcttcgggggcacgtcctcgtgtatcctgtggaggaccctgaccccgcaccccaccctcgaggccagaaatcggttgcctctggggacctgagaagcgagaccactcgcgcccctgacttgcaaagttggggtctttattggcctccgggattctgctcctggcggtttctccaggctggtgatgggcaagccgggtgtaccaagtccaggatgcacatgaggagcgtttgtagcagtcactgaatcacctcatgactagcggggcaggcctctaattcaccgcaggatttccggtaggttggattgtggggttggtgtttgcactccaaagagttgctgtgatttccctgtatctgtctttctggcttgttagatcttctcatttggcgtcctttctccgaagagttaaccaagacgtttggcatggtttccttgctttcctcctatcttttgctgctagagctgctttcgaaaagaagtcttttcttgcagtggtatcttttctttgggttacagtgttgttcatcctttctttgccgaaagaatgaatcccagtgcttcacaaggttaaaggaaagatctgctggtagtgtttagtctttgttctgagctgatatgtgttagtagctttttgtttttaaattttattagtaaaatttcaccagtgaaccagaagctctttttttctgttgtgaaatgctagctttaagatttctgagaactttgtgtcaaagaaatctttgaaaagttactgaagtatacagagaggttcacaattttaaatgtgcaggtggtccgggcgcggtagatcacacctgtaatcccagcactttgggacgccaaggtgggcggatcacttgagcccaggatttccagaccagcctgggcaacgtgccaaaaccctatctctactaaaattacaaaagttagctgtgtgtggtggtgtgtgcctgtagtcccagctacctggtaggctgaggtgggaggatcaccagagcccaggaggttgagattgcagtgagccgtgatcatggcagtgcactcccgcctgggtggcagagtgagaccctgtctccaaaaaaaaaaaaaaaaaaaaaaaaaaaaaaaagtacaggtaatgaatttttaccaagtgaaccaccacagatcaagaaatagaacattactagactggggtatatttgtaggagtggcattgttggttttagaggtatatgaatgataaaacttagtattacatattgttgaacgttttcccaaagtggttgtaccatttagcagggatactctggttaccccacatccttgctgatgcctgtcagttaaaaattattttgccattctagtaggggtgcagtaatgtatcagtgtgatttcattttgcattttcctggtattgagattgagtatcttttattgtcatttgtgtgtcctcttttgtgaagtgcctgttaaatctttttatccagttttcattgatatgcttgtttttctgttgatttgtaatacttttttctggttatgtgtcctttctacgatatatatgtattgcatttcccttttttcaatctgtagcttgccttttcgctcttttaatggtgcttattcatgaatggagattctctaactttttttttctttttgagacaagatctcactctgttgcccaggctggagtgcagtggcacaatcacagctgaccgcaaccttgacctcccaaggctcaggtgatcctcctgcctcagcccccaagtagctgggacctacaggtgagcaccaccacactcagctcttttctgtatttttagtagagatggggttttgccacattgcataggctggtctggaattcctggtctcaggtgagacatctgcctcggcctcccaaagtgttgggattacaggcatgagccactgcacccagcctgagattcttaattttaatgaaatt

SEQ ID NO: 2516 - DNA, 2300 bp, Homo sapien
gagaccactcgcgcccctgacttgcaaagttggggtctttattggcctccgggattctgctcctggcggtttctccaggctggtgatgggcaagccgggtgtaccaagtccaggatgcacatgaggagcgtttgtagcagtcactgaatcacctcatgactagcggggcaggcctctaattcaccgcaggatttccggtaggttggattgtggggttggtgtttgcactccaaagagttgctgtgatttccctgtatctgtctttctggcttgttagatcttctcatttggcgtcctttctccgaagagttaaccaagacgtttggcatggtttccttgctttcctcctatcttttgctgctagagctgctttcgaaaagaagtcttttcttgcagtggtatcttttctttgggttacagtgttgttcatcctttctttgccgaaagaatgaatcccagtgcttcacaaggttaaaggaaagatctgctggtagtgtttagtctttgttctgagctgatatgtgttagtagctttttgtttttaaattttattagtaaaatttcaccagtgaaccagaagctctttttttctgttgtgaaatgctagctttaagatttctgagaactttgtgtcaaagaaatctttgaaaagttactgaagtatacagagaggttcacaattttaaatgtgcaggtggtccgggcgcggtagatcacacctgtaatcccagcactttgggacgccaaggtgggcggatcacttgagcccaggatttccagaccagcctgggcaacgtgccaaaaccctatctctactaaaattacaaaagttagctgtgtgtggtggtgtgtgcctgtagtcccagctacctggtaggctgaggtgggaggatcaccagagcccaggaggttgagattgcagtgagccgtgatcatggcagtgcactcccgcctgggtggcagagtgagaccctgtctccaaaaaaaaaaaaaaaaaaaaaaaaaaaaaaaagtacaggtaatgaatttttaccaagtgaaccaccacagatcaagaaatagaacattactagactggggtatatttgtaggagtggcattgttggttttagaggtatatgaatgataaaacttagtattacatattgttgaacgttttcccaaagtggttgtaccatttagcagggatactctggttaccccacatccttgctgatgcctgtcagttaaaaattattttgccattctagtaggggtgcagtaatgtatcagtgtgatttcattttgcattttcctggtattgagattgagtatcttttattgtcatttgtgtgtcctcttttgtgaagtgcctgttaaatctttttatccagttttcattgatatgcttgtttttctgttgatttgtaatacttttttctggttatgtgtcctttctacgatatatatgtattgcatttcccttttttcaatctgtagcttgccttttcgctcttttaatggtgcttattcatgaatggagattctctaactttttttttctttttgagacaagatctcactctgttgcccaggctggagtgcagtggcacaatcacagctgaccgcaaccttgacctcccaaggctcaggtgatcctcctgcctcagcccccaagtagctgggacctacaggtgagcaccaccacactcagctcttttctgtatttttagtagagatggggttttgccacattgcataggctggtctggaattcctggtctcaggtgagacatctgcctcggcctcccaaagtgttgggattacaggcatgagccactgcacccagcctgagattcttaattttaatgaaattatactttatcaatcttttcctttatggttagtgctttttgtgtcctgtttaagaaatcaatgccgaacctaggagtatgaacacatttttctgtgttaaccttatagcaattttattttagtttttgcatttctttttttttttcagacagggcctcactctattgcccaggctagagtgccgtggcaggatctcagctcactgcaacctccacctcctggctcaagcgatcctcccacctcagcctcctgagtagctgcgactataggagtgtgccaccatgcctggcttaattttcatattttttgtagagattgggattcaacatgtttcccaggttggtctcaaactcttgggctcaagtaatcttcccacttcaacctcccagagtgtggggattacaggcatgagccaccccacccggctatgattcactttttactac

SEQ ID NO: 2517 - DNA, 2300 bp, Homo sapien
cggctatgattcactttttactacatggatgtgtctgcttgatccagcaccatttattgaaaagactatccttttccttctgcactgtttggcactttttttcttaaatcggatgactgcatggtcatccaatttatgaaattagtgtgggtctgtttctgtttctggaccaacctgggcaatatagtgagatcccatctctacaaaaaataaaaataataaataaatgagtaaaatttaaaaaataagtgcatagagcagatggagtcataggtgataatttataaatgattgtcagtttcttggctacatacgggtgttggtaattcagatgtgttgggcattcagggaaaatgtattaagggaagtatgtggtgttcacagtgattgctagatgttcattgtgacttgaattagatgttatttgagcctcacagagctacagtcttgactctttatttatttatcttttttacaatttttacaatcttcctgtcaaggcagtaactcttttatacttcattgttcttaggtatacttaattaccaggaaaactttatggatcgtacctaaataagcgttaagccatttaaagggccgacgtgatgtgatgtaaacaatagtattctacataatagttttaggactacatcgaacaattttttttttttttcttgagacagtgtctcgctctgttgcccaggctggagtggagtggtatgatcatgggtctctgcagccttgacctctcaggctcaagcagtctgcccacctcagcttccttagtagctgggtctacaggcatgcaccactatgcccggctaattttctattttttgtagacagggttttcctgtagtgctcagactggtttcaaactcctgggctcaaatgatcctcccaccttggcatctcaaagtgttgggattacaggcataagccatcaccgctggccattttagttttaataatttttatgtttttctaatttaaaagatttactaaaatctcttacagctattatttatgagtatagtattcattgttgttattatgattattttgtatgtgttcaatctcattttcaacataagctcctggaaatttgagattttgtctcttattcaccactgtattctcagtacttgaccttgcctggcatgaaacagatattgaataaatatttgttaaaggaatgaatgaaggaacatactaataccatattcaacaatctccaagtgtcacagttttcaccatctaacaaataaaatagcttgtatacagcagagtcacagtcaacctgacataaaaggaaatgtcaatgaaaaataaacctttgtatgtgttgctgctaagattttggggcttttgttactgtagcataacctagcgaaagctcagcgagacagcctgtagaatatacgtgtacagatagaccagatagaccagtagatgagattccaaagaagcattaactacacccacacactcataattccctaacagaaagaatcgaattcttgttcactaagatctgcctcaagtattactttgtgaaaacttccctggctactcaagtatttagtcaggactctttatttttttttcccccaggctggagttcagtggtgccatcatagctcactaacctctaattcaaggctcaaggaatcctcctgcctcagccttctgagtagctgagactacaagtgtgtgccaccatgctgggccaatttttcattttttattttcagagatggggtcttactatgttgccgaggctggtgaggactgttgattacatatgacaggaacccaaacaattctagttccccaccacctttcaacctgctcctccctgggtcttcccagtctccgtaaacggcagctccatccttcaagttgccgaagccccaaatctcaatattaaccatgatttctctcttttatctcataggcaatctgaaagcaaatcctgtttagatgcaggcgaaggttcctggtgacccaggctctcaccttaccgtcccttaccgtcctcctgagggtgtcctggagcttcagtgctgtgtgttcttggcctccacgctggggctgccaccaactcccactgtccagggcttccagtggactctccgaggtactgatgtagaaacttccccattcggtgcaccaagagcaacctcacacggtgtgggctgaatgaagagctgccagatcccacaggtaaaaaccctgaggcattgccagctcgatggagtcagagagtcctttttctattatgactcagatgtgaaggg

SEQ ID NO: 2518 - DNA, 2300 bp, Homo sapien
gcattccaattgcccaggctttgctgaaacacaggcaccctagtctcacctgagggtcaccaccaatggggatcattccttcagcattcactctcagtattcgtgtacccttgtgacaatgccacagacccgtgtctttcccaatacatctaagcatattcctcactgtttatctcttgtctgtacaacatcatcaaggcagaaacagtttcccaacaggttatattttcttaatggtagtcatgaaatcataaataaaaaaatagaatcatttagtatgttctcttgttttgactttttttttttttttttttgtttgagacagagtctcactctgtcgcccaggctggagtgcagtgacgcgatctaggctcactgcaagctctgcctcccaggttcacgctattctcctgcctcagactcccaagtagttgggaatacaggcgcccgccaccacgcccggctaatttttctttttctttttttttttgtatttttagtagagacggggtttcactgtgttagccaggatggtctcgatctcctgacctcgtgatctgccgcctcggcctcccaaagtgctgggattacaggcatgagccaccgcacccggccgacttctctttactcaggtgggtatatatgccactaatttgtttgattgtgtttttcccttgtttcattttgttttggccaagtaatatcctattgattgtatgattatcacacaatttgatatccatttttctgatgggagacaggtttacttggtaactactgtgcataagtaactatgaatattctcatacaattatttctgtgaagatacatacttattttcctgggtatctatagctagggatggagttgcttggtgaatgggtagaaaatgttggacagagttttgcaaagtatttgtattgttttacatttctatgaaagatgtaggccattttcagttgctctacattcccacacacttaatattttcagtcttttaaactacaccaggtgtgtagtgatatcctaaaatttggttttctcatgcctaatgttcatttagatatcttcttatggaaaatatcttctcaaatttttatattcattgatatactgggctgtttgtcaatttctttgtaataggagttctttatatattttgaatgagtccatttatacatacatattttttgctgtattatatagcaaataattattcctggtctagagatagcgtttaagttgttaaacaacaacataataaggagaagctttttaaaaatgaagtgcaattcgcttgatttcttattgtggtgagtgctacagtatctagtctaagaaatattttcctgtgtcaagttcatgaaactatttcctatttttcctttacaaggtttctaatttaactttcacatcttaagttaatttcaatatatgatggagagtggttaatattaactttttaaaacaacaaatattatttcactcaaaattgttttacttaaaagtctttcatttccccaatgaagggcattggtgtctttgtttttaaaacatttagaagcggcggtgcgagcatgttctcactcatgggtgggaactgaacaatgagaacacttggacacagggcggggaacatcacacaccagggcctgtcatggggtgagggctgggggagggatagcattaggatatatacctaatgtaagtgacgagttaatgggtgcagcaaacaaacatggcacacgtgtatatatatatataatatatatacacgtgtatatatatatataatatatatacacgtgtatatatatatatataatatatatacacgtgtatatatattattaatatatataatatatatattaataatatatattattaatatagatgtaggccattattaatatatatacacgtgtatatattatatatatatatacacgtgtatatattatatatatatacacgtgtgccatgtatatatatatacacatatatacatgtatacatgtatatatattatacaatatatataacacgtgtgtatatatattatatatatatatttttttcttttttaagtggcggagcgagggctactgcacagctagcagagtcgtggcgaggaggacagcacctgcatcgagctctccgcctcccccacccgccagcccaggcggccccaacagcagcgaccagaggagcccctgcagcaacgcaacggccaggtggacacctccatctacagcctcgtggcggacgggacctgttaggacacggccattgttggc

SEQ ID NO: 2519 - DNA, 2300 bp, Homo sapien
tatatatatatacacgtgtatatatattatatatatatatacacgtgtgccatgtttgtttgctgcacccattaactcgtcacttacattaggtatatatcctaatgctatccctcccccagccctcaccccatgacaggccctggtgtgtgatgttccccgccctgtgtccaagtgttctcattgttcagttcccacccatgagtgagaacatgctcgcaccgccgcttctaaatgttttaaaaacaaagacaccaatgcccttcattggggaaatgaaagacttttaagtaaaacaattttgagtgaaataatatttgttgttttaaaaagttaatattaaccactctccatcatatattgaaattaacttaagatgtgaaagttaaattagaaaccttgtaaaggaaaaataggaaatagtttcatgaacttgacacaggaaaatatttcttagactagatactgtagcactcaccacaataagaaatcaagcgaattgcacttcatttttaaaaagcttctccttattatgttgttgtttaacaacttaaacgctatctctagaccaggaataattatttgctatataatacagcaaaaaatatgtatgtataaatggactcattcaaaatatataaagaactcctattacaaagaaattgacaaacagcccagtatatcaatgaatataaaaatttgagaagatattttccataagaagatatctaaatgaacattaggcatgagaaaaccaaattttaggatatcactacacacctggtgtagtttaaaagactgaaaatattaagtgtgtgggaatgtagagcaactgaaaatggcctacatctttcatagaaatgtaaaacaatacaaatactttgcaaaactctgtccaacattttctacccattcaccaagcaactccatccctagctatagatacccaggaaaataagtatgtatcttcacagaaataattgtatgagaatattcatagttacttatgcacagtagttaccaagtaaacctgtctcccatcagaaaaatggatatcaaattgtgtgataatcatacaatcaataggatattacttggccaaaacaaaatgaaacaagggaaaaacacaatcaaacaaattagtggcatatatacccacctgagtaaagagaagtcggccgggtgcggtggctcatgcctgtaatcccagcactttgggaggccgaggcggcagatcacgaggtcaggagatcgagaccatcctggctaacacagtgaaaccccgtctctactaaaaatacaaaaaaaaaaagaaaaagaaaaattagccgggcgtggtggcgggcgcctgtattcccaactacttgggagtctgaggcaggagaatagcgtgaacctgggaggcagagcttgcagtgagcctagatcgcgtcactgcactccagcctgggcgacagagtgagactctgtctcaaacaaaaaaaaaaaaaaaaaaagtcaaaacaagagaacatactaaatgattctatttttttatttatgatttcatgactaccattaagaaaatataacctgttgggaaactgtttctgccttgatgatgttgtacagacaagagataaacagtgaggaatatgcttagatgtattgggaaagacacgggtctgtggcattgtcacaagggtacacgaatactgagagtgaatgctgaaggaatgatccccattggtggtgaccctcaggtgagactagggtgcctgtgtttcagcaaagcctgggcaattggaatgcagggctcctaagattccatgacacccccaccttctaattctgttattgcaactgcagacggttacctggcacgctggccacaatctacctcactcttatcagagtctgcgctactgacagtgctttcagctctgagttgaggcacctcgaaccttgtttttgtggtgaaggatcctaaagtgctgtggggagtgatcacatttttgacaacagtaagttaagaatttcagttacttacatccctcagtcctgattaaacctatttgatttcaccagtttttaacccatcatatgtttgggtttcttctccccagtccctgactccacctcttctgccacaaacgtcagcatggtggtatcagccggccctttgtccagcgagaaggcagagatgaacattctagaaatcaatgagaaattgcgcccccagttggcagagaagaaacagcagttcagaaacctcaaagagaaatgttttctaactcaactggccggcttcctggccaacc

SEQ ID NO: 2520 - DNA, 2300 bp, Homo sapien
gcctgatggctcacacctgtaatcccagaacttttggaggacaggacaggtggattgtctgaggtcaggagttcgaaaccagcctggctgacatggtgaaactccgtctctactaaaaatacaaaaattagccagatgtggtggtgtgtgcctgcaatcctagctacttgggaggctgaggcaggagaatctcttgaatccaggaggaagaagttgcagtgaaccaagattgcaccactgcactccagcctgggcaacaaagtgaaactctgtctcaaaaaaaaaaaaaaaaaagaaaagaaaagataattagggactcggaaagacaaagactgaaggattggtggcaatgagttttggggaaaaaatatgtagatgaaccacagaaaatgagccagagtgtaagaatatttgtgcttaatacgaatgctcacgaaactatcatcaggaaggttatcaaatagatatgaaggtatgaaacaatctctttcaccaggcactacattgcttgcttagaaggctaataaacagcaacattggtggtagcagtagagaatacacataggtttagcaacatgttggactttaccactctcgcttacaaaagcctatttagctgtcaagactattaggtgtccaacacacaagcaacaaagtccaaggctaagcacacaataacatatcctgggtgaataaaccagtcaccttttgtcagacttgttgattttattggagctcctctatgataaaggcaacaaggaattttgtaaatggaatctacctttaaccttgaattacatttgctttacctgacatcatttttctctgatcgccactctccacgggtacattgaatgccttatatatactgccataatatcctgttctacatccttctcttaaaagaacttgttgtataacaaatgagtagatattcattggactcacctggtccaccatttatcctatcactaaccaaaattattattattacagaatggtgaatattttattaaagactcaatcacagtgtcagctggagacaatggcttataaggttgtactcatgctagaggatgtggtggtgtatcctctgaactagtaactaagtataagcttgtctggtgtctcctatataaaaaatacaacaatctttgatatttgttatgaatgttgaagtgactccttttgtcattacatctaatgatccactccaaatacttgtctcttgtctctgagattctaggtttttgcagaattagtaaccaaagggagagtcttagcagtattccattttacaatccatccttcgttagaggatgagagacttctatctagccttttaggttgcctgagacctttaaacaaacagtcaaaaatttaaaatttaaaatgcggctacactgtggcatggggtagtaaatcttgaccttaaaactggtatttgtaagaaaaacagaaagaattcagggatcccctttgatggctcctaattctatacagtcctgtaaatattcctgaagactaaccaggcatggtggtgcacacctgtaatcccagctactccagaggctgaggaagagaatcacttgaacctgggaggcggaggttgcaatgagctgagattgtgccacttcactccagcctgggtgacagagcaagactctgtctcaaaaaaaacaaaaaaaagaagaagaaagaaagaaagaaagaaagaaagaaagaaagaaagaaagaaagaaagaaagaaagaaagaaatgaagactgccacaacttggaagcaaccaagatgtccttcaataggtgactgcataagcaaactgtggtatattcctacagtggaatattattcagtgctaaaaggaaaaaactatcaagccacaaaaagatacagaaaaacaaagacattttgctaagtgaaagaagccagtctgaaaagggtacatactgtgatttcaactatacaacactctggaaaaggccaaactataaagacagtgaaaagatcagtggttatctttgcagacgccaccatcgctgtgagccctgtactatcagccatggtcaactccgtcgtcttttttgaaatcaccagggatggcaagcccttgggccgcatctccatcaaactgtttgcagacaagattccaaagacagcagaaaactttcgtgctctgagcactggagagaaaggatttcgttataagggttcctgctttcacagaattattccagggtttatgtgtcagggtggtgacttcacacgccctaatggcaccggtgacaagtccatctatgg

SEQ ID NO: 2521 - DNA, 2300 bp, Homo sapien
tgagggtcaccaccaatggggatcattccttcagcattcactctcagtattcgtgtacccttgtgacaatgccacagacccgtgtctttcccaatacatctaagcatattcctcactgtttatctcttgtctgtacaacatcatcaaggcagaaacagtttcccaacaggttatattttcttaatggtagtcatgaaatcataaataaaaaaatagaatcatttagtatgttctcttgttttgacttttttttttttttttttgtttgagacagagtctcactctgtcgcccaggctggagtgcagtgacgcgatctaggctcactgcaagctctgcctcccaggttcacgctattctcctgcctcagactcccaagtagttgggaatacaggcgcccgccaccacgcccggctaatttttctttttctttttttttttgtatttttagtagagacggggtttcactgtgttagccaggatggtctcgatctcctgacctcgtgatctgccgcctcggcctcccaaagtgctgggattacaggcatgagccaccgcacccggccgacttctctttactcaggtgggtatatatgccactaatttgtttgattgtgtttttcccttgtttcattttgttttggccaagtaatatcctattgattgtatgattatcacacaatttgatatccatttttctgatgggagacaggtttacttggtaactactgtgcataagtaactatgaatattctcatacaattatttctgtgaagatacatacttattttcctgggtatctatagctagggatggagttgcttggtgaatgggtagaaaatgttggacagagttttgcaaagtatttgtattgttttacatttctatgaaagatgtaggccatttccagttgctctacattcccacacacttaatattttcagtcttttaaactacaccaggtgtgtagtgatatcctaaaatttggttttctcatgcctaatgttcatttagatatcttcttatggaaaatatcttctcaaatttttatattcattgatatactgggctgtttgtcaatttctttgtaataggagttctttatatattttgaatgagtccatttatacatacatattttttgctgtattatatagcaaataattattcctggtctagagatagcgtttaagttgttaaacaacaacataataaggagaagctttttaaaaatgaagtgcaattcgcttgatttcttattgtggtgagtgctacagtatctagtctaagaaatattttcctgtgtcaagttcatgaaactatttcctatttttcctttacaaggtttctaatttaactttcacatcttaagttaatttcaatatatgatggagagtggttaatattaactttttaaaacaacaaatattatttcactcaaaatcgttttacttaaaagtctttcatttccccaatgaagggcattggtgtctttgtttttaaaacatttagaagcggcggtgcgagcatgttctcactcatgggtgggaactgaacaatgagaacacttggacacagggcggggaacatcacacaccagggcctgtcatggggtgagggctgggggagggatagcattaggatatatacctaatgtaagtgacgagttaatgggtgcagcaaaccaacatggcacacgtgtatatatatataatatatatacacgtgtatatatatatataatatatatacacgtgtatatatatataatatatatacacgtgtatatatatataatatatatacacgtgtatatatatataatatatatacacgtgtatatatattaataatatatattattaatatagatgtaggccattattaatatatatacacgtgtatatattatatatatatatacacgtgtatatattatatatatatatacacgtgtatatattatatatatatacacgtgtgccatgtatatatatatacacatatatacatgtatacatgtatatatattatacaatatatataacacgtgtgtatatatattatatatatatatttttttcttttttaagtggcggagcgagggctactgcacagctagcagagtcgtggcgaggaggacagcacctgcatcgggctctccgcctcccccacccgccagcccaggcggccccaacagcagcgaccagaggagcccctgcagcaacgcaacggccaggtggacacctccatctacagcctcgtggcggacgggacctgttaggacacggccattgttggc

SEQ ID NO: 2522 - DNA, 2300 bp, Homo sapien
attatatatatatatacacgtgtatatatattatatatatatacacgtgtgccatgttggtttgctgcacccattaactcgtcacttacattaggtatatatcctaatgctatccctcccccagccctcaccccatgacaggccctggtgtgtgatgttccccgccctgtgtccaagtgttctcattgttcagttcccacccatgagtgagaacatgctcgcaccgccgcttctaaatgttttaaaaacaaagacaccaatgcccttcattggggaaatgaaagacttttaagtaaaacgattttgagtgaaataatatttgttgttttaaaaagttaatattaaccactctccatcatatattgaaattaacttaagatgtgaaagttaaattagaaaccttgtaaaggaaaaataggaaatagtttcatgaacttgacacaggaaaatatttcttagactagatactgtagcactcaccacaataagaaatcaagcgaattgcacttcatttttaaaaagcttctccttattatgttgttgtttaacaacttaaacgctatctctagaccaggaataattatttgctatataatacagcaaaaaatatgtatgtataaatggactcattcaaaatatataaagaactcctattacaaagaaattgacaaacagcccagtatatcaatgaatataaaaatttgagaagatattttccataagaagatatctaaatgaacattaggcatgagaaaaccaaattttaggatatcactacacacctggtgtagtttaaaagactgaaaatattaagtgtgtgggaatgtagagcaactggaaatggcctacatctttcatagaaatgtaaaacaatacaaatactttgcaaaactctgtccaacattttctacccattcaccaagcaactccatccctagctatagatacccaggaaaataagtatgtatcttcacagaaataattgtatgagaatattcatagttacttatgcacagtagttaccaagtaaacctgtctcccatcagaaaaatggatatcaaattgtgtgataatcatacaatcaataggatattacttggccaaaacaaaatgaaacaagggaaaaacacaatcaaacaaattagtggcatatatacccacctgagtaaagagaagtcggccgggtgcggtggctcatgcctgtaatcccagcactttgggaggccgaggcggcagatcacgaggtcaggagatcgagaccatcctggctaacacagtgaaaccccgtctctactaaaaatacaaaaaaaaaaagaaaaagaaaaattagccgggcgtggtggcgggcgcctgtattcccaactacttgggagtctgaggcaggagaatagcgtgaacctgggaggcagagcttgcagtgagcctagatcgcgtcactgcactccagcctgggcgacagagtgagactctgtctcaaacaaaaaaaaaaaaaaaaaagtcaaaacaagagaacatactaaatgattctatttttttatttatgatttcatgactaccattaagaaaatataacctgttgggaaactgtttctgccttgatgatgttgtacagacaagagataaacagtgaggaatatgcttagatgtattgggaaagacacgggtctgtggcattgtcacaagggtacacgaatactgagagtgaatgctgaaggaatgatccccattggtggtgaccctcaggtgagactagggtgcctgtgtttcagcaaagcctgggcaattggaatgcagggctcctaagattccatgacacccccaccttctaattctgttttgcaactgcagacggttacctggcacgctggccacaatctacctcactcttatcagagtctgcgctactgacagtgctttcagctctgagttgaggcacctcgaaccttgtttttgtggtgaaggatcctaaagtgctgtggggagtgatcacatttttgacaacagtaagttaagaatttcagttacttacatccctcagtcctgattaaacctatttgatttcaccagtttttaacccatcatatgtttgggtttcttctccccagtccctgactccacctcttctgccacaaacgtcagcatggtggtatcagccggccctttgtccagcgagaaggcagagatgaacattctagaaatcaatgagaaattgcgcccccagttggcagagaagaaacagcagttcagaaacctcaaagagaaatgttttctaactcaactggccggcttcctggccaacc

SEQ ID NO: 2523 - DNA, 2300 bp, Homo sapien
gccaggcctgatggctcacacctgtaatcccagaacttttggaggacaggacaggtggattgtctgaggtcaggagttcgaaaccagcctggctgacatggtgaaactccgtctctactaaaaatacaaaaattagccagatgtggtggtgtgtgcctgcaatcctagctacttgggaggctgaggcaggagaatctcttgaatccaggaggaagaagttgcagtgaaccaagattgcaccactgcactccagcctgggcaacaaagcgaaactctgtctcaaaaaaaaaaaaaaaaaaaagaaaagaaaagataattagggactcggaaagacaaagactgaaggattggtggcaatgagttttggggaaaaaatatgtagatgaaccacagaaaatgagccagagtgtaagaatatttgtgcttaatacgaatgctcaccaaactatcatcaggaaggttatcaaatagatatgaaggtatgaaacaatctctttcaccaggcactacattgcttgcttagaaggctaataaacagcaacattggtggtagcagtagagaatacacataggtttagcaacatgttggactttaccactctcgcttacaaaagcctatttagctgtcaagactattaggtgtccaacacacaagcaacaaagtccaaggctaagcacacaataacatatcctgggtgaataaaccagtcaccttttgtcagacttgttgattttattggaactcctctatgataaaggcaacaaggaattttgtaaatggaatctacctttaaccttgaattacatttgctttacctgacatcatttttctctgatcgccactctccacgggtacattgaatgccttatatatattgccataatatcctgttctacatccttctcttaaaagaacttgttgtataacaaatgagtagatattcattggactcacctggtccaccatttatcctatcactaaccaaaattattattattacagaatggtgaatattttattaaagactcaatcacagtgccagctggagacaatggcttataaggttgtactcatgctagaggatgtggtggtgtatcctctgaactagtaactaagtataagcttgtctggtgtctcctatataaaaaatacaacaatctttgatatttgttatgaatgttgaagtgactccttttgtcattacatctaatgatccactccaaatacttgtctcttgtctctgagattctaggtttttgcagaattagtacccaaagggagagtcttagcagtattccattttacaatccatccttcgttagaggatgagagacttctatctagccttttaggttgcctgagacctttaaacaaacagtcaaaaatttaaaatttaaaatgcggctacactgtggcatggggtagtaaatcttgaccttaaaactggtatttgtaagaaaaacagaaagaattcagggatcccctttgatggctcctaattctatacagtcctgtaaatattcctgaagactaaccaggcgtggtggtgcacacctgtaatcccagctactccagaggctgaggaagagaatcacttgaacctgggaggcggaggttgcaatgagctgagattgtgccacttcactccagcctgggtgacagagcaagactctgtctcaaaaaaaaaaaaaaaaaaaaaagaagaagaaagaaagaaagaaagaaagaaagaaagaaagaaagaaagaaagaaagaaatgaagactgccacaacttggaagcaaccaagatgtccttcaataggtgactgcataagcaaactgtggtatattcctacagtggaatattattcagtgctaaaaggaaaaaactatcaagccacaaaaagatacagaaaaacaaagacattttgctaagtgaaagaagccagtctgaaaagggtacatactgtgatttcaactatacaacactctggaaaaggccaaactataaagacagtgaaaagatcagtggttatctttgcagacgccaccatcgctgtgagccctgtactatcagccatggtcaactccgtcgtcttttttgaaatcaccagggatggcaagcccttgggccgcatctccatcaaactgtttgcagacaagattccaaagacagcagaaaactttcgtgctctgagcactggagagaaaggatttcgttataagggttcctgctttcacagaattattccagggtttatgtgtcagggtggtgacttcacacgccctaatggcaccggtgacaagtccatctatgg

SEQ ID NO: 2524 - DNA, 2300 bp, Homo sapien
acagagaagcagaaatgtttatgtggcctcctgccaaaaacaatcacttgcacttatttctagtactccagaagacagtaatagaagtttttcaatttagaaaaacatttacagcaaagaaaaaaatctctgtaaacttcctgcttatccaatctagtgaattgtgatgagccatataaattcatttagccaccttatgaaagacttaatccaaagtcacttctaacttctagaagagctaatgtattataatcacagttgtgaaagactcaaaggccagaaatgtcaaggtgtggtctatatcctaagtccagaaaaaaaaacaaaaagcaacacgtacaggccaaatgattgccaatttcttctgcctacgtcatctttcttcactatagcctgaaattacatttcatgtttgacaattctcagcaaggagacaaaacaagcttatgagtaaaataatagaaagcagagccacagagaggacgagaggcaggagtcatctcccaagtccaagttcaacttctatattattagacaaggcctcagtgtctttgaactgcaaggaattaatattgattgtagcatgagtaaaatctatcttctactcatcatgaaaagtcacagtcgttttgtttaaagactccagaattattataggcagaaacaagcaggttccacacctatttggtgaaacgaggaatcaggaatgagcattcccaagagaatacaattacaaaagtaaaatcacctagagtttttgggctgcttaaaaaacccagaaagaagtgccaaatgggaaaataatcaaattcagtggaaaaactcacttgaaggtatcatggtcagctgggtttccacccctttgttgcacttcaaatcctgtgtattccacaaagacttgctcctttctaaaggctatggttcacattcaacagaatagcagcaaccaccatgagcctgagggctggctagtctttagtattctgccttattcaaagaaaggatcatttccctcattcctaaagatctcccaggtccatcacaaaaaaaaaaaggagcagcagccaggcgcaatggctcacacctgtaatcccagcactttgagaggccaaggggggagggtcacctgaggtcgagagttcaagaccagcctggccaacatgatgaaactaaaaatacaaaaatcagccgggtgtggtggtgtgtgcctgtaatcccagctactttggagctgggtaactggcagaggttgaacaatttgcaggtctcagaagacaggaaaatgtgggaaagtttgaaattccaagagacttgttgaatggctttgaccaaaatgctgataatgatatggacaatgaaatccatgctgaggcagtctctgatggagatgaggaacttgctgggaactggagcaaaggtgactcttgtcacctttgataagatggtggttgaggagaggtcttggcaagcagtgatgtgtgaatgtagtgaggggcctgaaaatggaactcagagaggacactgggttttagaggctgaaactacagaaagtccgctgcgttcaaggcctgcttccaccaaaatctagcagtgtggcctcaaaccatttcatttctcttggcctcagtttctacatctgcaaaatgggatttataatcccaccccagcccacagaattcagagttatatgagaaggctagaagagctcacctaccaagggactcttttaatggcaaggtggggaaactgaggcaccgagagggctagggctctgctagctgtcacccagagtctgatggacctgagatgagaaaccagaactcctgcccctagttcccccggctttcctcaggctggggagtgagtgcggtgagatagaaagggcaagccctcctgctgtttctctctggacaggggcgggatgctgggtgaagggtgaaaggaagaggctggagaagggagaaaagctccagctcacactaagtctgaattttttttaaatgcggactccgtggcccctcccttacccgccccaatcctctctgaagtcctggttgtgaggggccaagtcccaaagtctgctgctccgcctctctgtgtgcagagccatggggccttcacaggctgcagtgggtcccgagcccccagggctgtgcctgctggtcctgaccaagatcgcggctgccgaggtcagtccagcgccaagggcacagggccagggcaggcggggcagggctacccgaagcgcatagaggctgctggtgtcaacgtgacgtcttctggggcgcctggcatcccta

SEQ ID NO: 2525 - DNA, 2300 bp, Homo sapien
tcaagaaaaaaagcatccttaacatgactccatatgataatcagctcattaaaactcatgcatatggactacatatcttgcatgtacttaaaattatggggtggagacaatgtgcaagcacacgagggccaaagtaactaagcaacccacccatcaatctaaaggcaaacactggctaaagattaggcatccttgggaagagaagaaaaaaaaacacacataaaaagacccaaagtacaccaaactaatactgatctcatctgccacaggtcagcccactctccccactccaagaatgttactgtgcttaataaacttttgctttgctttgctgctttgtgtgtgtcatgtacattcttcgtttgggacaccaagagcctggaactgcatggcaccatctggtaagaattaggatttttttttcctaagggttaacaaaccaactctttggaaagatttgcttcactactattatcaatcaacagcctgatactttccctcccttttgtggttttgacaaagcaagcaagcagcattccctcctgataagagaccaccgacctaggaatgattctggccagactacagaggatgtacagtgagagttttcatgtcttctgcttcagcttttgatgtcagagggccacaaactccactctcagatgattgctaatgccaccattttatgaacatgggccccatggagaggcacaaagctcaactgcacttctgcacatttttcctcttataaatattcatattggaatattatttggtactgcttccatgaaagacacatttgcagaatgtactcaaattagaagcattatataaacactataatgtagcagtggtgcatccagttctctcttttttttttttttttttttttgagacagagttttgctcttgttggcatgatttcagttcaccgcaacctctgcctccgggttcaactgattctcctgcctcagcctcccgagtagctgggattacaggcatgtgccaccacacccggctaattttgtatttttagtaaggatggggcttctccatgttggtcaggctggccttgaactcctgacctcaggtgatccgcccacctcggcctcccaaagtgctggaattataggcatgagccaccatgcccagcccccagttgtctatactatacaaatatctgcagtgtagacatttccacaatgaccaaagatatgtgtacaagaatggtgactgcagcattctttgtaatcctaaaaccaaaacaacttcatcccaaaaacattttttcttttttttttttttttgagatggagtcacactctgttgctcaggctggagtgtagtgatctcagctcactgcagcctccaccttccaagttcaaatgattctcctgcctcagcctcccaagtagctgggattacaggtgcatgccaccacgcctggctaaaacattttgaaaagggttaaataaatcatgcacaaactgaggaaaaatactgttttcaaaaatggtggagaggatcactatgatgatgaatgattccactggtcacattattaatagaacaatcagtaaatccaggcacatcctggagatagtactgaactcctattactaaaatatgaaaaaatggaggcacgtacattactcgtttaagcgcataagggactgaattagaatttatcacaccaaaagtgggttcctaggtatctgtttcaggatcctgagttacacaggtgtaaacccgccatttcaggagatacccggttaagaatcggatgggggaggggggctggcccttgacatggatcagtcataaattaggggtttggggctggcccttaacatggatcagtcataaattagtggcttggtactccgggaagataaaatcttccccatttgtctagtgattgacaatgcgtgaatgctttaaaagttgcaatcagcgtccctggatgggctcgaaccaccaacctttcggttaacagccgaacgcgctaacccattgcgccacagagacaagcactaccagttctaataggcaatataggaagggcacactcactaaacttcctccgtcccttctattctcagcgcccgcctggcaggacgactgagcaaggctttggaaaaccagagagattagagcggtgagttgcgctggtcacattggatacctgcgcgttaggagattctggagccagacggagagccgaatggccttcgcccgccctgcccctctcttgcttcagaagcccccagaaactccgcggtcggcgacccagcccgagc

SEQ ID NO: 2526 - DNA, 2300 bp, Homo sapien
gctgatccagtccattcagcagtccgttgaaaggctcctagtctaaacctgtggcgtctaaacccgtggcctctgctgcacaatctctgctgactcctccccctgaggttattctcagctactttctattgctataaaatattatagtactaaatctggtttctggggttttgtatagtttttgttctgttttacagggttgttttcccccttctccatgcccaccctttctctgccatcctgcatcctcttcaactctctattgaaaaatgaacaaatgttcagaacagaggaagtagagtggtggcaccatcaaaggcaggaagggccaggagaacctgatgggagcggggatacagacctggttctagcttccagtcttccagtcactaactttctgctgtgtgcagggcacaatggaagtaaacaccacccactatatatcccctgtgcctggcatacagaatcattcacacatgttgaccgaagggtttcctttgcttctaggggattatgtatcattttgggaggaagcatgtattctgtgaggttgtttagtttatgtccaagcgccatttactaatgtatccctgctctttgctttcggtatgtatgttcttcctccacctgacaattgtgcccccaatggtggccaggcagcagcataccaaagagatgtgctgcaagatttcagaggtgggtgagtgagacatgggaaagtggactcaggtcttgaaagagtcaggagtggccagggcaaagaacatgaactggtgctggaatgaaggattctgggaaggttgtggagacctggctggtagctagagcagagatgatggaatccaaggaaacaacttctctccggtgaatcaagatttcttcagtggacacttagtcccagctctgatagcccttacccctgtttcctgccacagtgtgggtcatatgtattctttatcatatgaggagagtgctaattaatgtgtcatttattttgtgagcatgctaatacatatattcatattccaatttagtgaaaaaaaactgatctagagatgccccttttcgaggtgacagcatggctctggagagatggccacaggaaccatggcagtggaccaggttgctgggagaaggcaaaaggggaggcacccaagctgagaaggggctaagcactcagcccctgggaccaccaacagcaggcctgagacacatgcaggaaaccagacagcctggatgaaatttctttcaagcaaggccagtggtccctgacagaacaccagaggtttccccctaaatcctttcgcatctgtaccatttccatcttagttggagctctttgttctcatccttgcaatacgcagagaaaaaaaaatcacaggttgttgattgtttgaagatagggtattgctctgtcactcaggctggagtgcagtagcatgatcacggctcactgcagcctcgaacatccgggctcaagtgattctcccacgtcagcctctggtgtagttgggaccaaaggtgtgccaccacagaggcagggttttgccattttgcccagaatggtctcaaactcctgagctcaagggatcagcctgcctaggcttcccaaagtgctgggactacaggcatgagacaccttgcccagccaaccagagttctttttgatgccgatattttactcggactccacatctaggtaggaattcatgttttcaagtacggacattgctctacacaatcctctcctttcctgatcactaaattagagtaaatcactgtcctgaagaaggtacccttgggagagtgggttggcctgtctttccaccctttcttgactctgccctcaccttcaagcctctttctggcctgtgttcaaggtccagaggcatgcttaagacctctctgtgtggctcttcttgaagagtcaggaaccccatacttcctgttcagcgggcagagaagcttcaagccgcacagttttgggtatgctaggatcccacaaggcacagatgtgcagtggcccacgaagtgagtttgtgggtctccagttacctgcagccctttctgctcctgtaggttaaagggcaattgcctttttttttctgtccaggaaggaccccagaatgttctgagtcagaaagacagtgaatcctctcctctgggtcagtggggagggagagagagagatttcagagggaagaaagcagaaaaagatgtcacaaaattgcctaatcaaaagttaccatgatgcctgcctcatctggaactgggctcccagtctctagtgagggagacat

SEQ ID NO: 2527 - DNA, 2300 bp, Homo sapien
gccgagatggtgccactgcaccccagcctgggcgacagagcaagactccctctaaaaaaaaaaaaaaaaaaaaaaaaaaaaaccgcactgaggggaaaagtcaatgtgaaattctacaaaagctgaaaattcactaccaccagccattaccacaaaaaaaaaaaaaagttgaaggagtcctccaggcagaacgaaactgacatcggatgaaaatctggttgtacaaaaaaaaaaaaaaaaaaaactagacatgacatctaatagacgaatatataattttaacatctgactgtttagctgggcgtggtggctcacgcctgtaatcccagcactttgggaagctgaggcaggcagatcacttgaggtcaggtggttgagaccagcttggccaatatggtgaacccctctctctactaaaaatacaaaaattagtccggtgtggtggcccacgcctgtaatctctgctactcaggagtctgagtcaggacaatcgcttgaacccgggaagcagaggttgcagtgagccaagattgttccactgcactccagcctatctggaacctagtttgatctggagggatcttattttataggaggcttggagggggaccttttgctttgtgtacttataggatgcacaagacacaagggaacaatctctcactttttaaatacagtgataggcctgaggagaaacaactgcaattttttttttttttttttttttaatgagatgggattctcactggtcttgaactgagctcaggcgaggcttcccctacgtcggcctctcaaagtgttgggattaataggcgtgagccaccgcgcctgaccacaactaaccaacatttaaaagcacgtccctgggtaggctcgaaccaccaactttccggttaacagccgaacgcgctaaccaattgctccacggagataacctcagttggtcgctttcatctcaacatagattaagcaatcactaaactctaggggttgccattcgctttctgcaggacaactgtgcagactacaaagcttcggaaaaccggagaggctgagtcgactaatcgtgttgttgcacgttagaaacgcttgcattgcctgactctgaaaccagaagggcggccgaatggccttcaccctccattaaccctcgcctccttcagaagccagtgcctctggaaatgcctggatctgcgaccccagcctgagcctagtagggcccaagggaagctgaacgccccgacggctctcatggtaggtagctctttctgtttttttgcgccgccttcaggcaatcatctactccgcttgctatcccctcactcaactcggcttcagtagatggggttggtggggcgggagtgggaaagaggcaggggagtcaaaagggaaaacctgaaaagaaggagggagaagaagcaggggagaccaggacgagacaatgggacagcccaggatgccggtgcagagggcagcggctggatgcagagaagatgggacacgtatcagaatggactggagaagacgtgagggaaaatcacaagaacctgtagctgcccaagaataaacacgtaaaaatcgcataaatgtttttacattaaaaaaaaaatcgggagaccgggcgcagtggctcacgcctgtaatcccagcactttgggaggccgaggtgggtggatcactcacttgaagtcaggagttcgagaccagccgggccaacatggtgaaagcccgtctctactaaaaatacaaaaattagctgggtgtggtggcgacgcttgtagtcccagctactcaggaggctgaggcaggagaatcgcttgaacctgagaggcagaggtggcagtgagccgagatcgcgccactgccctccagcctgggcgacaaagcgaaattctgtctctcaaaaaaaatgcataaataaataaaagaggggtggggaagcaaaacgacgggcagtaggtgtggggcgcattgggattctatagtggttagtaccctgccttgtgcctgcagcaacctctgttctaatctgaatcctggtacagtcagactctatcttggacccactggggcgaacccacgagtcttttggtttgcttttaattcctgcaccagctgcggcctttatctgcagccagaaagcagggtttaccgctggccccacagcgccatacggtctggggaaaagaaggaaacccaatagtacacaaacaaaggcccaaagagaaaccttccaagtgctctatgcctcacggtttagcagaaaatatcaagcaactctcaacctagctggtctgtag

SEQ ID NO: 2528 - DNA, 2300 bp, Homo sapien
gccgggccaacatggtgaaagcccgtctctactaaaaatacaaaaattagctgggtgtggtggcgacgcttgtagtcccagctactcaggaggctgaggcaggagaatcgcttgaacctgagaggcagaggtggcagtgagccgagatcgcgccactgccctccagcctgggcgacaaagcgaaattctgtctctcaaaaaaaatgcataaataaataaaagaggggtggggaagcaaaacgacgggcagtaggtgtggggcgcattgggattctatagtggttagtaccctgccttgtgcctgcagcaacctctgttctaatctgaatcctggtacagtcagactctatcttggacccactggggcgaacccacgagtcttttggtttgcttttaattcctgcaccagctgcggcctttatctgcagccagaaagcagggtttaccgctggccccacagcgccatacggtctggggaaaagaaggaaacccaatagtacacaaacaaaggcccaaagagaaaccttccaagtgctctatgcctcacggtttagcagaaaatatcaagcaactctcaacctagctggtctgtagcttccacaaatgaaatactgtattcattgcagcctttctggttgagatatttcaaatatttggtggagcttttaatgagacggagagacactctcgagtgtggaagaaaaacatgagggggtgtgaggataaggcgactttaggacagaaaaaacaaagagacaaggaagccacgtaaacgttttcgggtaggcgtgaggcgatgtcagttttgaaccccgtttatgttaggtagagagcgcagccctcttctagcacaaacaccgtttcccacattgaagaaatcacagagatcagcaactctagagtgcgatgaagaagcttcactctgggagaacccccttcgtgaccacggtctctttcctgccaggtaagtgggaatgagcgcatgccctgcagggacagcacagcgtcctcgccctggtcggacgctcagggtcaccaccctacccactgcccccttcgccattcttccaaaccactctctgccaaagattccaccgacagtcaccccacacgacaacccaggccgcctttcagcagtggctcccgccccgcaaccacgcgccctctcacccccgcggttctgcccgccgcctctgtccagtctgtgcacttcacctccctggctcccgctctcccctgagcttacagtggacgcggggttcttccaaacccctcttgggaatactgaatggaaaagggggagcgtgcgcaagtgcttggtagagtgtagacattgtgggatttgactgtggtaccatcgctttgacgtcctagtgctgatttttacacctgcattctgcttagggcactggcaacagttttccgtttgtgcctactccacctgctgtctttgttgggtcagcgaacatcgcctccctctaccgctcaatcagcaaaagggaccgcccttgaggacctcacccgccgctcactcccctcccaacttcgcgggcatcgcctccggtcgcctcttccgaaggcctaacgagcatgttagctgcgaacggaggtgaggaggctccgctgactgaccggtgcccacgtccagggcacgcacaaacgccatgacttggcttggcctctctcttagttattcacagctcagcccgataggcacctctggggcggcgacggcaaagagggtgcgcttattaagtgcagctccacggggactggcctctctgcacggctgtgtacacctgagcgagacgctcagtcgctctctaaagccgcttctgcggatgacagacacggagataaacgtgagaggtggcccaccacgacttgccctcctttgcccgggtttgcccctcgctgcggaggctgttctacatctggcccttggagcaggccggctgacagcgtggtaaaggaagatttctgcgggagggcggccagtgcaaaacaattccctgaccgggaatcgaacccgggccgtggctctttcagcaccgaatcctagccactagacaaccatgcagatgcggaaagctgctttctctcccttcttcgacctgaagcgacactttcctgtgctctaggaggacttgggtcttgtgagagtcgccctttgctcctggagtcgtctcacaaggccgttcactccctgctttcttcaaaaaaagaacctgcaggcgacacaccaaggactccacgagggagtcctgagtactggagcgagttgcggccacgcggccgca

SEQ ID NO: 2529 - DNA, 2300 bp, Homo sapien
actcttaagcaccatctactggactgcatcctaaactggaccactgaattcaaaaaccctgctaccaaagggcttagtgctagtccatgagataagtttcctgagaattccgtaccctcagcccccaacaagggttagtgtgttagcttttacttccaatacatcaccacaacaagcagcatctgagaaagctactgctcagaagctatccacaaccaagaaacccatacaaagctagggctccctgaaagcacccagaaatgaagccaaacaatcatacacaacatacaccacagtcataccatcaagggaaaaaaagaataaaaacattaaaaatcctcatccaaacaataccaaattcaaaactaagaagcaacagcttcctcggatgagaaagaatcagtgcaataactccagtgtacccagagtatttacacacttccaaaggatcacactagtttctagcaatggatcctagccagactgaaatgtcggaaatgacagataagaattccaaatacggattgcaagggaactcaatgagatccaagaaaaagttgaagtccaatgcaaagaaatcagaaaaacaatacagaatatgaaagacaagaaaactatattaagaaaaatacaaatagaacttctataattgaaaaattcactaaaggaatttcaaaatacattgaaagctttaataatagactagacaagcagaagaatgaatttcagagcttgaaggttggtctttcaaattcacctagtcagacaaaagtaaagaaaaatgaatttttaaaaatgaacaaagcttttgagaattatggggttatgtaaagcgatcaaacctatgacttattggcattcctgagagagaagaagaaaagtaagcaacctggaaaacatatttgaaggaataattcaggaaagaattttcctaacctttcaagagagattgatattcagatacaagaaattcggacaacttctgcaagatactatacaagataaccagtgaaaagcatacagtcatcagacttcccaagataaatgtgaaagaaaaaatcttaaaggcagctgaagaaaagggccagattatctataaaggaaatcccatcagactaacagcaaacttttcaaaggaaatcttacaagtcagaagaaactggggcctatttttagccacctaaaagaaaaaaaaaactgcctgtcaaagtttcatactctgccaatttaagcttcataaatgaaggagaaatagtttttcccagacagagaaatgctaagggaattcattaacaccagatagtctctataataaatgttcaaaggagttctaaatatggatggtacttgctaccataaaagcacatgtaattacaaagctcgtacaccttataaagcaatatataattgggtctacaaagcaactagcttaacactatgacagaaataacacctcacacatgaatattaaccttgaatgtaaatggcctgaaagttccacttaacgggcatagagtagtccaggtgtggtggctcacacttgtaatccctgcagtttgggaggccaaggtgggtggatcacttgaggtcaggagttcgaaaccagcctggccaacatggtgaaacttcatctccactaaaatacaaaaattagctgggcgtggtggtgggcgcctgtaatgccagctactcgggaagctgaggcaggagaatcacttgaacccaggaagcagaggctgcagtgagccaagatcgcaccactgaactcagcctgggactccatcaaaaaaaaaaaaaaaaggcatagggtggcaaattgggaaaaaaaaaaatcaaactttccatggcctttaagagagacctatcttacatgttatagcccccaggggctcaaagtaaagtgatagagatctgttatgcaaatggaaaacaagaaaggtcaggagttgctattcttgtatcaagtaaaacagactaaaccaacaagagttaaaaaaagaaaaaagacaaagaagggcattacataatcagaaagcattcaattcaacaagaagatttaactatcctaaatatatatgcacctaacattgaagcacccaaatttataaaacaaatacaactacacctaagcaaagaaatagacagccatgctatactagtggaggacttcaacatcccactgacagcactagacagatcactgaggcagaaacctaacaaggaaactttggacttcaattggactcttgaccaaatgaacctaatagatgtctatagaatactctatccaacaaccacag

SEQ ID NO: 2530 - DNA, 2300 bp, Homo sapien
atttaaacctacatcaatggctatttcctcaacatttggaaacaacaatacttattagaaagaaagtattttatccttccaggctatagatcttacattcctcttacacaacaatcctaattccctcatgttatcctgatcaatgaaatgatttcacttatttttcaaagaagtagctattttactacaaagcaggaatcgcaaggcttggggtgggcactgttatactccatcagtgagtatgtaaaggaaatcaaactgtctgattttgaatcctgcttctattttttacaaccttggacaaattactgatttcctctttcactaggtttatcatttgtaaaatggagatactagtgtctactcatggattattgtgaggcttaaataagaaaacatgtatcaagcatatttgtctggcatgtaataagcactctaaaatttatgcagcgatgaggataatgatcctagacaatctgatagcatcttatccaaaggaaaaaatgcgcatttcctttgagtaagcactactgattctaggaatgtgtcctaaggaaaaaataagtcaaatgtttaaaggtagtcacaagactattttggtagtaagcagtcttttttactggtcacacagtaaaaaattagaaataacctacatgttcatgaagagaagttggtgaaataaattatggtacatgcatacagtagaaaactttggagacaaaatagtaaaatagttacagatataggctttgaatataaattttaacaagctgaggcttctctcgtctcttcagaacaccctgagttcttcccggcctttcttccttgcttttcatttgtgtcagtcagctcttgcttgtacagcaatcttcaaatctcagtagcatataaaggtaagcatttagttctcacttacaagtttgcagggcaggtgaggcagctctgcctcaagccacaatgtctaggacagctctgtttcgcacggtggctgactagctaaaaaatgttcttgtctcagcaatcacaggagaacaagagggtgagagataatgtgtgaagcttcctaagtgctaagtttgaaattagcaccatgtcatttccattcacatttcgctggccaatgaaagtctcatgatgagccacagtcaagagtcagagacgtaccctcatgaggctgtggagagagtgtagattcagggagcggtgagaaactggggccagtacaccaatctacagcatgatttgtcatcatttttcattctctgctagtaagattgccaaagtctctctgcactcattgaattcatcctagtttccatttagctctctttctctcttaccacaatacctaaaaatctttttatggggttacaactctgtctcaggagccacctcagtttggtggcacagagctccccacttgtactctgaaactcttttcttgaagatattgttatccatgtgcatgagttatttttcttctccatagcatccacattaaacaattaattaccttggatttagccaaaataaacactccaaattcatgatgtctttcaggaagagagtttgttttcttttttaaccaaaatgggagattgatcctgtctgtgtcccctagaggagcagaggctggtttgtattagggcagctcttgtagatgagtaacttttcccatggcctcatagaggctgatatagatacttctggattcaaatgattgtttggaggcattagccaggcattgaaccaattataaagagtgaggttttgccatattctaaccgtaagaaacagaaacggtagagggtaaaaatagaatagaatgtcaacacaactttagccttttccctggattctgagagttcataacctgaaaatcagagattcaaactgggagagatgggctaacaggtatgagcatgggaaaagcatgtttcaaggatttgagatgtatttcccagaaaaggaacatgatgaaaatggtcagaaaaggcaatttccttcctcttttctaatttggctctggagccaccagcagaacctcttcaatatcttgcatgttacagatttcactgctcccaccagcttggagacaacatgtggttcttgacaactctgctcctttggggtaagttggactcagaggggacagttagaagggtacaggctgtggctgttgtgagtcaagagttttgtcttcctgtggtaactctgggtagaactcatgagtatgaagcaacttgtatctgtgcttccacggtttattagagcttattttatgaaaaggatgggaaggg

SEQ ID NO: 2531 - DNA, 2300 bp, Homo sapien
acattgtaaaggagaaatgaatttctggtgttgtccttctttgatttagaagcttaacatctgcaggacctaattggccattgatgtgagggtgaggaagaaggaaccacatcgcagggagaaaagactaaaggaaggcagaggctctaatatcaggtcaatataggtcagcacactatccacatgaaatggctttggctgggttccaaggtcaagtaaataagatcaattttttcattccttcaattacatatttttttgctaagcttcggtcattcatggtatacaatgcatctaacttgctgagcaaaatgctagacatgaaataaatgttagctatggtagaagagcttcagtaacaggtaacctgaaacaggctgatagctcatagaagggcatgcttgaattcggggaaaaaaaaaaatctctgttaaaatgggatgcaaaacactttatacattgcttttacaaaagttagactaatttaaaggaaagtcttcaaaagcaatccgtgatcgataaaattacagaaaaaaatcaggaaagggggaaataataagggaagaaagattagcagaacaatcttccgccccagtaaagaggactgaattttaaccaatgagatcacaagtttgaaaatttccttttcaggcccaatcaagaggaggctatgtctataaatacgactgcctagaccctctcgtatcaatgagacagcatggcccgtactaagcagactgcccgcaagtcgaccggcggcaaggccccgaggaagcagctggctaccaaagcggcccgcaagagcgcgccggccacgggcggggtgaagaagccgcaccgctaccggcccggcaccgtggctctgcgggagatccggcgctatcagaagtctacggagctgctgatccgcaagctgcccttccagcggctggtacgcgagatcgcgcaggagtttaagacggacctgcgcttccagagctcggccgtgatggcgctgcaggaggccagagaggcctacctggtggggctgttcgaagacacgaacctgtgcgccatccatgccaagcgcgtgaccatcatgcccaaggacatccagttggtcagccgcatccgcggggagcgggcctaaggtatatttttaagtggtcgatctaaaggctcttttcagagccactgccgttttcatcaagagcagctgtaccggctctccatctgatgtgcgtctgccttgcgcagcggtcaggggccaggggcactcgtggtgggtgacgttacagaacccaaagcccagccgtgagttggccggcagtagagaaagccgcagaggcacggtccttgtggttccggccgagccttttcacgctggtttaaggctagaggtccggctcccaattctgtgggtaaagttttgcatgggggcaagagactatggggagtttctagatgtggaagatcctgagtgtaagggtggggcgagtcccttaaaaattataaacccgtttcctggtttatttaggaactataagcttaattaaagctcagcatcttcctcattgcatactacaggcggtgtccaagccagaatagtaatttaagcgggcgggagtaaatatctggcgatttttaaaaatgtgtgggtgaggtagtatttcaaggaagagaaaaaaatttccacaaagtatagaataaaaatgcaaaaacgaggcaagagagttaacttgtctagctggcgttaagatttcttccgtatgcaagtctaatggaaagtgaaaaccaagaaaaaaacctcaagccgttgaaactatcgcttcacctagcttaaaactggttagtgtgaaatggaccattctgattggataacaagacttttgttacagtgaccattaaggaagcaagactagaatctattatttacatagactccaccccctctgacgacaccgttgtaagttaaccaattaaagcgcagcactttgcgagtcttcatttgcatacaggctctataagtagcgcataaccagcccgttttgcggtagttcggattacttctttaagtctctgttctcttttttcgcgcaaaaatgccggatccagcgaaatccgctcctgctcccaagaagggctccaaaaaggctgttacgaaagtgcagaagaaggacggcgagaagcgcaagcgcagccgcaaggagagctactccgtttacgtgtaggaggtgctgaagcaggtccaccccgacaccggcatctcgtccaagaccatgggcatcatgaactccttcgtcaacgacatcttcgagcgc

SEQ ID NO: 2532 - DNA, 2300 bp, Homo sapien
ctattgttcttaggatttggaacaaaatgcttctttctttgacaaaataaatgttttctttaaagaactcttgattgatcctggaccattgtagaaactgaagtcctatcaatgcaaaaaaatatgacaacatgagctgcttatcatgaaataagtgttttccaattaactatcctgcttcatcagcaggtaggaataatagaatctatacctatgtcttcatgggaagttctctatggccagttgattagtgagggaaaaattgagcctgatttacagaagtcactgtacaacatcacagcaacagccaaaagtagattgcttaggcattataacctacgtgaatgcaattttaaaagaaattcagcctatgtaattggttgtccacgatgtctagaaggagagatattattgatgtatatgtggcagctaataatttgtctagataattagggacttggggccaggcctgatggttcacacctgtaatcccagaacttttggaggacaggacaggtggattgtctgaggtcaggagttcgaaaccagcctggctgacatggtgaaactccgtctctactaaaaatacaaaaattagccagatgtggtggtgtgtgcctgcaatcctagctacttgggaggctgaggcaggagaatctcttgaatccaggaggaagaagttgcagtgaaccaagattgcaccactgcactccagcctgggcaacaaagtgaaactctgtctcaaaaaaaaaaaaaaaaaagaaaagaaaagaaaagataattagggactcagaaagacaaacactgaaggattggtggcaatgagttttggggaaaaaatatgtagatgaaccacagaaaatgagccagagtgtaagaatatttgtgcttaatacaaatgctcaccaaactatcatcaggaaggttatcaaatagatatgaaggtatgaaacaatctctttcaccaggcactacattgcttgctcagaaggctaataaacagcaacattggtggtagcagtagagaatacacataggtttagcaacatgttggactttaccactctcgcttacaaaagcctatttagctgtcaagactattaggtgtccaacacacaagcaacaaagtccaaggctaagcacacaataacatatcctgggtgaataaaccagtcaccttttgtcagacttgttgattttactggagctcctctatgataaaggcaacaaggaattttgtaaatggaatctacctttatccttgaattacatttgctttacctgacatcatttttctctgatcgccactctccatgggtacattgaatgccttatatatactgccataatatcctgttctacatccttctattaaaagaacttgttgtataacaaatgagtagatattcattggactcacctggtccaccatttatcctatcaccaaccaaaattattattattatagaatggtgaatattttattaaagactcaatcacagtgccagctggagacaatggcttataaggttgtactcatgctagacgatgtggtggtgtatcctctgaactagtaactaagtataagcttgtctggtgtctcccatataaaaaatacaacaatctttgatatttgttatgaacgttgaagtgactccttttgtcattacatctaatgatccactccaaatacttgtctcttgtctctgagattctaggtttttgcagaattagtacccaaagggagagtcttagcagtattccattttacaatccatccttcgttagaggatgagagacttctatctagccttttaggttgcctgagacctttaaacaaactgtcaaaaatttaaaatttaaaatgcggctacattgttgcatggggtagtaaatcttgaccttaaaactggtatttgtaagaaaaacagaaagaattcagggatcccctttgatggctcctaattctatacagtcctgtaaatattcctgaagactaaccaggcgtagtggtgcacacctataatcccagctactccagaggctgaggaagagaatcacttgaacctgggaggcagaggttgcaatgagctgagattgtgccacttcactccagcctgggtgacagagcaagactctgtctcaaaaaaaaaaaaaaaaaaagaagaaagaaagaaagaaagaaagaaagaaagaaagaaagaaagaaagaaattaatgaagactgccacaacttggaagcaaccaaggtatccttcaataggtgactgcataagcaaactgtggtatattcctacagt

SEQ ID NO: 2533 - DNA, 2300 bp, Homo sapien
ttatctgagatttcttatctgacaaacgcaacctttaaaagagcctaaatggtcaatcactactcttaactgcacttgtgtacataaccagtacaagtttaatgagattaaacttatttagcaaacaaatcaatctgactttgattatctttgacagaaatgagagtgaatatagagagaaaagttatgtttcgggagaaaactgcagtgcacccaatattagattctagctgttttttttttttttttcctgaggttttattatctgcctgcaatctgcaatagatcctcaatttttctagtttactacaatatttagctacaatactccaaattaatatttcatttttttcctgctattctggcttggaatcactaaaattataaacttttcttttcttgaagtccttcaaactgaaactggatgacttgacataagcttcagaaaaattaccacaacagcttgtgtgtggcccatctttatggcattcaaactgcaaactaatccaatgcctcttctcactccagctgaagatattaaaagcccagcatctagaaatcttattgatcagctgccctctgggctcagaaactgtctttatagttcgttccaactattaatcttttttaattttatttttatagaaactaaacttcccacattaaaggcctgatagctcacactatccaggaaatatcctctgctaccaagtcccaacagatgattcaactggtccttaatgaataaaaggtgatcaaacaagaaaagagacttatactgtttgaaggaaagatgaatgtctcttctttccttaaacaagaagtagtactaacaaagattccttgcttggccaaactttagtcagatgtctatcttccttgcaaaatccaacttttttttttttatgtcgtacaatgtgatgttttgttctttttaaaatttattattattatactttaagttttagggtacatgtgcacattgtgcaggttagttacatatgtatacatgtgccatgctggtgcgctgcacccactaactcgtcatctagcattaggtatatctcccagtgatatccttcccccctccccccaacccacaacagtccccagagtgtgatgttccccttcctgtgtccatgtgttctcattgttcaattcccacctataagtgagaatatgcggtgtttggttttttgttcttgcgatagtttactgagaatgatgatttccagtttcatctatgtccctacaaaggacatgaactcatccttttttatggctgcatagtattccatggtgtatatgtgccacattttcttaatccagtctatcattgttggacatttgggttggttccaagtctttgctattgtgaatagtgccgcaataaacatacgtgtgcatgtgtctttatagcagcatgatttgggtacctacccagtaatgggatggctgggtcaaatggtatttctagttctagatagaatgtttcctcttataactcatagtgaatatgactggacaatgaaactattttgtaatttctttcctgaaagataaaggcgttagaacatagaatctttcattgattctacagaatcttaagactccttcagagatggcagtcattcgtaccgtgctgaacatcatgttgtcacggtcagaatcagaactaaattgattaagggtctgaaacagtttggcactcttgggcacttattctgataagaaagctgatgagacagggtaatgaaaagaggctgcaagaaatgaccattcatgcattcagccaacatttaggccaccctcctgtattccaggcactgtacgtggcactgagaatgcaaagcaaaacgagtcatggtctactggcgggagccttctcagcggagaaaagaccaataagaaaagtgtctgctggagacctctcctagggcataaaccaatatagaggtggggcagctacgtcaccctgaggtgtccttaggcagaacagaaagtgagaatcagagcagtgtctcatttctgaacacctggattgtagctttccctggactgactgtcaaaggaggtggttttaaaaagcaagccaaacaggtttccatcctttaggaagaccctggaatgtgccagttgattctgacaatttctcatgaacagaaacacctaggaagggagaactggtgagtcttttcaagaggaggaagtccctcaaaaggggctgtgtttcgcaaacagcgccccaaaagggctgaaatacttcgatctggaggaaaaagactcaggcactgagggaa

SEQ ID NO: 2534 - DNA, 2300 bp, Homo sapien
tcacactatccaggaaatatcctctgctaccaagtcccaacagatgattcaactggtccttaatgaataaaaggtgatcaaacaagaaaagagacttatactgtttgaaggaaagatgaatgtctcttctttccttaaacaagaagtagtactaacaaagattccttgcttggccaaactttagtcagatgtctatcttccttgcaaaatccaacttttttttttttatgtcgtacaatgtgatgttttgttctttttaaaatttattattattatactttaagttttagggtacatgtgcacattgtgcaggttagttacatatgtatacatgtgccatgctggtgcgctgcacccactaactcgtcatctagcattaggtatatctcccagtgatatccttcccccctccccccaacccacaacagtccccagagtgtgatgttccccttcctgtgtccatgtgttctcattgttcaattcccacctataagtgagaatatgcggtgtttggttttttgttcttgcgatagtttactgagaatgatgatttccagtttcatctatgtccctacaaaggacatgaactcatccttttttatggctgcatagtattccatggtgtatatgtgccacattttcttaatccagtctatcattgttggacatttgggttggttccaagtctttgctattgtgaatagtgccgcaataaacatacgtgtgcatgtgtctttatagcagcatgatttgggtacctacccagtaatgggatggctgggtcaaatggtatttctagttctagatagaatgtttcctcttataactcatagtgaatatgactggacaatgaaactattttgtaatttctttcctgaaagataaaggcgttagaacatagaatctttcattgattctacagaatcttaagactccttcagagatggcagtcattcgtaccgtgctgaacatcatgttgtcacggtcagaatcagaactaaattgattaagggtctgaaacagtttggcactcttgggcacttattctgataagaaagctgatgagacagggtaatgaaaagaggctgcaagaaatgaccattcatgcattcagccaacatttaggccaccctcctgtattccaggcactgtacgtggcactgagaatgcaaagcaaaacgagtcatggtctactggcgggagccttctcagcggagaaaagaccaataagaaaagtgtctgctggagacctctcctagggcataaaccaatatagaggtggggcagctacgtcaccctgaggtgtccttaggcagaacagaaagtgagaatcagagcagtgtctcatttctgaacacctggattgtagctttccctggactgactgtcaaaggaggtggttttaaaaagcaagccaaacaggtttccatcctttaggaagaccctggaatgtgccagttgattctgacaatttctcatgaacagaaacacctaggaagggagaactggtgagtcttttcaagaggaggaagtccctcaaaaggggctgtgtttcgcaaacagcgccccaaaagggctgaaatacttcgatctggaggaaaaagactcaggcactgagggaaggggagggtgcacatctggagtaatttcaaggctttttccgtgttatctgaggtggcaacaagtaaagatttgttcgttttattatttttttaatttttaaagattttcttttccccccttttccccctcccggccactccggtttgtgtttgccacaagactcataattcctttagaaagtggagtcgaattcataaaagtgatggggggagagcgcggagagggaaggctgggagccccagggagtcttcactacctacactgccgctcagctcccggcgcgagtggaggtcggggtggggagacgcgacgcctgcctgggatggctgacactctgcgagccccggcggcccgcggccgggccgggtgactaggcggagggcgcggagggtccgcggcgggcgggtggcgctgcagcagcctgggcacggctgccgccgcccgcgggcgagagtgtgcacgggtgtggaaggccggagtgcgggccgtgaggggtgtgcgcgcttgagccggagcggggctcgcccctcgtcggctcccgccgcccagccggtgatcgctctccggccgtccccggcaccctcggtcccccacggcggttggtccgggcgggggaaggagaaagtgagactcggtttcatcaccaatccatcgccagaaggggaggaaattggaat

SEQ ID NO: 2535 - DNA, 2300 bp, Homo sapien
acaacaggttctggagaggatgtggagaaataggaacacttttacactgttggtgggactgtaaactagttcaaccattgtggaagtcagtgtggcgattcctcagggatctagaactagaaataccatttgagccagccatcccattactgggtatatacccaaaggactataaagcaactgctttctaagtgggatggctgaagcaagagaccttaaatcacttgactgtcttcacaaaacagaactgaagcagaaccagaagtcccctgatagcctttcagggacaccacctacaaatacaccgtaatccctcatactccacacgccacttcagggaaagggacatgaggcaggaatacaaatatataccatctgtgacacttcctaagctcctggcttcagagtagccatcctgataattattctttaaagtccacattataaatgtgcaagttaagtgagttatggaaatcattccagatactggttcaccagtaacataagtttagccctaaatattgtcataagttctctgataggcgcatgtgatttaagctggtgctctgtcaagactagacttaggcgttttatcctttttatgacattatgtatgttgaagagaatatatgaatatatataaaaccttcattatcacattattctcaatccagcattttctcagcccctgattttcatgttagttcagcattcttacatctttacagattttcatctaagactacatttctattgttttatataatcagcccccctaagatcaacatgtccacattttttggcaaagacaaagcctactgatttcaggatcattattttcctttttcaaaagcacaaacccaaactgagaaataaatcaagagaaattctccttttttctatgctaatttagaagtagagtctttatttcttttcaaacccaaagagaatcagacatacaatatgaatttatctactttcacttgctcagactgagaggaaagattaatattttcaggctgttagtcaaaactgttcattcaaatattatttaataaaatccaagaaccagctaaaaagtcgcttaagctaagaaaccttcaccagcctcatgggaaattgtgtacagttttccactagaatagcctataaatgcttactgaaaatgtctaagttcatatcttggtaactaacattttaattcaatctgcagaataatatatgcctctttagtgctaagatatgaatattagaggcattctttcttaaaatttctatttagttatactttcacaaataactatataatattaaaattctgcatgtggcataaaacatattttaatggagaaggtaatgtgtagggagtttatttctgtttgctattagaacttgtgtttattcttggttaaaaaaactgcagattacaacatagaaaaaaacaaaagtatgttgtatatctcttacagtagaagataaagagtagttctaaatttagaaaggaaaaataaatatacacagtgaaaatatgtgtcagtgagatgttaatcaaagatcaactattgctgagaccagcaatattaaatccctgcacaattactcatattataatgagaattttaaaaagaaaatatgaacacataacataatgaaggcagaagtcactctcatccttcatctttgtattcccaattcaggaagctggtatagtatcttcattataattactattcaacaaacatttgtaaaatgaatgaataaggaatgaatgatgagaaaaatgataaacatctccctctgtctcctgggagttaactgcactactttcttttaaatttaattaattctcaatgtccttgtaaaatagccaaagggaaaatgtatttacattactctaaatattgatgcaatctacaaaaagtgttaaacaacttcctcaaagtaaataaaatgttcacaatccagctaggataaaaggatttaaatcatttcctaggtagagggctttcaattagagcccctgctgcattaaccatgggaactcatctcactctcttcatgatggagccctgagtgttgctgctaatctgtactctaccattctaatgcttttaaggttccttttcagcccttcctcctcgtaatccacaaatactgagaccaaggcattttttgggtcagtcctaatttcaagcattctatcctgccctccccaaatgaactcacacttattagaccatatgttcctatattagttcaggaagggggaaaaaatgttaatcacacttgtatataagaga

SEQ ID NO: 2536 - DNA, 2300 bp, Homo sapien
gctgatccagtccattcagcagtccgttgaaaggctcctagtctaaacctgtggcgtctaaacccgtggcctctgctgcacaatctctgctgactcctccccctgaggttattctcagctactttctattgctataaaatattatagtactaaatctggtttctggggttttgtatagtttttgttctgttttacagggttgttttcccccttctccatgcccaccctttctctgccatcctgcatcctcttaaactctctattgaaaaatgaacaaatgttcagaacagaggaagtagagtggtggcaccatcaaaggcaggaagggccaagagaacctgatgggagtggggatatagacctggttctagcttccagtcttccagtcactaactttctgctgtgtgcagggcacaatggaagtaaacaccacccactatatatcccctgtgcctggcatacagaatcattcatacatgttgaccgaagggtttcctttgcttctaggggattatgtatcattttgggaggaagcatgtattctgtgaggttgtttagtttatgtccaagtgccatttactaatgtatccctgctctttgctttcggtatgtatgttcttcctccacctgacaattgtgcccccaatggtggccaggcagcagcataccaaagagatgtgctgcaagatttcagaggtgggtgagtgagacatgggaaagtggactcaggtcttgaaagagtcaggagtggccagggcaaagaacatgaactggtgctggaatgaaggattctgggaaggttgtggagacctggctggtagctagagcagagatgatggaatccaaggaaacaacttctctccggtgaatcaagatttcttcagtggacacttagtcccagctctgatagcccttacccctgtttcctgccacagtgtgggtcatatgtactctttatcatatgaggagagtgctaattaatgtgtcatttattttgtgagcatgctaataaatatattcatattccaatttagtgaaaaaaaattgatctagagatgccccttttcgaggtgacagcatggctctggagagatggccacaggaaccatggcagtggaccaggttgctgggagaaggcaaaaggggaggcacccaagctgagaaggggctaagcactcagcccctgggaccaccaacagcaggcctgagacacatgcaggaaaccagacagcctggatgaaatttctttcaagcaaggccagtggtccctgacagaacaccagaggtttccccctaaatcctttcgcatctgtaccatttctatcttagttggagctctttgttctcatccttgcaatacgcagagaaaaaaaaatcacaggttgttgattgtttgaagatagggtattgctctgtcactcaggctggagtgcagtagcatgatcacggctcactgcagcctcgaacatccgggctcaagtgattctcccacgtcagcctctggtgtagctgggaccaaaggtgtgccaccacagaggcagggttttgccattttgcccagaatggtctcaaactcctgagctcaagggatcagcctgcctaggcttcccaaagtgctgggactacaggcatgagacaccttgcccagccaaccagagttctttttgatgccgatattttactcggactccacatctaggtaggaattcatgttttcaagtacggacattgctctacacaatcctctcctttcctgatcactaaattagagtaaatcactgtcctgaagaaggtacccttgggagagtgggttggcctctctttccaccctttcttgactctgccctcaccttcaagcctctttctggcctgtgttcaaggtccagaggcatgcttaagacctctctgtgtggctcttcttgaagagtcaggaaccccatacttcctgttcagcgggcagagaagcttcaagccgcacagttttgggtatgctaggatcccacaaggcacagatgtgcagtggcccatgaagtgagtttgtgggtctccagttacctgcagccctttctgctcctgtaggttaaagggcaattgcctttttttttctgtccaggaaggaccccagaatgttctgagtcagaaagacagtgaatcctctcctctgggtcagtggggagggagagagagagatttcagagggaagaaagcagaaaaagatgtcacaaaattgcctaatcaaaagttaccatgatgcctgcctcatctggaactgggctcccagtctctagtgagggagacat

SEQ ID NO: 2537 - DNA, 2300 bp, Homo sapien
agccgggccaacatggtgaaagcccgtctctactaaaaatacaaaaattagctgggtgtggtggcgacgcttgtagtcccagctactcaggaggctgaggcaggagaatcgcttgaacctgagaggcagaggtggcagtgagccgagatcgcgccactgccctccagcctgggcgacaaagcgaaattctgtctctcaaaaaaatgcataaataaataaaagaggggtggggaagcaaaacgacgggcagtaggtgtggggcgcattgggattctatagtggttagtaccctgccttgtgcctgcagcaacctctgttctaatctgaatcctggtacagtcagactctatcttggacccactggggcgaacccacgtgtcttttggtttgcctttaattcctgcaccagctgcggcctttatctgcagccagaaagcaggttttaccgctggtcccacagcgccatacggtctggggaaaagaaggaaacccaatagtacacaaacaaaggccaaaagagaaaccttccaagtgctctatgccttacggtttagcagaaaatatcaaacaactctcaacctagctggtctgtagcttccacaaatgaaatactgtattcattgcagcctttctggttgagatatttcaaatatttggtggagcttttaatgagacggagagacactctcgagtgtggaagaaaaaaatgagggggtgtgaggataaggcgactttaggacagaaaaaacaaagagacaaggaagccacgtaaacgttttcgggtaggcgtgaggcgatgtcagttttgaaccccgtttatgttaggtagagagcgcagccctcttctagcacaaacaccgtttcccacattgaagaaatcacagagatcagcaactctagagtgcgatgaagaagcttcactctgggagaacccccttcgtgaccacggtctctttcctgccaggtaagtgggaatgagcgcatgccctacagggacagcacagcgtcctcgccctggccggacgctcagggtcaccaccctacccactgcccccctcgccattcttccaaaccactctctgccaaagattccaccgacagtcaccccacacgacaacccaggccgcctttcagcagcggctcccgccccgcaaccacgcgccctctcacccccgcggttctgcccgccgcctctatccagtctgtgcacttcacctccctggctcccgctctcccctgagcttacagtggacgcggggttcttccgaacccctcttgggaatactgaatggaaaagggggagcgtgcgcaagtgcttggtagagtgtagacattgtgggatttgactgtggtaccatcgctttgacgtcctagtgctgatttttacacctgcattctgcttagggcaccggcaacagttttccgtttgtgcctactccacctgctgtctttgttgggtcagcgaacatcgcctccctctaccgctcaatcagcaaaagggaccgcccttgaggacctcacccgccgctcactcccctcccaacttcgcgggcatcgcctccggtcgcctcttccgaaggcctaacgagcatgttagctgcgaacggaggtgaggaggctccgctgactgaccggtgcccatgtccagggcacgcacaaacgccatgacttggcttggcctctctcttagttattcacagctcagcccgataggcacctccggggcggcgacggcaaagagggtgcccttattaagtgcagctccacggggactggcctctctgcacggctgtgtacacctgagcgagacgctcagtcgctctctaaagccgcttctgcggatgacagacacggagataaacgtgagaggtggcccaccacgacttgccctcctttgcccgggtttgcccctagctgcggaggctgttctacatctgacccttggagcaggccggctgacagcgtagtaaaggaagatttctgcgggagggcggccagtgcaaaacaattccctgaccgggaatcgaacccgggccgtgacgctttcagcaccgaatcctagccactagacaaccatgcagatgcggaaagctgctttctctcccttcttcgacctgaagcgacactttcctgtgctctaggaggacttgggtcttgtgagagtcgctctttgctcctggagtcgtctcacaaggccgttcactccctgctttcttcaaaaaaagaacctgcaggcgacacaccaagggctccacgagggagtcctgagtactggagcgagttgcggccacgcggccgca

SEQ ID NO: 2538 - DNA, 2300 bp, Homo sapien
ttctagctcttcttacatgaatttaaacctacatcaatggctatttcctcaacatttggaaacaacaatacttattagaaagaaagtattttatccttccaggctatagatcttacattcctcttacacaacaatcctaattccctcatgttatcctgatcaatgaaatgatttcacttatttttcaaagaagtagctattttactacaaagcaggaatcgcaaggcatggggtgggcactgttatactccatcagtgagtacgtaaaggaaatcaaactgtctgattttgaatcctgcttctattttttacaaccttggacaaattactgatttcctctttcactaggtttatcatttgtaaaatggagatactagtgtctactcatggattattgtgaggcttaaataagaaaacatgtatcaagcatatttgtctggcatgtaataagcactctaaaatttatgcagtgatgaggataatgatcatagacaatctgatagcatcttatccaaaggaaaaaatgcgcatttcctttgagtaagcactactgattctaggaatgtgtcctaaggaaaaaataagtcaaatgtttaaaggtagtcacaagactattttggtagtaagcagtcttttttactggtcacacagtaaaaaattagaaataacctacatgttcatgaagagaagttggtgaaataaattatggtacatgcatacagtagaaaactttggagacaaaatagtaaaatagttacagatataggctttgaatataaattttaacaagctgaggcttctctcgtctcttcagaacaccctgagttcttcccggcctttcttccttgcttttcatttgtgtcagtcagctcttgctcgtatagcaatcctcaaatctcagtagcatataaaggtaagcatttagttctcacttacaagtttgcagggcaggtgaggcagctctgcctcaagccacaatgtctaggacagctctgtttcgcactgtggctgactagctaaaaaatgttcttgtctcagcaatcacaggagaacaagagggtgagagataatgtgtgaagcttcctaagtgctaagtttgaaattagcaccatgtcatttccattcacatttcgctggccaatgaaagtctcatgatgagccacagtcaagagtcagagacataccctcatgaggctgtggagagagtgtagattcagggagcggtgagaaactggggccagtacaccaacttacagcatgatttgtcatcatttttcattctctgctagtaagattgccaaagtctctctgcactcattgaattcatttagctctctttagctctctttttttagctctcatttagtttccatttagctctctttctctcttaccacaatacctaaaaatctttttatggggttacaactctgtctcaggagccacctcagtttggtggcacagagctccccacttgtactctgaaactcttttcttgaagatattgctatccatgtgcatgagttatttttcttctccatagcatccacattaaacaattaattaccttggatttagccaaaataaacactccaaattcatgatgtctttcaggaagagagtttgttttcttttttaaccaaaatgggagattgatcctgtctgtgtcccctagaggagcagaggctggtttgtattagggcagctcttgtagatgagtaacttttcccatggcctcatagaggctgatatagaaacttctggattcaaatgattgtttggaggcattagccaggcattgaaccaattataaagagtgaggttttgccatattctaaccgtaagaaacagaaacggtagagggtaaaaatagaatagaatgtcaatacaactttagccttttccctggattctgagagttcataacctgaaaatcagagattcaaactgggagagatgggctaacaggtatgagcatgggaaaagcatgtttcaagaatttgagatgtatttcccagaaaagcaacatgatgaaaatggtcagaaaaggcaatttccttcctcttttctaatttggctctggagccaccagcagaacctcttcaatatcttgcatgttacagatttcactgctcccaccagcttggagacaacatgtggttcttgacaactctgctcctttggggtaagttggactcagaggggacagttagaagggtacaggctgtggctgttgtgagtcaagagttttgtcttcctgtggtaactctgggtagaactcatgagtatgaagcaacttg

SEQ ID NO: 2539 - DNA, 2300 bp, Homo sapien
tactattatggctatgttgtggtaaactgaggaaaggagaggccaatatggaaaaacaggaggattgttgtttattttaggtacgcatggctcagcaggtttgcatctaaaaagctgagcactgaacaaagacagagtggggtttttataagcggccttacagacacaaaacaaaagcagttaatcatacagtgacaggtcacataatctatagcataacataacttgtgaccttgcatagctggtgaccttgtagttgcatcgaaagaaaaacaaaaactggctaaatacagacatttgtaaataatgcttaagaggcctggggaaagagtaagagtaaaagaatctttctctttttcttcctccaaccttgctctggaagggaggggtgtctggagcctattcctttgaccttggctatttggacagcgttatcttataactgtccttgaagtaagcttgctaggcagaggaaaacttgttctcttctttttaacccttgccttgccacattctgggccttagcttttacttttcttggagtgaataaatgcagtacttattatttatttgttttaaatttctgcctcagctgtgagactggtaataatcatttatttatttatttatttatttatttatttatttatttatttatttttgagacagggtttccctctgccacccaggctgaagtgcagtggtgcgatcttggcttactgcagcctctgcctcctgggctcaattgatcctcctacttcagcctcctgagtagctggggctacaggcgtgtgccactggctaatttttgtattttttataaagatgaggtttgccatgttgcccaggctggtctccaacacctggctcaagtgtctgcctaccttggcctcccaaagtgctaggattacagacatgaaccaccgcacctggccaataattacttctgaagattctgacaataccatttacaataacacaaaaatgaaggacctaagaatacatctaacacatctagagagaatattataatattgttgtgagacattaacagtgacataaataaatgagagttataccttgtttatggattggaaagtcagtgttggaatgatatcaatcctccctaaccctctccctcccgcccctgccccaaaaagatcgacagatttagtgcagtcccactccaaatccaatagttttctcaggagaatttgacatagttgatctctctttcttgagacgttttattctctgttttccctcctacctcactggtactccttatcaatatcctttgctaccacctcttctacgcaacctctaaaatgtggcatatttcatggctcagccttagacctttttctatctgtacttcccccttacattgttctttctagtcccctgactctaaataccacatctatatgatgattggcaaatttgtatctctagtctaggattcttcatatatccattgctttttcaagagttacacttaaatgtcaaataggaatcttaaaatgtccaatatgaaacattcgcttcttgctaccccgttcccctcctccaccaacttgctgtctcaattctgtcaatggaatatttattgctttgacccaaaatctacgtgttccccccccttctctttctcacattccctacatctaatcaataagaaactttgttgacacttcctacaaaacatcttccaaatgtgaccactctcaatagctccactgttaccatgttagtccaggctgccgctgcctctcacctagactcctaactggtctctttgcttctactgttgtctctctacagcccgaggaatctgtctccaactaagcctggtggcagtgaggaccgtcagccccctcccagccagctgtcagctatacctccattctgtctggttctcagggctggaatcgctgggcaggtctagctaatccttggccctcctaggaaaatattcctaaatcctgaaggcatttagctaggaaagatccagaatggacccaactcttcctgttttaccccaaaccggttggtctgctttggggattacttctcaggctaggaacctctgagtgttctgaaacgggcctgaactcttacagaagctcttgtggccctaggatgaatttagaggtctccatacccagcctggaaggtgaagaacgacccctaacgacccaccctcccaacctaatgccggttctgctccacttgtccactctggggagctgtgctttggcttggaagctctcggattgaaggatgggcccaagaccctc

SEQ ID NO: 2540 - DNA, 2300 bp, Homo sapien
ctggcacatttggaggtagcatgtcctgatccccttaaaaagggaactgcacagacaccgtatctctgattctgcccagggtcctgtgccctctgacaccagaaatcaccacttctctcagccttgttttgcggttgttttatcatgttgcaatttggttatgtcttttctaatagtgtttaaaagcaatcaaaggcaggaacttttccttttataaactattgttgagcttatattggacactgaactaagtgtcagtttacaaaaatgaataaacaaaaatcactgccagtagggaacacacagccaagatgggggagtagtaagatgtaaagagatgtaaaataatgtgatagattcggccagagttactaaagagtcagaaaagggcaagcatgtttcttccctgtcctgaagcagccaagggagaggaagatatctgttgccaatgctggggtgttggtttaggcatgtagatgctgtgatgcgcagtggaaccgttcaatgagcagacaggagaaccagctttatgcggggagggagagaattgctcccctcatcccccgtgagtcacaccctggagattataagtttaaacattttgatttcgggagattttgagttttgggcttaaaatgactgaagaaccaccaggtggatctacgtgtctcgagtccagaagtctgaatacagatttacgatttatgagcacacagaaggtggatccaagggagagattaaacagggcacagaagagtttttaaaaataatatttttcgggaaaaaaaccccaacaaaacacgattctttcagcagaaaccagaagattttctcatagactctcctacagagagccctgataaagtaataaacatgctaacagtaagaaccccaaccaatttcatagggcagtttgcggtaactactcccagtatggagcagacagtcctcttgcaaaacccgatttagcaaactttgctagctccatgtggggcctccaaaggacacagctgggcactaaatcctggctgaaaacaaaggccgatttagaggatccgtagaaacggatgcacagaatatccctcagtcttctctatgtagcaggccctccatatacgcgggttccccaagaccgaaaatattaaacaaatgaatttcttttttaaaaaaaagtacaacaaaagatagtaaaaataaaaacagtataacaattacttacatagcatttacactggattaggtgttacgaagtaatttagagactatttaaagtacacgggaggatgtgcatagttatgtgcaaatactacgccactttctatgagagacttgagcaacctggattttggtatcggcgggggccctggaccaatcccctctcagttctaccgagggagaactgttttgtttcttccagcacggctttgaccgacagtgtgttgggattcgctgacgtccatgagaaagcttggcagcatgctgagaccaattttcccagggccagaattctcctgtgtgagctaaaatacagtggctcggtccaacaaaacagagcctggagccaggaattatggcgaacctgctccctcccgtcctcccttggcgcacagatccctggcgccgccgctcttgaggtcgcctctcgcgtgtcgacctcatcgtcggaacggcgcttcctgaagctttatataagcacggctctgaatccgctcgtcgggattaaatcctgcgctggcgcgctcctgccagtctctggcctccatttgctcttcctgaggctccctccagagacctttcccttagcctcagtgcaatgccttccgggcgtcctcagaccagacacaggccaaagccactacagaatccggaagccccggttgggatctgaattctcccggggactgtggcgtagcggttaaaaaaaaaaaagagtgagagggacctgagcagagtggaggaggagggagaggaaaacagaaaagaaatgacgaaatgtcgagagggcggggacaattgagaacgcttcccgccggcgcgctttcggttttcaatctggtccgatactcttgtatatcaggggaagacggtgctcgccttgacagaagctgtctatcgggctccagcggtcatgtccggcagaggaaagggcggaaaaggcttaggcaaagggggcgctaagcgccaccgcaaggtcttgagagacaacattcagggcatcaccaagcctgccattcggcgtctagctcggcgtggcggcgttaagcggatctctggcctcatttacgaggagacccgcggtg

SEQ ID NO: 2541 - DNA, 2300 bp, Homo sapien
tggcctcctgcagcgccatcacggccgagctctggaagcgcaggtccgtcttaaagtcctgcgcgatctcgcgtaccagccgctggaagggcagcttgcggatcagcagctccgtggacttctggtagcgccggatctcccgcagggctacggtgccgggccggtagcggtgcggcttcttcaccccgcccgtggccggcgcgctcttgcgggccgccttggtggccagctgcttcctcggggccttgccgccggtcgacttgcgagcagtctgcttagtacgggccatagcgaaccaaaacacaggcttaccagcgcagcggcggggagaaaaacgagctcctagccccgccgcagccgtctttataagcacagtcttttcccgattgggcggaacaataattgaaaatcccgcgctggctgtccattggctgtgacgtcacccgtcctaaagtcaccggttggcttgggcagattcctccctaatcccgcccaccccgcctcactttctacttaccagttggcgaagtttcgcaagcttgtttttcccctttccttcagggtgaaagtcattttccattgcagctttgtcagattgttccctttccgcccttcgcttccttagaacacactgcccgcaataccccccctttcttgctgcgccctacagctcccgcgtggaacctcattcttccatttgccccccgcccccagttgctacttggcggatcgtttttcgcctgtcgggtgccttttgggtgggagaggtgcccgcccccaggacgcaagattccgcctccgaggcccttactctccgccgccagggcgctttggaaaacaaaacagaaactaagacttaagtcagctcagtgaagccaagacccagctccgccacactagcgagcactacccgctcagggccctccccatcgggggtggggacgaggagcacgtcccgctggtgccagactaggtctaagtgtccggccatagcctgcggaaaccactagggaagcgcgcgctccgcgcgcaacacttcagcgcgttgggtactgcccgcggcgctggtgtttgtgactgtgtggagcggaccgtggcggcgcccaggacgtttggtgcctgcacctgccctgggaagtcctaggactggggacccactcatcgaagagccaaggcagttacgtgctccagatggaagacggcgcgcacacacacacaccccgccccgccccgccccgtcccgtcccgtcccgtcccgtcccgtcagctccaggttcgctattcactactgaggaacgctggactgagagtggccagcattaacaactcttttatttgaaaacgtgggtggctctgaaaagagccttttgagttcacaggtgccccttcgagacgcgggccgggctgggcccacttgggccggacgtcagcctcacttgccctttgccttgtggtgactctccgtcttcttagggagcagtacggcctggatgttaggcaagacgccgccctgggcgatggtgactttgcccagcagcttgttcagttcctcgtcgttgcggatggccagctggaggtgacgagggatgatgcgcgtcttcttgttgtcccgagccgcgttgcccgccagctccaggatctcggcggtcagatactcgaggaccgcagccatgtagacgggcgcgccggcccccactcgctccgcgtagttgcctttgcgcagcaagcgatgcactcgccctaccgggaactgaaggccagcgcgggacgagcgcgacttggccttggcgcgggccttgcctccttgcttgccacgaccagacatgacagcgatagtagtcaccgagagaaactcctgcctggcgatcgggaaagtcgccgaaaacgccgctgcttcacctttttatagacagaacggcgattgtccacggagcactttgattggctcaagcaaattttgtcccgatagccaataggatagctcagccagaatccactcatttacataatctcgtctccctcgcattgcgcgccgcggaaaactcgcgaaccataacgcagcgtcatgcgcacagcctctgtaagtacacagtcgtttccggtagaccccgagcctaccgctctgcttgcgttctcgggggtcggtgtcggtcttgggtctggccatgcctgagcctgcaaagttcgcgccggctcccaagaagggctccaagaaagccgtcaccaaagcccagaagaaagacggcaagaagcgcaagcgcagccgcaaggagagctactccatctacgtgtacaaggtg

SEQ ID NO: 2542 - DNA, 2300 bp, Homo sapien
cgcttgttgtagtgcgccaggcgggacgcctctcccgcgatgcgctcgaagatgtcgttgaggaaggagttcatgatgcccatggccttgcaccagatgccggtgtcggggtggacccgcttcagcaccttgtacacgtagatggagtagctctccttgcggctgcgcttgcgcttcttgccgtctttcttctgggctttggtgacggctttcttggagcccttcttgggagccggcgcgaactttgcaggctcaggcatggccagacccaagaccgacaccgacccccgagaacgcaagcagagcggtaggctcggggtctaccggaaacgactgtgtacttacagaggctgtgcgcatgacgctgcgttatggttcgcgagttttccgcggcgcgcaatgcgagggagacgagattatgtaaatgagtggattctggctgagctatcctattggctatcgggacaaaatttgcttgagccaatcaaagtgctccgtggacaatcgccgttctgtctataaaaaggtgaagcagcggcgttttcggcgactttcccgatcgccaggcaggagtttctctcggtgactactatcgctgtcatgtctggtcgtggcaagcaaggaggcaaggcccgcgccaaggccaagtcgcgctcgtcccgcgctggccttcagttcccggtagggcgagtgcatcgcttgctgcgcaaaggcaactacgcggagcgagtgggggccggcgcgcccgtctacatggctgcggtcctcgagtatctgaccgccgagatcctggagctggcgggcaacgcggctcgggacaacaagaagacgcgcatcatccctcgtcacctccagctggccatccgcaacgacgaggaactgaacaagctgctgggcaaagtcaccatcgcccagggcggcgtcttgcctaacatccaggccgtactgctccctaagaagacggagagtcaccacaaggcaaagggcaagtgaggctgacgtccggcccaagtgggcccagcccggcccgcgtctcgaaggggcacctgtgaactcaaaaggctcttttcagagccacccacgttttcaaataaaagagttgttaatgctggccactctcagtccagcgttcctcagtagtgaatagcgaacctggagctgacgggacgggacgggacgggacgggacggggcggggcggggcggggtgtgtgtgtgtgcgcgccgtcttccatctggagcacgtaactgccttggctcttcgatgagtgggtccccagtcctaggacttcccagggcaggtgcaggcaccaaacgtcctgggcgccgccacggtccgctccacacagtcacaaacaccagcgccgcgggcagtacccaacgcgctgaagtgttgcgcgcggagcgcgcgcttccctagtggtttccgcaggctatggccggacacttagacctagtctggcaccagcgggacgtgctcctcgtccccacccccgatggggagggccctgagcgggtagtgctcgctagtgtggcggagctgggtcttggcttcactgagctgacttaagtcttagtttctgttttgttttccaaagcgccctggcggcggagagtaagggcctcggaggcggaatcttgcgtcctgggggcgggcacctctcccacccaaaaggcacccgacaggcgaaaaacgatccgccaagtagcaactgggggcggggggcaaatggaagaatgaggttccacgcgggagctgtagggcgcagcaagaaagggggggtattgcgggcagtgtgttctaaggaagcgaagggcggaaagggaacaatctgacaaagctgcaatggaaaatgactttcaccctgaaggaaaggggaaaaacaagcttgcgaaacttcgccaactggtaagtagaaagtgaggcggggtgggcgggattagggaggaatctgcccaagccaaccggtgactttaggacgggtgacgtcacagccaatggacagccagcgcgggattttcaattattgttccgcccaatcgggaaaagactgtgcttataaagacggctgcggcggggctaggagctcgtttttctccccgccgctgcgctggtaagcctgtgttttggttcgctatggcccgtactaagcagactgctcgcaagtcgaccggcggcaaggccccgaggaagcagctggccaccaaggcggcccgcaagagcgcgccggccacgggcggggtgaagaagccgcaccgctaccggcccggcaccgtagccctgcgggagatccggcgcta

SEQ ID NO: 2543 - DNA, 2300 bp, Homo sapien
aatgtttcctggggatgaagctttgaaaagcttttttttttttttcttttggcaataaaataaggtagattcagcacaatacctaataactaaaaaatctgtttttaattgggtggggcagacagcaagtgtgtcatcctggaagatactatttgggattttatgtaggtacataagagaaaaaagtgaacaaaagcaaggggctaccaggacgccgcagtatgcttaacatgtattttctaagtttgtattatgcctttatcttggtacttttatcttctgttctcacttgatctttttgaaatgtattttaaatcctaataaaaatatataaagtctggaattaataaaggattaaatgaaacttttgtatatctcactgaaattctcagaaaaaaggggggtgtggggagggggaattgcctggggtagtgagtgaaaattgtgaccaggttcttactaaggaatatggcaactgcataatcaaatgtcagtggttaccaaacttatgaatcacctggtgttgtgtcatagattgtctatccttgcctctcgcccccagtgatttagatcagtggaactatgtggggtttaagaaatatacaatatatatttgtatatatttgtgtgtctcgaaagcttcagggttaaataagttttaactgtttaggaaacactattgttttaggtatccagtctcaaagacgaaggcctttaaaacttacttaatttttcattacatttcttgcccagaaaattgtaaaatacccaacgataacaatggggaattgtctatcagcacttgactaaaaagctttactatccatgacagcagcctttgcattactcaattctgatggcatttaacgtcttgaaacccagaaataaatacctatagactcacagtacctgaaaggaataccaaattgagacaagagagctatataaaccaaaaattgcttcaaccacagaatggaggtctacaggtgcggaaggaaagtttatatggtgaggcttggtcgcaaaactattaggaatattttcaggttactacacaattttgcgagctcaatatgcagttaacactttttccctcgactctcctgagcagatttacattgaccgcacccgtagcatatcgtctcactttggaaaaggcaaattatgtgcacatgaccctgtcactacaaggtagttctcgaccaagctacatcttatagctttatcttatattcctctcccatcatctgcaggaaaagggataggtgctgagggaaaacccctaagtagaactcacagtaagcagtgggaaaacagcttatttcactaacggggttaagtggccctgaaaagagcctttggagacaaagcagccggcgacccgcggagggagggagggagggagcgagcgagcgccaggtcccggcagggactcacttggagctggcgtacttggtgaccgccttggtgccctcggacacggcgtgcttggccagctcgccgggcagcagcaggcgcacggccgtctggatctccgggacgtgatggtggagcgcttgttgtagtgcgccaggcgggacgcctctcccgcgatgcgctcgaagatgtcgttgaggaaggagttcatgatgcccatggccttgcaccagatgccggtgtcggggtggacccgcttcagcaccttgtacacgtagatggagtagctctccttgcggctgcgcttgcgcttcttgccgtctttcttctgggctttggtgacggctttcttggagcccttcttgggagccggcgcgaactttgcaggctcaggcatggccagacccaagaccgacaccgacccccgagaacgcaagcagagcggtaggctcggggtctaccggaaacgactgtgtacttacagaggctgtgcgcatgacgctgcgttatggttcgcgagttttccgcggcgcgcaatgcgagggagacgagattatgtaaatgagtggattctggctgagctatcctattggctatcgggacaaaatttgcttgagccaatcaaagtgctccgtggacaatcgccgttctgtctataaaaaggtgaagcagcggcgttttcggcgactttcccgatcgccaggcaggagtttctctcggtgactactatcgctgtcatgtctggtcgtggcaagcaaggaggcaaggcccgcgccaaggccaagtcgcgctcgtcccgcgctggccttcagttcccggtagggcgagtgcatcgcttgctgcgcaaaggcaactacgcggagcgagtgggggccggcgcgccc

SEQ ID NO: 2544 - DNA, 2300 bp, Homo sapien
aaactgtcaactgcacatatccacttgaatagcaaagagcttctcaaatttcagtcggaactctggatctcccttcagtgtcccaacgaatatcttctctcagtgttctatcctaatagtaccactatgtacacagttgctcaagccaaaaatctaggggtttcactgttagctaaatcctgttcctcagccacacctattaattctacctcaaagataaaatccaacatttgtttccattaccaccattgcactccagcatgtcatttatccgttgtttttcacactttagcatatatcaccatcacccagaaagcttaacacaaataatggaacctgggaattttcatttttagtaacttcaagtaatgctgatgctgctggtctggagagactttaagtcttaatcactgttccagcccacaacactgcaacagcctcctaattgctttcctcgcttctattgtggccagcctaggatttacgatccccagagcaatcagtataatattttgaggttaatgaggctgtgtgattccaagtccagtgttcccaaagcagaaaacaaacctaatcaacctcccttgcaaattggtggtccttctcctcttcagggatcccaaactctggcttcagaaatcgtatattttgttgctattgtatggaacaaacccttaaactggacaagcttttccgagtgataactcttggggaaaaaaaccatttaatggtattgggtagattttagggtatctcaactagaaagcgcagaaggttatcggtgttaactcctggttatcaaaatcgaacttccatctacctccttaaggaattttcacatgagtggtggtgtaggcacgtgtttgtgaaccaatgatataaaaacctcaggtttctcgataccatatataaaagttgagctattcccttttaagtacacatctgagagcatacaatgcatttaatctctaccttcattttaccactgaagagcggacccaacctttgttcatatacacaatttgatcttacataaacttatcaaaattaacactgcgtttctcaacaggaaacaatctcctgggcacatattcacgggtacgtaaccaggccaaagacagttcaagagcagccctctaaggcaagccccaacctatctatgccatagtaagataccactatcaatctatgtaagcttacttatagcaatgcctatgtgaaaagaaaatagttatctgtgcttggtgttgtgtgctctcctaaagttaaccagacgtgaagccaaaaacatcaactgggactgacaacacaagaaagattctttaactgaggtggttaaatggccctgaaaagagcctttggagacaaagcagccggcgacccgcggagggagggagggagggagcgagcgagcgccaggtcccggcagggactcacttggagctggcgtacttggtgaccgccttggtgccctcggacacggcgtgcttggccagctcgccgggcagcagcaggcgcacggccgtctggatctccgggacgtgatggtggagcgcttgttgtagtgcgccaggcgggacgcctctcccgcgatgcgctcgaagatgtcgttgaggaaggagttcatgatgcccatggccttgcaccagatgccggtgtcggggtggacccgcttcagcaccttgtacacgtagatggagtagctctccttgcggctgcgcttgcgcttcttgccgtctttcttctgggctttggtgacggctttcttggagcccttcttgggagccggcgcgaactttgcaggctcaggcatggccagacccaagaccgacaccgacccccgagaacgcaagcagagcggtaggctcggggtctaccggaaacgactgtgtacttacagaggctgtgcgcatgacgctgcgttatggttcgcgagttttccgcggcgcgcaatgcgagggagacgagattatgtaaatgagtggattctggctgagctatcctattggctatcgggacaaaatttgcttgagccaatcaaagtgctccgtggacaatcgccgttctgtctataaaaaggtgaagcagcggcgttttcggcgactttcccgatcgccaggcaggagtttctctcggtgactactatcgctgtcatgtctggtcgtggcaagcaaggaggcaaggcccgcgccaaggccaagtcgcgctcgtcccgcgctggccttcagttcccggtagggcgagtgcatcgcttgctgcgcaaaggcaactacgcggagcgagtgggggccggcgcgccc

SEQ ID NO: 2545 - DNA, 2300 bp, Homo sapien; identical to SEQ ID NO: 2542

SEQ ID NO: 2546 - DNA, 2300 bp, Homo sapien; identical to SEQ ID NO: 2540

SEQ ID NO: 2547 - DNA, 2300 bp, Homo sapien
tattgcatggcctccagaaaagcaaatgaggtggtaagtgtaaattaaaagctcctctcctttaagaggggaacaccatgaggggagagtaagaaaaggagaaggaaaaggctctttccagtgaccaacacgctgaatttgatgaaaatccataagaggttatgctaaactgagaagcataagggtggatctaccattgccacctcctctttgtagcaaaaaaaatcttaacacggccccctcccagctgttgcactgaggtgactaaggatacattttgaggaagtagctccaagaacatttccattttcactgtgccttcacatacatctaatggaaatgaacagcacccttcatccatccacggaagcgattaagaaaagggtgggatggaaaaattaacccaacaatattagatcaatacgtagtatttaagtgtccataatgtgccaggctgaagatgcacgggaaaaccacactagccggtctgtcaagggcttgagaataccataaacaagaaaacagacgaaccaatttcagacagctgctagaaggaagataaaatgagacaggcaagtatgagaggcgcgaattcctgagtggatgacgtaggtctctgagaggtgacttttgagcccgtatctacatggtaagtgcctcgcagtgacctggggccgtagcgttaccatttaaagcacagaccattaaatgcagaaattatcaacaaaatgagaaataggaatttcaaagtctcaaagtgaacgacggaaactgaaatctacaaattagaaaaaggcgcagaattttgaatattcttgtcgcccaatcaggacaaggctgggacccggctgcgcggccttcgtccaaaatacacagaacggctggtatccacaggaggccccatcgcacggcagaactggtgaccggacacaaaagctgctgccaagcgtcagtcatacagagctgtcacgcagtgtttgcggaacccgggctgaattgtgtcctggagttctcttaaatgacagccgaactcagccacttcgttttagaatgaaacagacccaaggagccaccagggcgcgtgtggggcgggagtgggggcgggtaaagaggcggattcccaacagcctaattgagaaccgactcctgggaaggctaagcagcacaatgagtaaagacacgctctagattcaaaagcaaatccaatgacgcactggggacctcgagttccaaatagttaaaaagctacgtatgccatttcccatgaccttcacactaaaataacttactttatgaaaagaaactaagggaataagtgaacaagctcttttctagtgattaggtgggtggctctgaaaagagcctttggagtcaagcagccggcgactcgagcgagcgagcgccaggtcccggcagggactcacttggagctggtgtacttggtgaccgccttggtgccctcggacacggcgtgcttggccagctcgccgggcagcagcaggcgcacggccgtctggatctcgcgggatgtgatggtggagcgcttgttgtagtgcgccaggcgggaagcctctcccgcgatgcgctcgaagatgtcgttgacgaaggagttcatgatgcccatggccttggacgagatgccggtgtcggggtggacctgcttcagcaccttgtacacgtagatggagtagctctctttgcggctgcgcttgcgcttcttgccgtctttcttctgggctttggtgacggctttcttggagccctttttaggggccggagcggattttgccggttcaggcatggtaagacacagtacaaacgcggcttagccaagaaaagaagtaagagaatgggcgggcctgattcttttataaccaccttatgcaaattagggctccgaaagtcgttcatttccattggtccgtgtgcggaccttgcgttttcagcaatgcgtacgtaacaacaccgactcttgacttgattggccggttctgaagccatattaggaccaatgaaaaactcgttcttgaccccacccctaggaaagcttataaaggctttcctcttggttctctttcaatcttattttgttgcgaggttctgagcgttgtctgtgtttaaccttgatttcagtcatgtctggtcgtggcaaacaaggaggcaaggcccgcgccaaggccaagtcgcgctcgtcccgcgctggcctccagttcccggtagggcgagtgcaccgcttgctgcgcaaaggcaactacgcggagcgggtgggggccggcgcgcccgtctacatggcggcggtc

SEQ ID NO: 2548 - DNA, 2300 bp, Homo sapien
gcatataaatgggtaagactcttcgggataagtgaagaattggagacagggaaacagtccagctggactcgcagatttagagatgggcagtggcatgggggagcaggataagaaaagtcggcgaggtaagaagaaaaacagggcgacattttgaaagccaagggagcaagtttgaaggccgcctcctggaggtcaagaggaggatgacaaatctattctagcctcggtcaaaccggattccgaggagtgcaggcgggtgggggtggggcggagacacgccgctgcgggcgacttaagtttaggggcgagaaaggaggcagccttagtagtacatgtatttttaaagggaatttggctgtgacgagacagaaagggcgggacttggcagtttagagctcaaggggatcatcggcttcagaatcccctactctttcgtgagagtaactctccgtctaaggatgtcttctgcagttccttagggtccatattgggatttcccggctgtaaactaaacaaagcaaagcaaaacaaaacaaaaacccacagtgcctctcagtaaaacaaaaccagtattttgtttgaaagcctgctctctttaaagatcctggcatgcaaataaggggctttaatgtggctctcagcgattggtagatacttacaaaatccgtcatttcctttcagtgcaggacgcaaaccaagaggcggctttctgcttttctattggctgttagatacggctccgcttttagccaatcaaacgacttcccttcacccctcccggtagctcttataaattacatcaaattggttattctttccacattcttctccttgtaaaagaagctgtaactgcaattttagccgtaatgtcaggacgcggaaagcagggaggcaaggcccgcgctaaggccaagtcgcgctcgtcccgcgctggtctccagttcccggtggggcgagtgcaccgcttgctgcgcaaaggcaactacgcggagcgggtcggggcaggcgccccggtgtacctggcggcggtcctcgagtacctgaccgcggaaattctggagctggcgggcaacgcggctcgggacaacaagaagacgcgcatcatccctcgccatctgcaactagccgtgaggaatgacgaagagctcaacaagttactcgggggtgtcaccattgcccagggcggcgtcttgcccaatatccaggctgtcctgttgcccaagaaaacggagagtcacaagcctggcaagaacaagtaattaagaggcttgacaccatactcattcaccccaaaggctcttttaagagccaccaaagtgtcaaatgaagggctgatcacgaaatagcgcattagctctttttttgaaaacttgggtggctctaaaaagagcctttggtcttggtttgtttgtctgcatttatttgcttttggctttgtggctttcggttttctttggtaacagaacggcctggatgttaggcaaaacgccgccctgggcgatggtgactttgcccagcagcttgttcagttcctcgtcgttgcggatggccagctggaggtgacgagggatgatgcgcgtcttcttgttgtcccgagccgcgttgcccgccagctccaggatctcggcggtcaggtactcgaggaccgccgccatgtagacgggcgcgccggcccccacccgctccgcgtagttgcctttgcgcagcaagcggtgcactcgccctaccgggaactggaggccagcgcgggacgagcgcgacttggccttggcgcgggccttgcctccttgtttgccacgaccagacatgactgaaatcaaggttaaacacagacaacgctcagaacctcgcaacaaaataagattgaaagagaaccaagaggaaagcctttataagctttcctaggggtggggtcaagaacgagtttttcattggtcctaatatggcttcagaaccggccaatcaagtcaagagtcggtgttgttacgtacgcattgctgaaaacgcaaggtccgcacacggaccaatggaaatgaacgactttcggagccctaatttgcataaggtggttataaaagaatcaggcccgcccattctcttacttcttttcttggctaagccgcgtttgtactgtgtcttaccatgcctgaaccggcaaaatccgctccggcccctaaaaagggctccaagaaagccgtcaccaaagcccagaagaaagacggcaagaagcgcaagcgcagccgcaaagagagctactccatctacgtgtacaaggtgctgaagcaggtccaccccgacac

SEQ ID NO: 2549 - DNA, 2300 bp, Homo sapien
cctgtaatcccatcactttgggaggctgaggcaggcagatcacttgaggtcaggagttccagagcaggaggatcacttgaggtcaggagttccagaccagcctggccaacatggtgaaaccccatctctactagaaatgcaaaaaaatttagccaggtatggtggcaccagcctgtagtcccagctactcaggaggctgaggcaggagaatcacttgaacccagaaggtggaggttgcagtgggccaagatggcgccactgcactccagtctgggcaacagagtgagactctgtttaaaaaaaaaaaaaaaaagaattttgggccaggcgcagtggctcacgcctgtaatccctgtaatcctgggtggccgaggagggtggatcacctgaggttgggagttccagaccagcctgatcaacatggagaaaccccgtctctactaaaaatacaaaattagccgggcatgttggcacatgcctgtaatcccagctaatcaggaggctgaggcaggagacttgcttgaacccaggaggcagaggttgcagtgagccaagatcacgccattgcactccagcctgggcaagaagagcaaaactccatctcaaaaaaaaataaataaataagatttctgcacctaactcaagtgattcagcagaaataattattattatttcattattattatacacacatacattaaaagagatacaaagccaagtctggcaaaatcttatcagtgaacctaggtgaagagtggataaatgggttgctcattgtattaatcttgcaaattttctggaagttttaattttttttaaaggctagggaaaacagtgtatgtcatagtttaaatttcttgagtgtgataaggttattgtggttatgtatgagaatatctttgttcttaggagatacatattggagtagttaggggtgaaatgtcatgctatctgcaacttactttcaaatggttcatccaaaaaagcatataaatatattttaaagtatatgtaaagtacttaaatatatgagtatatatgtacaagtataaaataaatataaatgcaaaaaatggtgggtcaagtgaaaggtagagggtgttgctttgaactattcaacttttctgtggctttgacatttttcaaaatgagaagttggggaaaaacatttagaaatatgtaaatatattaaggatacaaaataaaatttaaataattttacaagttaagaatcatcctggaaaaattacatcctgttacatccctgcttaaaacctcagtagcttcccactacttctaggataaagacaaaattgcctaacaagggctacaaggcctggggtggtctggcccgttcctctcctcctggtaccctactcatcaccatcagctgccccctaggctccaaccacacataaccacaccctaactacaccagaaggaaagactccctcaaaattctctctcctcctgtcctttacacatgcagctaccaaagccaaaacctcactatgagggactgagaaatggattctcatgttgtttctgctgaactgtttccctaaatctcggaaatattctctgcccgcctcccattccacctctccaaccccggccaagtctgggtaacttgcctccttagcatcctgtgtttatctcatcgtagcacctagtacccagtattgcaattgtccgctcacttgttagtcttcagtgctctgttgtctccttgaaaacagggcctgacttgactccccagtccccagcactagtctggggcacagtaattatgtattcaatcagacttccattttcttgcatataaaataaaggagttgggctggatgatctacaagatctattggcagtaaaatagatctaataatcccaatcccaactgcgcgtgaattccctttttctttgcattgctgggttcagactttctgaccaccttaccagtggggagaatccgagactacagttcccatgagccctcagggcaccacgtggtgcctgcccgtgctaccaacgcgcagcgaggactccatttcccagcgtgcctcaggaagggcgccaggactgcattttgctccggagcgtccagagtcctggccctgagcgggaatcgcagtggccgaggctgagcggcaggtagaaggggcgtctccggggcttcacagggaacacaggggcttcggcccaaccacaagtacgcagttgcacatgccctacttttgcccattctttgcaaatcccctaaggaacgaacgcgcctcgcgtgcgggcctttctaatcttcg

SEQ ID NO: 2550 - DNA, 2300 bp, Homo sapien
aagggggcctatctatgacattctgaagcaaggtggcagtggacagtcatcacctctttcttagctttccatctttcctccactttacttgggttccaggtcccccttttctggatcttcccttgttcttctggaggtagttaatgtgggcccagctactggaattagttgaaacatagataggggtgtcttgggactctgtttgcaaggatgctgggcaacagcatctaagtatgacccccctgttgtcccttgctgcttcctgtttctttcccactttcaacatcataggaaggaagaaaactaacatagagtatctactgtgagattacattctcacatcaactccaagaaacagtctcccaatttaattatccccagttaaaatagatggacactgaggcttagggaggttaactaccctgactgagatcagttagtaagtggcagagttgggatttcaacttaggtcacccctaacagtcatgtgctttgccctgaaccaggattctccttgccagtgtcccttcctgctgctcaccctaaagagcatccaagatagctttcatctggggaccttatgaggtagtatagggcatttcactatattactgtcaccacaaaattaataattaatatttattcatcatttttatgtgccaggtgacttatggtaaggagcatagatacattatatcattcgacccttactttcccctttttaaacaagaagaaactgaggcttggtcccttagctagtatttgccaaaacaggaagtcaaccccatgtctttgtgactctggaagctgagcatttacccattagactatgttgagagaaaatccctccttgttgaagcctgtaaacatgggacctgagggaaggacagtggaagcccctgccttcagatgccatcagaggagggaaggccacaggttggagggcttgtcctcttacacatcctcctcaactccacccctagtaagaaacccaggcaagactaaagaagggaattctggtttctcatatttcctgtttagttctttgcagattggtgataaagcaagggctggggtgggtttgggggtaggtgactgcgactttggagcaaattccacaggccaggcctccaaggtcaaagtaaggggacttctatgtgagtgacccggttagcccagatagccatccctttttagtgtgtggatgggagcctaaagcgagaagaccatctctgcaccacatggtccagatggggctctgggttgagaggctttatactggccttcttcaccaccttaggactcacaacttccttttgctgtctgttattttttctaggtctccagaggcttgtggaagagaagcaggcgacccttcctgagttatcctggcttagcctcccaatctggctccccttccccttcccattcccctgctccccctgtcccttccccatccacccaactgaactgggtataggtcaaagctcctctctttccttttccttcctaggcactcattggctaggacctgtttgctcttttttttgtgcccagagatactggaacacgcttcatctaagtaactgtggggaggggtctttttgactctacaagtccttgagcaaaaagctgaaaaagaagcaggaggtggagaagacccagtgaagtgccccaagccccatcatggaagagggcttccgagaccgggcagctttcatccgtggggccaaagacattgctaaggaagtcaaaaagcatgcggccaagaaggtggtgaagggcctggacagagtccaggacgaatattcccgaagatcgtactcccgctttgaggaggaggatgatgatgatgacttccctgctcccagtgatggttattaccgaggagaagggacccaggatgaggaggaaggtggtgcatccagtgatgctactgagggccatgacgaggatgatgagatctatgaaggggaatatcagggcattccccgggcagagtctgggggcaaaggcgagcggatggcagatggggcgcccctggctggagtaagggggggcttgagtgatggggagggtccccctgggggccggggggaggcacaacgacggaaagaacgagaagaactggcccaacagtatgaagccatcctacgggagtgtggccacggccgcttccagtggacactgtattttgtgcttggtctggcgctgatggctgacggtgtggaggtctttgtggtgggcttcgtgctgcccagcgctgagaaagacatgtgcctgtccgactccaacaaagg

SEQ ID NO: 2551 - DNA, 2300 bp, Homo sapien
gatcacaaggtcaggagatcgagaccatcctggctaacacagtgaaaccccgtctctcctaaaaatacaaaaaattagccgggtgtggtggcgggcacctgtagtcccagctactcgggaggctgaggcaggagaatggcatgaacccgggaggcggagcttgcagtgagccgagattgtgccactgcactccagcctgggcgacggagcaagactctgtctcaaaaaaaaaaaaaaaagttaactgggtgtggtggctcgtgcctgtagtcccagctactgggaaggctgaggcaggagaatcacttgaacaccggaggtggaggttacagtgagctgagattgcgccactgcactccagcctgggcgacagagtgagactctgtctcaaaaaaaaaaaaaaaaagaaaaagaatgtgtgttaacctgaagacgggtcagcaatgaaagtctagtaaagggagagtccctgaggccagtccaagcaccatcctggaaagccgtcacattcagagtagtccaggagtgctggcaaggctgccaatagcaaagaggtgggggtagaagattgttgccaagaagagttttctggacccattggcatggctgcttattgcagatggccagatgccattaaagatacaaatcctccagtaatgtcattgtgcatttatacattgacattatgattctgatttggcttcagggagagaatgtactagacatgtagatatgagttttcagtctgagtgacagttaaatatttatgataaattaatatttatgtattatggctttatatttcagaagattgtgaactttgttggcatgaatgattatttccaagatccagctttggagtctgcaaagcccaggcccgtgtccctgtcagaggtaaattcaacctggcaaatgttacctgtgtggtctcttcggacatagcctgtcagccttctccatgtatatatatcagcattctgaagcctccacatttagtaaggcagaatcacacgctattagatctgagagggacctgatgcagtatctagtccaagccccccttttccagatgagaaacctgaagttcacagatgtggagaacttgaccaagagttgacagcttgttagcagtgagaacccaggtccaagcccaggtcagtgctgtctggaaggtcctgaccttatctggcatagacacattcaggatgtatttccccaaatcaccatattccctctcactccttcggcagggatggtcatcaagtgtcaccaagtggcatgtcttggatctctgagtccaggttattgatgcaagagcaaaggaaagatgaagggaaaagctgaaacaatttacttcttcctgcccgggaagtacaagtgtgtggaggggaggggagggaggtagaggagagtaagagaaaatggagaagggtattgagaggatcctttttgagtcattggagcaaattaatggaaggggaactgtccggttggtcaggtctgtaaaaatccctcaacttccccagtacttctgctaccaccaactgaatggacaggatgaggaggtgtccactgtaaataagtaacctggactgttttgtgaggaaagagatggaaggaatccaggggtctctgactctggcagttcaggatagaaaccacaccttgttatctctgctttctctaaaatgtccaggtaaacttggaataggagcactctggatttgggagactgttgtgaaaaaggagtttgagagcagtggagaaggcaagggaggtgttttgaaggcagcaaaagcccctgaaattattgggtcctgccatactgagactggggtgctaaggaaggggctgccacattccccatctccctgtcttcccacttgtcttcctaacatcactgtttttttctttagttccttctatcttttactaggaagggcctgggaagggctgggtgccatttccagctgttcttgtgacaacctccggccctttcatcatttctccccgtgccctgactccctccccatcctcttttctcctctccccaccaatggtctctcccgatgctcagtggcgcggggtaggggggggcggaggcggggctggagtggtggaaggggggtggcaggtctgcattgccgcttccctggtgccgggagcagtcgccgctgccgcctccgcccgcggccgggacccccgtcctcgcccgggactccttacccggggaacctagaccaggtgagacccctttctcagtcgctcacctcctccccgcccctggcagaagcatcttt

SEQ ID NO: 2552 - DNA, 2300 bp, Homo sapien
ttcatggttcctggaccccccagttctgtgtggctcttctctagaggagcattgacccccctgaatcagctctgtccttggcgggacagtccttccctgctggcagtctcttctcgttggctccctcgacctgctatctcctctgaaagcctggctgaccaggaatggggtctcccctcacattggggagcttgccctttacctccagggctgctgctgcctgggtatctgggaccccagatcaggctctggagacgctgctacctgaggggaaggcctgaggtccaggtaagaagggaaaatagactgggagtgggacaagggacttgactctgctgaaccagatgaacaggagctggaaaggcaaggagctgaagcctctgggagtctgggaagtgaagttctactcctcttggcatcaaacaaggtttgggagtgtaggaggtgcgggaaagtgcttgtggcttagattaagtggaatttagggcatagctgaaaggggaaacagaattaaagacaccagaagtagcagagaagcagggggccagagctacaacagtattcttctctgttcctctttgcctcctccccagatgggcctctcagctcccacaatctctggcctccaggatgagctatcccatcttcaggagttattacggaaatggacaccaagaatatctcctgaggatcactccaagaaaagagatccacataccattctcaatcccactgaaattgctggcattctcaaaggcagggcagagggggatctggggtagaggagggttctgtctaatcttttttttttttttttgtatctgcacttgcagcctcagctttcacacttcagcccttaagttcactaagaaggtctgagtttctgctgcagatagtggtgttaactgctccaactcttgtcttgcttagtttctacaaatatttttgcttcttgtcatttgaaggattaagaaacaaaaacaatccagaaattgatcggtttttttaggccaatcccatcccttctggataaccagatgttaaatcatgagatcagagatgctgttcatcagtcccaacaagatggcctagaaatcgcattctcacctcgccttgctgctgctttaattccaagttctatttcttcccttatagttttctatgggaatgaggcggatacaggaaacaccctatctcctctgtatttttgtagtggaatttctatttaaggggctcattaaagcatagtatttatacacattgctggcattgtttcttgtgtttgaataaaggattctcctaggtaggaaagtggtgggtaaaaggggtgtatgacccaagagaggaaggcatccaccatattattgctaaggaaataggggaactgggtttggtgaggctctgcaaaattcaagtgcaatttggggaaagggttctcttgtgtgtgtctcccatttagaggcagatggggccagagtgttctagagatccagactctagagctccgatcccatccacccctcagctgtggtcacacaccaacgcggagcagccctcaccctccccatgcaattaggacgaggtgagcgcagacgtcactctaagctcagacatttcgcagtctcctcccctgagggaaaaccaaatacctccagcccaaatcagggttgtgaggccaaatctgcaagaaggctgcaggcgagagggaaggctccctctgcgcctgaaagcccccaagtcctcgggttggggggaactcttcagcacatccttctctggacaacagaagaagaatcactgtccacaaaatatattaaaactgaaatttttgttcttttagctttcgaatttacacttttgagagcagtgtgattctttcaagtctagcagtgcattaagagggcctgagcgtttccgttccgccctcctcgctaagacaactagcagcggcacctcaggacgcgagccgaggactctaccgcccgacccaggttaagtttcggaggctcctaagatggctgcagccgcttccaggcacctcctcttccgcggccccgcccaccgctacgtccgtcttcgccccggaagtggaagtcgtgctgaggtcagaaggcggaaccgctgctgggagacggcgggatctctttcgccatggctgccgggccgatctccgagcggaatcagggtaactggagggggaaagtctggaatgggctcagcgtggctaggaggccccgactacagccagcagtgtctctgcaggggtgggagactggactcctcccttccccagagggcgc

SEQ ID NO: 2553 - DNA, 2300 bp, Homo sapien
tggtcttgatttgttttatgagaagtgaggtctgtgagtggggagggggagatttattctcattttcaggacgagacttttgccctacatctttcctagaataagaggtgagaatctcatgatttgtctctagatgtgggaggattgtgtgtaaccatcctttttcttgcttcctctgtccagttaaactcctatacacaagtctacaccccaggatactcccagcctccagctgggaactcttttaacctgcagctgtctgtctgggactgggatttacgttatagcaatgcacagatactacaattccagaatcctggctatgacccagaacactgtccagattcctggctccctagaccacaggtgaagtgtctaaacttcctaaattcccttgacgttcccacaggctcatgctactagacagtgagaagtgaaagacaaaatgtcttgagttccttagggaaagctactccactactcttctgcagctgtcacttatagtccctgggtgtccctaggaagacagaagacctagaatagcacagagggcaccctttttgtccttcctcaagtctgtttactcatcttcctgtctcgtgcacacataaggtgccctaaaatcaaccttaatcagtcccgaggcctagttgaagcctaatgaggagggtagaagagttctcatggggaggcttgtagttctagtcaccagtgcagtgagtgggtggcagcaggacaccctgtcctgatccagattggggaaactagggttatctggtctctctgttgccagttgattttcttttccttttagccaagcttcatggttcctggaccccccagttctgtgtggctcttctctagaggagcattgacccccctgaatcagctctgtccttggcgggacagtccttccctgctggcagtctcttctcgttggctccctcgacctgctatctcctctgaaagcctggctgaccaggaatggggtctcccctcacattggggagcttgccctttacctccagggctgctgctgcctgggtatctgggaccccagatcaggctctggagacgctgctacctgaggggaaggcctgaggtccaggtaagaagggaaaatagactgggagtgggacaagggacttgactctgctgaaccagatgaacaggagctggaaaggcaaggagctgaagcctctgggagtctgggaagtgaagttctactcctcttggcatcaaacaaggtttgggagtgtaggaggtgcgggaaagtgcttgtggcttagattaagtggaatttagggcatagctgaaaggggaaacagaattaaagacaccagaagtagcagagaagcagggggccagagctacaacagtattcttctctgttcctctttgcctcctccccagatgggcctctcagctcccacaatctctggcctccaggatgagctatcccatcttcaggagttattacggaaatggacaccaagaatatctcctgaggatcactccaagaaaagagatccacataccattctcaatcccactgaaattgctggcattctcaaaggcagggcagagggggatctggggtagaggagggttctgtctaatcttttttttttttttttgtatctgcacttgcagcctcagctttcacacttcagcccttaagttcactaagaaggtctgagtttctgctgcagatagtggtgttaactgctccaactcttgtcttgcttagtttctacaaatatttttgcttcttgtcatttgaaggattaagaaacaaaaacaatccagaaattgatcggtttttttaggccaatcccatcccttctggataaccagatgttaaatcatgagatcagagatgctgttcatcagtcccaacaagatggcctagaaatcgcattctcacctcgccttgctgctgctttaattccaagttctatttcttcccttatagttttctatgggaatgaggcggatacaggaaacaccctatctcctctgtatttttgtagtggaatttctatttaaggggctcattaaagcatagtatttatacacattgctggcattgtttcttgtgtttgaataaaggattctcctaggtaggaaagtggtgggtaaaaggggtgtatgacccaagagaggaaggcatccaccatattattgctaaggaaataggggaactgggtttggtgaggctctgcaaaattcaagtgcaatttggggaaagggttctcttgtgtgtgtctcccatttagaggcagatggggccagagtgt

SEQ ID NO: 2554 - DNA, 2300 bp, Homo sapien
cttgctctgttgcccaggctggagcgtagtcattagatcttggctcactgcaacctctgcttcctgggttcaagcgattctcctgcctcagcctcccaagtagctgggattataggtgtgagccaccacgcctggctaatttttgtattttcagtagagatggggcttcatcatgttggccaggtggtcctgaactcctgacctcaagtaatctgcctgccttggccttccaaaatgcttgggattacaggcgtgagccactgcgcctggtccctattttctttttacaacagaccttgggaaatattttcttcccccaagaggttgaggcccatggaatgcattaggggcaggtggggtggtggtgctctgtagcctttaggacttctagaatcaggcttctgggccaccttcttagcaggtgtatacctctttgttccagactgactttctgtctcacaatatcttcactatttccacagttgcagccaagacaggaaactgaaagctgaggccagaagggtggtgtactggggggaggggaaaattgagtgtcactttggaaaactggggcccccatctaaggattgctgcctctgtagattcaaaagcaataaaacagcagctcattaactcttattttgtattttattttctgtctttttcatgtctaaataaagatttttgctttgctgtccccaagtccccctcctttaaaggagctgcagctccttctctccttgttcccagctttccttacccatctttgcttctagggttgcagatgggagggacgggggatggactgctgagctgaagagaggtttccagccctcacctgtgaaagtcctgaacatgaatcattcatttggagatctggtgtctgggttggaggggtggagtcacatacgggaatgggcacttattgcctattggttgtgtatctacgtgatgggcaagattaactggtaagatctttttgtcccacccacatccccaagacttgcacacaaactgtacttgtgtctgcatcttggacacatttccatctctttttatacttctccactgcagtcttcacatgatgtctgtgtcatgccctctagagaaagatatgcaaaaccactttaaccagtttccctgcttcctcacctaattcttgggcctctgctgacaaaaatccccccaggtctaattttcattttcttctggaagaggcggcaaggaggcttgaaccactttcacattcctacccctctccccgccccaaacccctttgagaagacaaaagaacggagcttttaagggaagtcatcactgagacactccagacaggtagcccagatgattccagcttcataatcaatagaactgctcccctcaaacggtctccagtactcatgaacaggaagagaacagggtctgggattggggtaaagaagggagtcgtttttctctcagtccccatttcttccccacccgtccgtctcagactccaccgtttcctctccacttttccagaattgtgtgtattctcctttaaggggttgggcatctctcccgccctctccagagtcgactgaagtttccgaggagacttctcaggctgggctggacacacctttccaaggacccccaaactctgctccgtgcacgtcaaatgctcctttcccttgtgtccaaccccctacccctctccctaacacccctcttctcaacaagactcagcctctccccgaggtgggtgagcatccttgaggtttcccacccttaactgctgtgtccccggatggagccagagaaatgtggtgggggggccggggccagagtttcaacattgccccccagaaggaggagccagagatgggggtaaggagaaggaatttggggggtgtcggcaagagggtgagaacggggatgaggtggagataaaagggggaagcaaaggctctagaggaggaggaggagggtgtgtctgtctatcagcttctgctgatggagcctggtccgtctttctcagtctcaagttcgttgtctcattatccattaaccagcccctccctttactgtttaccagccctgttaggtctggagctccccacagacactgatctcagtttcccccgagagtgtgagtgtaggcctctacaggcagctgcctctggggagttggggagcctaggggttaactctagacccccctcaaccctctggaccaaagtctgtccaggaaaataggatgccggagcccaggagtcgtcagcctagcagttgcctggcctccagatgcctcccaggta

SEQ ID NO: 2555 - DNA, 2300 bp, Homo sapien
ctgatttccccccaccccgcttttttttttttttttttttgagacagagtttcgctcttgtcgcccaggatggagtgcaatggcgcgatcccggctcactgcaaccttcgtctcctgggttcaagcgattctcctgcctcaggctcccgagtagctgggattacaggagcctaccaccatgcctggctaattttttttttttttttttttttttttttagtagagtcgggggtttcgccatgttggccaggctggtcttgaattcctaacctcaggtgatccgtgatccacccacctcagccttccaaagtgctgggattacaggcatgagccaccacacccctaccccccgattttttttctccgtgttcctccactgtctccacacctcaaagtgctaaagaatagaatgaggctcttgaatgaaggatggtggtgagaaggaaagtggataatgggatttaaaagttatggtacacacctcttcctatgcttttttttttttttttttttttttttgcgatggagtcttgctctgttgcccaggctggagcgtagtcattagatcttggctcactgcaacctctgcttcctgggttcaagcgattctcctgcctcagcctcccaagtagctgggattataggtgtgagccaccacgcctggctaatttttgtattttcagtagagatggggcttcatcatgttggccaggtggtcctgaactcctgacctcaagtaatctgcctgccttggccttccaaaatgcttgggattacaggcgtgagccactgcgcctggtccctattttctttttacaacagaccttgggaaatattttcttcccccaagaggttgaggcccatggaatgcattaggggcaggtggggtggtggtgctctgtagcctttaggacttctagaatcaggcttctgggccaccttcttagcaggtgtatacctctttgttccagactgactttctgtctcacaatatcttcactatttccacagttgcagccaagacaggaaactgaaagctgaggccagaagggtggtgtactggggggaggggaaaattgagtgtcactttggaaaactggggcccccatctaaggattgctgcctctgtagattcaaaagcaataaaacagcagctcattaactcttattttgtattttattttctgtctttttcatgtctaaataaagatttttgctttgctgtccccaagtccccctcctttaaaggagctgcagctccttctctccttgttcccagctttccttacccatctttgcttctagggttgcagatgggagggacgggggatggactgctgagctgaagagaggtttccagccctcacctgtgaaagtcctgaacatgaatcattcatttggagatctggtgtctgggttggaggggtggagtcacatacgggaatgggcacttattgcctattggttgtgtatctacgtgatgggcaagattaactggtaagatctttttgtcccacccacatccccaagacttgcacacaaactgtacttgtgtctgcatcttggacacatttccatctctttttatacttctccactgcagtcttcacatgatgtctgtgtcatgccctctagagaaagatatgcaaaaccactttaaccagtttccctgcttcctcacctaattcttgggcctctgctgacaaaaatccccccaggtctaattttcattttcttctggaagaggcggcaaggaggcttgaaccactttcacattcctacccctctccccgccccaaacccctttgagaagacaaaagaacggagcttttaagggaagtcatcactgagacactccagacaggtagcccagatgattccagcttcataatcaatagaactgctcccctcaaacggtctccagtactcatgaacaggaagagaacagggtctgggattggggtaaagaagggagtcgtttttctctcagtccccatttcttccccacccgtccgtctcagactccaccgtttcctctccacttttccagaattgtgtgtattctcctttaaggggttgggcatctctcccgccctctccagagtcgactgaagtttccgaggagacttctcaggctgggctggacacacctttccaaggacccccaaactctgctccgtgcacgtcaaatgctcctttcccttgtgtccaaccccctacccctctccctaacacccctcttctcaacaagactcagcctctccccgaggtgggtgagcatccttgaggtttcccaccct

SEQ ID NO: 2556 - DNA, 2300 bp, Homo sapien
aggcacaaagcaactgtgaccccatcacttcctggcccctaaatttccaggcaagcctataaagtgtggtcacttaaatgactttgaccagcaacttggcccagctttcaaatctggagaccttctatggtcactgccaaaagaaaaagtcttatattgagggtagagtgcctttgagctccacgcctggttctattaagtctgtggcagtggcgttaagattagaaagacatatttatatgggtataacctggttctggacagctgtggtgaaacaaggcaactttcagattttgaggctcctcttctacagatctgtgctcccatctcagatttaactagcaaagggtaggtgtggtcagtgattgttgtcacaatcattccagaatgtttgtgtagagttactagaatttcagtcttttcattctaaagtattttcatccctctcacctttctagaacgacacccttttcagctcctttccaacggctgtagccaactgattctaccccagagtcccaagcgtccacccccgtacccttccagttcagttcagttagagttcagttagagtcaatttaggtgaccaaatctcatcctgctctcctccttaaatttaccactaaacggtagctaaaatttgtggtcccttatacgcttgaagcccacgccaaatgactttacttgtcaacctctattgtatgtcttggatatgcccccatgcaaggcactctgacttgtttggccttagcatgtgtggacagccttgggcccagccctaaattttcgattgtaaacccaggtgtatccctaagagatatagctgtctaggaagtttccctgtttcaggtgtcagtttcctattctgagctagacaattctaaaatgcctatgccccacgcctcccctttagaaactgaggaagaagtgaggggaaagaaaagttgactagagtatttgtttttacataggcataatgggcacaattaggcaatacattattttgaatatgcagaccaggtgctataatgttaggaatctgaattaaaatttcaaatgtcttttgttagagtatagccggggttggcatcgttttgtgtttgtcataaagaggtatttactaaatggcctttctttcttgaaacagtccacacaggcctaatacttattcattcattcaacaaatatggaaggtctactatgtgacaaggatggcttattatgttctcatagccatagctcattgtcactcaggtaggacacatacaagttctgctacatataatatagttttatgtattttactaaattgtaaaacctttgatgtctgggattatgtcttgttaatttttgtatccccctgtatcactgagagcagtgatacacatcacagggatacaatacatatttgaattatgccataatgttttaaaagacataacaaacgcactagaagacataacaaacgcactatgtaagttttttttactgttagcagtctaaagcagatgtatcaacagggtatcactgttatgcaagtaaataaatattaagtgtttacagagaaggatatgttcacttcaagagtgaaggaacaagagaaatatataattgggtggagactggtgtggaagaagctaatcttcctccggtcactccagaatgattgtgtagagttactagaatgtcagtcttttcattctgaagtattttcatctctctcacctttctacaactactccacccctttcagctccttcccaacggctgtagccaactgattctaccccagagtcctaagagtccaccctgtactcctccaactcctgttcaagaatgctccagaccaggagctttagggactcgggtcgggaaaacacggggtcacgcgcggggcaagcgccaaactggccgcagcctggggagcggcgctaaaggcggggctgcgacggggcggagcgggaggaggcccgggggcggcctgggtgtcaccaccaacccgctccggccggaaactggcgcctgtttccggccggacagcagaaagccaccgatcctgaaccagccgccggagccggagtggcgaccgggtgcggagtgggcaaaaagccactgggggaggccagtcccgatcagtcctttctggctccagctccagatcccgtgcggagcaacagctgcggtcgcagtctccaccaccgcctccacctccatcgccgtcgggggaggggccggccggaccccggggtcactgccgaggaatgaagagaggcggccgggccccgcgctccgccccggcc

SEQ ID NO: 2557 - DNA, 2300 bp, Homo sapien
tcatcatattgtctaagctggtcttgaacttctggactcaaacgattggcctcgccttggccttccaaagtgttgggattacaggagtaagccacgtgcctgaccaatactgcattttttgacttcctgttttctatccttaaagcactgatttcttggacccagtgaaaacaaatttttcaagttgaagattttaagttaatgtagtcattcatatttgaaggatgtcatgatttattttttaaatttaatgtctttactattgaaaatatttcttgttattatagtttatttataccctaaattaaaaataagtaggcacttcatattctggatttgctgtcacttgcctgcaacaaaacaagtaactgggtttatcctggatgagtcacaaagcaagagcttggattttatcattggtttcagttctatttttagaggtatggggatacaaaagaagttcttaatttggagacatttaaaatggcttgtgtggttttcttcaggaaggaaggatgctgtctaacttcaggaccatcacagcaccctttaaatatgtaataattattttgttcaaaatgtttttttttttttttttttttttttttgagacggagtctcgctctgtcgcaaaatgtttatgttccatatcttatcgctcaatgtataaaatatcactgccactgacatcaatgaaattttatgtgaaatggaatgagttagtaagtgtcaagtaggtattttcctcgtccctcaaaaagttatgtgcccaagtataaatcatcaaaaggataaagattctttccatctattgcttacagactgactattgtttaaaaaggcacgaatttcatagacaagtctttatctccttctttcttaaaaaagcacagaaaatggggaaaaatcttctatactgcaatctaaattataggtaagaaaaataaaaaccaagtgacataggagattggcagtgaattttcaaatatcagtaatttacaggatttacaggattttcattagcgttgtttccatgttttctgtaagatacgaacatttaaattgataagaatggaatgttcatataacatttcttgtatccatttaaagattcacattttcactttaatatataacttaagacttttctttcaaaacacatctaaaaattagtaaaatgcctaaagggaagctttatttacttggtagaaaagctgaaagaaaaaaaaacatattcttcacaatttcagaggtgacaaaaatctcttatatttcagtagtttctgatctcccttaagggatttgagaattatatataatattgcataatcttaagctgattaatgttaaagtgctattggtctattttaactgtgtacttcttaaaatataatgaaagaatttatttggtaatcctgaatctattgacctcacaaacactggtcattattttggtggaaatattcataagcatttttagttactgatttctaacaattgtttcttattatcttcctgattttacaattccccaaagtaaaggtgcgaaaaacaaacatctaccctccttttcgacaaatgccatgatagaggggagacctgtgtggtgtaaagacaaatgcagacatttggaagttgatggttttaagattcagtaaaaacttgagagttttggcttcaaatccccacgctagttttagttctaccggatacgtgtcccctacccatttcaaaggacccagtcacctcggctcttgcctgagtttcagagtcccgccggagttagagctggcagagtccaattgctcagagcgccgaggcgggggcggggcagggggacgcttgcaggtccggtggtcccgcgggctgcgagcccccacggccgaccctagctgcagaccctcctggagaacctcaggcctttcccccagaaacatccctaaaaggcgttccctttgttcattcattcaacaaatatttgttcaatctcatatgcccttctgtcttgggaaaaccaattagggcctctgcagcctcaacacaggggcactgttcccgcctattaatgacgcaatgaacccgggaagacgaatctcgaccactgtttcgcaaataccgcgtgtgatttattaaatgccgtctctccgagtcccaagcggccgggagcattatgccacctcccttgccctcatctctcactgccatgcaagaaagcgttaatggcaaatagggcacgtagccacactccgtcgttcctgcttccaagcaaaccttgtgccaggttcctcatttcgcgaggc

SEQ ID NO: 2558 - DNA, 2300 bp, Homo sapien
tcaggaccatcacagcaccctttaaatatgtaataattattttgttcaaaatgtttttttttttttttttttttttttttgagacggagtctcgctctgtcgcaaaatgtttatgttccatatcttatcgctcaatgtataaaatatcactgccactgacatcaatgaaattttatgtgaaatggaatgagttagtaagtgtcaagtaggtattttcctcgtccctcaaaaagttatgtgcccaagtataaatcatcaaaaggataaagattctttccatctattgcttacagactgactattgtttaaaaaggcacgaatttcatagacaagtctttatctccttctttcttaaaaaagcacagaaaatggggaaaaatcttctatactgcaatctaaattataggtaagaaaaataaaaaccaagtgacataggagattggcagtgaattttcaaatatcagtaatttacaggatttacaggattttcattagcgttgtttccatgttttctgtaagatacgaacatttaaattgataagaatggaatgttcatataacatttcttgtatccatttaaagattcacattttcactttaatatataacttaagacttttctttcaaaacacatctaaaaattagtaaaatgcctaaagggaagctttatttacttggtagaaaagctgaaagaaaaaaaaacatattcttcacaatttcagaggtgacaaaaatctcttatatttcagtagtttctgatctcccttaagggatttgagaattatatataatattgcataatcttaagctgattaatgttaaagtgctattggtctattttaactgtgtacttcttaaaatataatgaaagaatttatttggtaatcctgaatctattgacctcacaaacactggtcattattttggtggaaatattcataagcatttttagttactgatttctaacaattgtttcttattatcttcctgattttacaattccccaaagtaaaggtgcgaaaaacaaacatctaccctccttttcgacaaatgccatgatagaggggagacctgtgtggtgtaaagacaaatgcagacatttggaagttgatggttttaagattcagtaaaaacttgagagttttggcttcaaatccccacgctagttttagttctaccggatacgtgtcccctacccatttcaaaggacccagtcacctcggctcttgcctgagtttcagagtcccgccggagttagagctggcagagtccaattgctcagagcgccgaggcgggggcggggcagggggacgcttgcaggtccggtggtcccgcgggctgcgagcccccacggccgaccctagctgcagaccctcctggagaacctcaggcctttcccccagaaacatccctaaaaggcgttccctttgttcattcattcaacaaatatttgttcaatctcatatgcccttctgtcttgggaaaaccaattagggcctctgcagcctcaacacaggggcactgttcccgcctattaatgacgcaatgaacccgggaagacgaatctcgaccactgtttcgcaaataccgcgtgtgatttattaaatgccgtctctccgagtcccaagcggccgggagcattatgccacctcccttgccctcatctctcactgccatgcaagaaagcgttaatggcaaatagggcacgtagccacactccgtcgttcctgcttccaagcaaaccttgtgccaggttcctcatttcgcgaggctccactctcttgggcttcaggctgccgctgggcctccagcaccaaagggcaataggggtctgagagtccgggcctcaggcatcttcaggccgcaggtgggtggagaatagcgcccgcgcgtggcagcggcccaggccgtctcagccggatttttccatccccggggtaggcttggtcccctgtacactccagcggaactacaactcccagcaccgtggctgcccggactcccggaagccgaatcccggctgggaggaagcagctgagacccggccaacagactgggggttaatttagccagaaaagggggcgggaagggctgtagggtacttgtcaattcgccgccatgaacgtggtttttgctgtgaagcagtacatttccaaaatgatagaggacagcgggcctggtatgaaagtacttctcatggataaagagacggtgagtttgcttttgctcagcatttgtgaaggaaccctctcaaccttacaattgctcgtcccattccactgtaggacttagcatttaat

SEQ ID NO: 2559 - DNA, 2300 bp, Homo sapien
cagagatttatgtaacatcttaagagagcagacaggcagggaaggttctgcagcccacatgcatctgctgtggaatctgaaaattactttagacggtttttctttttcattagcccctctgcctaatgtttcacaatgctctggcacctatctgatgaggcacgaaaggaaccctggaccttgcatataggagacactcaaatacttatttatctatctatgtatctatttttgagacggagtttcactctgttgcccaggctggagtgcagtggtgcaatctcggctcactgcaacctctgcctcccaggttcgagctattctcctgcctcagcctcccaagtagctgggattacaggcgtgtgccaccacacccagctaatttttttttgtatttagtagatatggggtttcgacatgttggtcaggctggtcttgaacttctgacctcaaatgatccacccgcctcggcctcccaaagtgctgggattacaggcgtgagccaccacacgcagcccaatatttgttgactgatagaaactactgggaaaggaggaagatggggcaaatgatgaattacttttttcccataaatcagaatctatttaaatgataactctaaaccactcctgtgtgtttgtccagcaagccctcaaaaaatcgtgcaggctatttgctcaccagtacatttggacattttgcatcctcacatatgaagacaccctggatttgctcattattttttcatcgctctttaaacagggggttagaaaatagagacggtggaaaggggacaagatggtttggggaacgtggtgtgtgcacactcatgcccatgggagggggttacaaaatctgaagaggagactgcagtcaggaagcctggattctaatccatttagccagtaacttgatgtataaacttgggcaagtcagtttatctggcatgccctgtttcctcattttccaaatggaaatattaatactctatataccttacaaggtggcattaaaagtgtaaagaaatgacatataagagcattttgaaaggataaagttctgtgtcagtctaaaatcgtggaattaattggtatggtgaatggaaagaagttgagaggaatatcattggattaggaggaaaggtggaactggaaaagagagggagcccctccttcatttgacagacaccagaaaaagtcaaaagagcctccactattcaaaccacaaatctagccaacacttttatcttgagacatctctggaaaaatgatttttccttttccctgctcctcagtgccagggatttttattcattttgtggttactgcatgcttgccatatgccaggcaatgtgtttattagcttattatgatttcaaaattagccctggaagacaacacatatcttcaaaggactctcagaggtcatctcatatcttcccctagctttccttgttgataaaaatggcagttcatccctcaccacttaatacgtggagggacgcgggcctaaagaaattcagtgacttgaccaaagcccagagtggtgatgaaaccagtacccaagcgcggggtttctcactccccttttccatcacacgtatatatattaaaaagacatgaagttactaagatgtgtcctggaggctctgaggcagatctgctgtaggagggatcagcagaggcttctctagtcagggcattctctgggcgttcagcccttccctccactgggctccagcgctgtagagagggtggggtttttacctatcagtatagcgggaaaagatacccaggtggcaggaagtttaagcctcacctggaacttatattgaaagccacttggtagaaaggataatggtttggagacagagttctattcctgccagcattgacactgtgtctgaaaagccagcatcgacactgtgtctgcaaatccctcagctattctgagtctccgttttctccctgtgagatggagatcataaaatccgcctcatccttaggattattctcctgaagctacaataaggcctgaggcattgtacgctggaagaaacgtgtattaatagcaacttctgtcccaccccatcccccaacacgtcgatcccctccggagcataaaactttcccccagcatctgacctgcccaggccaccctagcacctaggagcgtgaattcctgatgcgggttgtgggtggcgcgccctcccggttcccgctctcgtttttgtttttggtcgggtaaggcgatgctgtagaggctggcgatctccagtcttcacgaatccgcacgtctct

SEQ ID NO: 2560 - DNA, 2300 bp, Homo sapien
acacgcagcccaatatttgttgactgatagaaactactgggaaaggaggaagatggggcaaatgatgaattacttttttcccataaatcagaatctatttaaatgataactctaaaccactcctgtgtgtttgtccagcaagccctcaaaaaatcgtgcaggctatttgctcaccagtacatttggacattttgcatcctcacatatgaagacaccctggatttgctcattattttttcatcgctctttaaacagggggttagaaaatagagacggtggaaaggggacaagatggtttggggaacgtggtgtgtgcacactcatgcccatgggagggggttacaaaatctgaagaggagactgcagtcaggaagcctggattctaatccatttagccagtaacttgatgtataaacttgggcaagtcagtttatctggcatgccctgtttcctcattttccaaatggaaatattaatactctatataccttacaaggtggcattaaaagtgtaaagaaatgacatataagagcattttgaaaggataaagttctgtgtcagtctaaaatcgtggaattaattggtatggtgaatggaaagaagttgagaggaatatcattggattaggaggaaaggtggaactggaaaagagagggagcccctccttcatttgacagacaccagaaaaagtcaaaagagcctccactattcaaaccacaaatctagccaacacttttatcttgagacatctctggaaaaatgatttttccttttccctgctcctcagtgccagggatttttattcattttgtggttactgcatgcttgccatatgccaggcaatgtgtttattagcttattatgatttcaaaattagccctggaagacaacacatatcttcaaaggactctcagaggtcatctcatatcttcccctagctttccttgttgataaaaatggcagttcatccctcaccacttaatacgtggagggacgcgggcctaaagaaattcagtgacttgaccaaagcccagagtggtgatgaaaccagtacccaagcgcggggtttctcactccccttttccatcacacgtatatatattaaaaagacatgaagttactaagatgtgtcctggaggctctgaggcagatctgctgtaggagggatcagcagaggcttctctagtcagggcattctctgggcgttcagcccttccctccactgggctccagcgctgtagagagggtggggtttttacctatcagtatagcgggaaaagatacccaggtggcaggaagtttaagcctcacctggaacttatattgaaagccacttggtagaaaggataatggtttggagacagagttctattcctgccagcattgacactgtgtctgaaaagccagcatcgacactgtgtctgcaaatccctcagctattctgagtctccgttttctccctgtgagatggagatcataaaatccgcctcatccttaggattattctcctgaagctacaataaggcctgaggcattgtacgctggaagaaacgtgtattaatagcaacttctgtcccaccccatcccccaacacgtcgatcccctccggagcataaaactttcccccagcatctgacctgcccaggccaccctagcacctaggagcgtgaattcctgatgcgggttgtgggtggcgcgccctcccggttcccgctctcgtttttgtttttggtcgggtaaggcgatgctgtagaggctggcgatctccagtcttcacgaatccgcacgtctctccattatccaccgcgcccgcccactgggccccggggcggccggcggccgggtctctcgggctccgcgtgtcgcccgagccgccgccggagcgagggtccctgccccctggggagcggtctccagccgcttcgaagccgccttcttccccctccgtgagtcagaaacaaaggcgggggggcggggggagcgcccgagctgcggctccgcgattcgccctttattctgaactcgcaacgtcagcggcccgcggatggagctgcggggtgcggactgggccgcccacagcgcaccgggccgggggagcggccgcgctgggccgggcgggcgggtggcgggggtgcgctcggggacccgggccgcgtgggcgccgggatggagggcgccaaggggcggggagcgggcgtgcgtgtgtgtgcgagtgcgaatgcgagggaggccggccttgagtgaaaccggagctacaaagaaggggagagtccgggagcgggagggcgcgagggaggagc

SEQ ID NO: 2561 - DNA, 2300 bp, Homo sapien
tcttttctatttctgctgaaacagtttagcctattcgccaccccttcctgtccccccaccttaacccagccagcctcccctttcctgtctgtggcaggagcgtgcacaggtcctgtccgtggcgcatccgccctgaatcacagaaaacacgcaccccgccgtcaggcccctgtgacctcgggtgtgtgagtggcagttattttcgttgaagccagtgtccctaaccagtatgctctctgttccccacccccaccccatttaaaaaaggcaaggaacccattttctacccacttcctgcccacccctccatttgtatcagaagggagagaaatggagttaagaacccctgtatgtctttggatagctttggctgtgtagttaaccatgaaaaccacagtctacactgtgtcaagacctgagctatgataattgaatccagacccatctcccttttttccctaagtcttgggatcaataacgtgtactaatgtggagaaatcagaattgcccctacagtggttagaagtcattccattccctgcctctgtgactgtccaaaggcagtcagtatagcctggaagactgtcctgtgtaccggttagagtggcccttcctcccgccctcacgggaggtattctgtgttccctcacccagggctaactgggaagtcctccctgagttctaacctcttctgctttctgcagtagacatccttattcagtagattatatttaggtaaataaaaccttttatggtattgaaacatacacacacacaccctgagacaaagtactcatctaaaagaacatctactgaggcatctagggaagaactaagctgtgccacagccaaagagatccctcttaagggtattgaaacctagctgtttacacaaaactagcaagttggtgatggaaagtcttaggagtgaggtgagggcacttttcttggtctgtcatccaggcaggaatgcagtggctcaatcacagctcacttcagcttccacctcccaggctcaagtgatcctcccacctcatccttggagtagctgggactacaggtgggtgccaccatgtctggctagtttttgtattttttgtagagacagtgtttcgcgttgttgaccaggctgctctcaaaactcctggcctcaagtgaaccacccgcctcagcctcccaaagtgctgggattacaggtgtgagccaccgtgcctggccaggaggatttatttttaagagttacctctgcccaatcacaaatcctccagaaagttttctccacaattttctggctttctaattaaaaaaaaaaaaaaaaaaaaaaaaaaaacaagtgtcaaagtgtatctcctgtcttccccgaacttcttaattgcaggaaactctagttacgaatcagggagaacttcctacacatcaaagagaaaaacataatagtgaaagggtaagaggaataagacatccattgcttgtttgtatttgcccaaagagcagagtctgggggcaaaagcgtagttgatccttgcttttaggtacagagacagaggaaaggatggaatgacctcagcctaggatatctggtgtcctatgagtcaggaccatctgactggtcatggagccagctgtctcctgctgggaagggcacaggaaagagggactaggcatattgatactatgcttttttagagccagtttcaatgctacagtgggcctggttaaaaagtgaaattgacagagtactctgggctttattttgcccacttgtgaaaagctccagggccaatagaatcaagacacggtgttctgttttgttttgttttttagagacagggtctcactctgtcgcccacgctggagtgcagtgtcacaatcgtagctcactgctgccttgacctcccgggcttaagcaatcctcccacctcagcctccggagtagctgggactacaggcatgcaccaccacacccagctaattttttttattttttgtagacatggggtctcactatgtttcccaggctggtctcaaattcctggcttcaagtgatcctcctgcctcaacctcctgaaattctgggattataggcgtgagccacagtccctgaccaagattttttttttttaaggcagagtataatctatatcatttactgttaatgcaagaaaatttctaaccctatctcccagaattttcaccagtctcttttgttatttcctctcttaaaggcagggtctcccacaaccacctctgccgtagaatttcttctgtgttcgatagtaatcattttcttccttctcaaa

SEQ ID NO: 2562 - DNA, 2300 bp, Homo sapien
cccaccctctccaccaagggctaacctctatcagtgtctcctgctccccagagctcctaatcagtctgtatgcaaggtagaataactccctttccttcccttcccctaaggaaaacatagtaagttaactctcttcccctggctacattcacacacccaacactttcctctccacggtttctgggctctgctgatagtctcagctctggagaaggagggggagaggagggatgatgcatcatcttgtatccctgtcccgtgtttctgggaattgctcttggacaccccttgccagcaccttgtcctacttccacccgtaatcattcaaggcctctggccactttccagcccaaagccagggaaccctggaaagtgggaggccctggaggagccaagccttgctgaaacaaatggaggtagatgtatgaggcgtcactcacctgaatggggccatgttgacatctgtcctcatctgtcatcagcctccaggtccagcagcagttcagaaggatgggcagatacaagactgtagatggtctgggtaatggaagggagaaccacttccccacttccaggtttccaggaaccaggaggatagatgagttcacctccatgcacacgagtcctatttcagaacttgggaagttggggactgttttggaaaataatttcagtcagggtgggtagatgtcatccaaggaagacgtgaggctacttttatctgtttgtttagttttaatgagacaagtgctggtgcttttaattctcattccaggaaaacgtgaccaggtttttcctgaggtgttccaaccctgggctcaagccacggagggtggacagactgcacggtctggacttgtaactaagtctcctctctgtaactttggtccttgcaagccaaaacaaatccataagccactgcttcagagtcccagagttgtaggaacaccaccttaggggaaaagagaaaacattgtggtcagtttcagatgaacctgcgaagaaatgttcctagagctgctttgcagtgctcagaaaaggctagttggggttggagaatgtcactaggaatgcggcctcgatgagacgttcagcaggagtgctaagagctaaatgttgcttaaaacctgctaaaggtggaaccagagtgcgggacggagactatagcagggagggctaagtttagataggaggaagagcttcctggcagtaaagggggcccaggcactcaaactggaataatggcaagaagtcacagaagtcacttttttccaagtctaaagtgtagtctcccagggagagtctaagtgcattcttgcctagagatagggggtctggaggagttagtttggattgtcacagtaccttagagggaggaggaaagggtaggaactgtaattgtagttttcagcttctctggacaaattcagcaaactgaacacggggctgccgtcctgtggtggcgatgctcctgaaatgaacaaggaagatgagtctctataattgtacataccagagaaggaagcgaggtggggtgggagagctatactgcacacatgtgagtggggaggccagagaccgcccctcgttccctccagacaccccgataactggccctgccttgatcttctttctgtggaccatcaagggccatacaggtctgtcttactgagggcaatggatcaaccatctaccatgtccctttaaggacgtgagcctttttagaacatgtaagctgtgtccttaaggaaaagagtggggcggttggtgaagagaggcatagtgggactctggaagtggcagcctggctaaggagagtgaagagaaggggtttaaacagaaacacaccttaacattcaagacttggagctgccctagcgtcctcctcgatgtgaggaccttgtaggctttgggcagacggccctctcctctcctggcgtgcctccctctcctcaggcttcctctgtttcccaagatgatctaaactaacagtctgggtggaggggctaaataattttatcctcctcacctcaccccaaccctcccctaggtaaaagatgagaaaaatattcaagaggtatttgacctgagtgactatgagaagtgtgaagagctccggaagtccaagagcaggagcaagaaaaatcatagcaagtttactcttgcccactccaaacagcccggtaacacggtatgtttctcctgccaccttggccgctggaacatggacagggttggagggggcaggggagaactccttcccctcagtttctctctcagcaatcttggttcagattccc

SEQ ID NO: 2563 - DNA, 2300 bp, Homo sapien
ctaccatgtccctttaaggacgtgagcctttttagaacatgtaagctgtgtccttaaggaaaagagtggggcggttggtgaagagaggcatagtgggactctggaagtggcagcctggctaaggagagtgaagagaaggggtttaaacagaaacacaccttaacattcaagacttggagctgccctagcgtcctcctcgatgtgaggaccttgtaggctttgggcagacggccctctcctctcctggcgtgcctccctctcctcaggcttcctctgtttcccaagatgatctaaactaacagtctgggtggaggggctaaataattttatcctcctcacctcaccccaaccctcccctaggtaaaagatgagaaaaatattcaagaggtatttgacctgagtgactatgagaagtgtgaagagctccggaagtccaagagcaggagcaagaaaaatcatagcaagtttactcttgcccactccaaacagcccggtaacacggtatgtttctcctgccaccttggccgctggaacatggacagggttggagggggcaggggagaactccttcccctcagtttctctctcagcaatcttggttcagattccctgaattgctctcctgctggcttttatcatttcacctgagaatattgtagccatttccttctttccaggcaggccaccctttaacctgttcagccacaaagatcatctctctatatatctctttatttttctctgtcttatacacacacatccacacatgtgcatatttacatcccttagaagaaaatccctgtccttgtaccctgataggtggttgaagttctgaatctaattcatcttgtctgagggaacccagggaagttattcctgtcacattctatttcttcaaacattgaaagatttgtattttaatacctatccttcatcagacttcctctaattatctctaataccatactaatattcagtatccttcttagctcctccttggtcatttctaaaacaacctcctagctatgcattttgcaggaatagaagctgggtttccttaagttatggatgactctggaagcagaatatctctccttcctggagctaggtctaagaaagtgagattataatctcttatttcttcattgtcaaggtgaggcaccacctctaaaaccctggctgaaacaggaatcttcccctcacaggcacccaacctgatcttcctggcagtgagtccagaagagaaggaatcgtggatcaatgccctcaactctgccatcacccgagccaagaaccgtatcttggatgaggtcagggggctcactgtggggagagggaggaacgctggggcagagggaacagctgtggcccactgaagggggaggattgtgcaggccccgtttactcgctcctccaccagctctacttctttaccgcccttttaaaagccctgatctctttctaccttctctccaagtctcatctgacacctcctcttccccgcttcatgatgggggagccagccttgggtcagcttaaagagcccccttcgtgtccagtaaatccccttgcccattcagaagcagtgaatggagtgggcacatgttcaggcctcgggatgctgggttgggacagcgagtcgctgaagagcactcatgattcacagtacatctcttcaggtcaccgttgaggaggacagctatcttgcccatcccactcgagacagggcaaaaatccagcactcccgccgccccccaacaaggggacacctaatggctgtggtatgtaagactgtaataaacattgccaaagggccaattctgtgtcagtccatctcagacagaactgtatgccaccagaggcatttgcgggaggcctccttgatgccaagatcaaaggcgagggaagtccttccacccaatgcctctgccagatctaaatcaaaaggttttattcagcgcccattaggagttcaaaagtcccagctcccagtaatgttaccctctttcggagaaaatgagttatacccacaggaaaatgaaaaattagctactgtatggtggctgtcttgatgggtaacaacatgtagtaccgcgggtgtttggaggagaaaggatcacaatgaactcctgaaacatacaacgtgctagtttctttcatgcctctgagctcttaagtcttcagagagagaggcaggcaggtataatgcagagaacacaggctttggagttagaacctgagttggaacctcactgtaatcagctacctgtgtggttccctgaagttgcatgtctccaact

SEQ ID NO: 2564 - DNA, 2300 bp, Homo sapien
tagttttatttaaatattactaacttacatactgctttcacccaactgctttcaaaattgttgtcttttatggtgttaacctaccatctttaaaatctcggctctagctctgcatcacggaaggtcagtctctgtgaagagcctgaccccagcaggacaatgccacgaaggcatctttttaatgtgatgcgcacgttgctgtacaccttggttgcaaagcagaggctatgcttttaaaacggccaagagccagtgcgtgccgtgtggtgaattctcagtatcgcaagttgggcacggaaggatgctttctccctctttaacactaacaacagaataaaaaaccaaaaactaaaaaccaaatccaacagacaacgaaactgtccgagtgcctagggaaagcgcgccaactacataaagaaaagtagggggggtactgggattcaaaatcatttctccgggacgtacaccctcctggacctatcaaaattaactgcgcgcttgatcgtagccaataggtacggaatttctggtccagggcctccctgaagactgatagacctttacctagcccaatgaagtaatgtgacgctgaagaatcaaccaacacgtttgggaggtgggtggagtgtaggccagggggttggcggtgccgtgtcatggaggctcagtctctgagcagccattgaaggggaaggaactgcgggtgtgtgtgtgtatgtgtgtgtgtatgtgtgtgcgcgcgtgcgtgcgtgtgtgtgcgcgcgctagtgtgtggacaaggaggtgggggcagctgagttagagtcccaactcttggactccatttgctattctcttctttctcccccacacctatctggtggtggtagtgggcgtttatatttgcgttccttttcattcatttctaaatctcttaaaaattttgggttgggggtattggggaaggcaggaaagggaaaaggagagtagtagctgaagagcaagaggaggacatggagatgaagaagaagattaacctggagttaaggaacagatccccggaggaggtgagatgactcagcccccaccgcttccccatcagtccagtattctgaggatcggatttctggtggtcctgggtgggtgtgcggggatggagtaataagttagcccccatccccccgggttagggttggggaaatgtttaattttaagttttaaatcattaaaatcttctacttaaaatggcgaagggttgaagtttctaggggcgtttttgtgtgtgcatgggggcttagctcctttcggctttcatcgagtcgggcgtcctgacctcgtgggggcgggaagcgggctggtgggggcgctccgccgcttcgctcccggcactcctcctcctgggggccggcggcgtgggcgcgaccccccagtcccactcagcccctgccgcagccataggcgcctgagaagttagtccaacttttctgcagtgcggccaactcatctttttagggggtgggcttccccggcctcgaggccctgggcgtccgacgtcgcgacgggcgcgggctggggtcgcttgcagggtccgcgcactgtctgctccggcggcgcccactcctccgggaagccgcgcgcgccgccctctgcccttcgcccggcggaatctgggtcagcggcgggttctccgaccgcgggcgagtttggggactcgtcgcagtgaccggaggtggagaggggacgggaggcgtaatccgcttcttcccccgccgtgtaacgatatgtggcacgtcgtgtggccgcaactctgaatttgatccctggagacggtttcacaaaactcaacataagggacgtagtagtttcgtgctttaaagatgggttcgccgaaactaaatgatgcgctctcactgctgtcgccttaaagagacggggttgggaggggccatgtgaggcggggtcgcggtcaacttttcgggggtcgggtaggaggcgtttccgcctccttttcgcggttgccttctcggcctcacctacccagggcgaaggcgcgaggacaacgcgggttgggaggcgacccgttttttccttggggagtccccgccccgtgtggggtttcccgtcagtcggagcggcaggtcgcgagagcagggctggtggccagcggggagcctcgcagaggaaagcatcagtcttgctgaaataagcctagaattggaacgtaagggagttgtctgtagctgaatcgaccgatcgatagaaggatataactggggtggtgtctgtgcagatcggcatagaggatgagcagggtctgtctg

SEQ ID NO: 2565 - DNA, 2300 bp, Homo sapien
ttggtagacagtccctccctcttctcttttccccttcaaccatgttttgctctcctttgcctgagaatcttatgtacatgccctatgggattttatttatttatttatttattttgagacagagtctcactttgtcgcccaggttggagtgcggtggcgccatctcggctcactctgtcgctcaggctcattgcaatctcccgctcctgggtttaagcgattctagccggggttacgggcgcgcgccaccgcgtcccactaatttttgtatgtttagtagagatggggtgtcacgatgttggccaggatggtctcgaactcctgacctcaggtgaccacccgccttggcctcccaaagtgctgggattacaggcgttagccaccgcgccgggtcagcatttacattttaaatgtaatcctctttgaggagcagtgtgtctctgagtggggtggagtagggaaggtggagttgtgaggagtctgtgttggaaagccaaagatctctaacctgagaaacaggaaaaatagcaaccagttctgggaggcatgggactaattcccccactttccacttccttccccaaatcatttggaatttatttggttatttatcctgagaatggtgtaagggaataagaatgatataatttaagcaagagctaagaaaaaagttagaccgtcgagacaaaattttaaaagataattctttttatttttgagacagggtttcgcttttgctgtctaggctggagtgcaatagcacgatttcggttcaccgcaacctccgcctcccgggttcaagcaattctcctgtttcagcctctggagtagctgggattacaggcgcacgccaccacacccggctaatattttgtattttttgtagagacgaggtttcaccatgttagtcaggctggtctccaactcctgacctcaggtgatccaaccgccttggccttccaaagtgctgggattacaggtgggagccaccacgcccggccaaaagataattcttatcccactcttttgtatcccatcccacatagacagactgtttttttttccttcttctgttttgaacattaaattttaatcccctgagggggtgcactgttcctggaggtactgcaataccagatcgatgcgtgaagtgaacaagcaagctcctattccgtcttcctgctccccaaatccatttaatatattggactcggatagaaaatatatcagatattaaactgttaagaacagatcctacacttgatcttagccaaaaggcagagaagcgataaacacttttaaaagcacactttacctacagatttccatggaaaccaaccaaagggaaattagagcggcatcgcggtgccatttctatgctaattaatgtctgattttcattaggacagcgtcgtttttcctccaaggtcttagtgtttattacagcaacaattaactcagtaacaattcctccaggatagttttatttaaatattactaacttacatactgctttcacccaactgctttcaaaattgttgtcttttatggtgttaacctaccatctttaaaatctcggctctagctctgcatcacggaaggtcagtctctgtgaagagcctgaccccagcaggacaatgccacgaaggcatctttttaatgtgatgcgcacgttgctgtacaccttggttgcaaagcagaggctatgcttttaaaacggccaagagccagtgcgtgccgtgtggtgaattctcagtatcgcaagttgggcacggaaggatgctttctccctctttaacactaacaacagaataaaaaaccaaaaactaaaaaccaaatccaacagacaacgaaactgtccgagtgcctagggaaagcgcgccaactacataaagaaaagtagggggggtactgggattcaaaatcatttctccgggacgtacaccctcctggacctatcaaaattaactgcgcgcttgatcgtagccaataggtacggaatttctggtccagggcctccctgaagactgatagacctttacctagcccaatgaagtaatgtgacgctgaagaatcaaccaacacgtttgggaggtgggtggagtgtaggccagggggttggcggtgccgtgtcatggaggctcagtctctgagcagccattgaaggggaaggaactgcgggtgtgtgtgtgtatgtgtgtgtgtatgtgtgtgcgcgcgtgcgtgcgtgtgtgtgcgcgcgctagtgtgtggacaaggaggtgggggcagctgagttagagtcccaactcttggactcc

SEQ ID NO: 2566 - DNA, 2300 bp, Homo sapien
ggggagagggagctgtgtcagttttttttttttttaacttacatataagggtccccttgacacctactccaaatcagcacagctagaaagcaacaaaagaaatatccacagtaaagccaaagatcaagataaagtcaagtgcctggaggacggcgctcgccttctggctccctctgtcctagaaaggagggcctttgtcgtctgggaagcataagcacctggatgcgttgctcacccaagatcagggaagtgttgattccaggctaagatatctttgtgaaacaatgttcagttgcgtaggcaaaatcccaaagcccagcagcagtgaaatacctcccagaaggaaccacatacacaaagcattttaaattaaaatttaaaaattcatagacgagccaggaggtggcgcctggcaagacacgctatctgccttggaaatcggaatctcagctcagcgctccaggggaactctgttccggcagaggtcattctgttcagacctcttctttcctactaaatctcttctttcataccaagatgtctctgctttctttttttgtttctttgtgttaagtaccctgattcccgggaaatctaatttatacttcaagtcttttactcttcttagatgggatggatggggctttggggaacctcaaaacataaaactttcctgaaggggacaaataactcagagggtgataggagaagaaaaagggaaatgacatcagcaaaatggcttggctttgcagatcaatcacaggggatagaaaggcacagtgagctcctgtctctgcaggagctgatgatccagcacatgcattattctgttcatttggcttttatcctgctcccttatttagcttctgctccctttgtttggctatttattgctactcggcaggagcaaggagggcagagggagcttcagatgggtgcatcctcctggctggtgcctctggtgaagagcatggaggagaaagaggtttcaatgtctggcttgaaagtatctgtgggtttcacattctctaacgagggatttaggatgtacattccaatcgggatttccagtcccgtggggagcaaacatcagttcacattcctgagacgtgcagcctccatgctccacggacgcagctccttggtggcaggtttcattcagtgccacatgtcctgcctcagccctttgttgggctggaaggaagaccctgagcccctcttccatctggatcacatggtctctccagaccctcccctctctttctctggaaaccacctttttctgatggtggtagtgattgttcctaaagtctctcctttcctcctgccctggcctctctgccggaggtcagtgtcctcttcagtgacaaaagccgccctagatctgggctccctggagagggaggtggctgggtctggcagttacagccgctgtctctccatggtgctgctacacccctcccccactgggcatacaaatgggctttatccagcaaacaacgctccctccccgcactccccccaccccaggccacacaggcacgtggacccaggcctcaccgtgggaagggggtggtggcaggcacagaagagattgctccagatgagttctccttgcctcacttctcttccttagaacttaggacacaactcaggttttagttattgacttcctccacccctcccctgcaccctgagtccctaattccttcttgttatatatctcctaattctggactcttcccattccagggcagctcagattatgcagggaattgggaacaggtacccccaccatctgccgcataccacccagggagctgctcctcagaggagaaatcaggcggggggatgaaaatacagtgtccttttgagggggctgagttgaaccccaaagccccttccttgaccctgcctgctccagggaacacccatctaaacagcatctgtgtgactagcagaggaaggaagagctcaccccagctgggctcctgagccagggccagggctccagtgaaacttgccgcgctccagctccgagtggggccatcctgcatgcctaattggctatttaaggagctgttcaccagcagcccaggcagcacccccgtccccacatacaccagttcagagccaccttaaaagcaggaggcagttgtaaagtcgctggccagctagtggagtggagactgcagagggagataaagagagagggcaaagaggcagcaagagatttgtcctggggatccagaaacccatgataccctactgaacaccgaatcccctggaagcccacagag

SEQ ID NO: 2567 - DNA, 2300 bp, Homo sapien
gaattgtctcattcctatccaccttactctgcctgctgggctcagaagcaggacatactggagtcttgaacacaggtcatgataacgctaccctcttaatttttttttttttttttttttgagacggagtctcactctgttgcccaggctggagtgcagtggcacgatctcggctcactgcaagctccgcctcctgggttcacgccattctcctgcctcagcctcctgagtagctgggactacaggcgcccgccaccacgcctggctaattttttgtatttttagtagaaacggggtttcatcgtgttagccaggatggtctcgatctcctgacctcgtgatctgcctgcctcgacctcccaaagtgctgggattacaggcgtgagccactgcgcccagctaccctcttagtctcattagggaataatttgcctggtgactttccatgtaaatattttctttcttttttttcagagacagagtcttgctctgtcgcccaggttggagtgcagtggtgggatctcagctcactgtaacctccacctctcagattcaagctattctcgtggctcagcctcctgagtagctgggactacaggtgcgcaccaccatgcctggctaattttttgtatttttagtagagatggggttttaccacactggccaggctagtctcaaactcctgacctcaagtgatccagccgccttggcctccgaaagtgctgggattacaggcatgagccactgtgaccagcctccgtgtaaatctatacaatctattcctcagctcctttccagaatatcctggaagacatgtaaaacatgtatgtgagtgtgcacatatggattaaataataaatcacttccaggaaggaaaggaagtttggttatctttaaacaatttctgtggggtttttttttggtactttgattatgctttcaaaaacaatattccagatttctttcctcttttccatcctcagattcctttgcctaacatcttccctaaggactaacctctccccatccaaatgagattacaataccctcctctcctacttaactttctttttcttttttgagacagaacctcactccgttgcccaggctgtagtgcagtagcgcaatctcagctcactgccacctctgcctcttgggttcaagctatatttgcccctcagcctcccaggtagctgggattacaggcgtgcgccaccacatctggctaatttttgtatttttagtagagatggggtttcgccatgttggccaggctggtctcaaactcctggcctcccaaagtgctgggattacaggggtgagccaccgcgctcagcctactttaactttcattcactctaatatacaacccctctcagcctcaggaaaacgcaccactgaggttcatttttcagaaaataaatagaggaagtatgacataaaaggaatttatggcgggggtggggtgggggtgtcgttttccttcaaccccatcgctctaattgcttttaaactcccggactctttcaaaatgccttcctaacatttctctccaggctccttttgcttctctccgattctcttgtcattacagatgaaggcttcattagcgatatactgtattccatgtttattatactagtctgtccgaagagctcctactttttaatgtaatcttcatctcttaggcagcagctctagcccatttcctctcattcaagtaagaacaatacccgtccctatctccctgcgccccatcctgtgctctctttgtatttgtcccttagattcaaacaggatctaccccctctgcagcccttcaagaagaggtatgattgctaccacttttccccacaaagtgacgaaaggaaacagcgacggaagcgcaaccgaaccctggaattggtgtctcgactggtccattcccggcccacccccattaaccggctcgagccactcccaggacgaagtcaaggcctcggaaggcgactacaactcccagcaggtcgagcagctccgcccgcgctgattctccattggccttccgggggtggggattagatgggaggtggccgtggggctgcggccgggatttgtcccctcttcggcttccgtagaggaagtggcgcggaccttcatttggggtttcggttcccccccttccccttccccggggtctgggggtgacattgcaccgcgcccctcgtggggtcgcgttgccaccccacgcggactccccagctggcgcgcccctcccatttgcctgtcctggtcaggcccccaccccccttcccacctga
